United States Patent Application Publication US 2024/0093182 A1 - sequence listing, part 8

SEQ ID NO: 15932 - DNA, 1164 bp, Artificial sequence
  DNA replication origin
atcccgggtccgccgcgtcgtgcccgccccgcgcgcgccgccctcaggtggcaggaaacggggccctgcgcgtcgccttgggcccggatcgccttctcaggctctgcagctccgaccctgcgctgttcccgaccggtgtcggccgctcaaaccttcctccgggcccgataccgccctgaggctcagcagcgcctcccaacgcgaactcgtcgtcggtctccacgcacccgctgcctccctcactgctcattctgtcctcgccgctgcctgccctcctgcttctgcgctggtgccgcgggactgcctcacccacggttccgcctgctcttccctgggctcctctccgcggagccgacggggcctcgcggccacatcaggtctgaccctggtgcgcccctgctgggcatgggccatgctggccgcagcctccagatgcaggcctggcaccggcagccacctgtcctccccagcccaggcccggcaccgcccatcgcctgatcgcctgtgtaccccaccaccccgccccaggtgtcaggataaggagcctgaccctgtcctgaggacgggagtagtggcagttgtttgataagagcctcaggggtgcgggagcacctccgcggaaggccccgtggtatgtcagtggtggagcgtgtccagtagctggggatttggccttggcaagaggcagctatgagaggaagcacggaacacaagcaaggccagactctagggaactctggggaggatgtcccttctgtcactgaaggccagcaccgaggctctgcccgggaccgtctccaatcattcctgtgtctgggtgtcactttttccaggtgcaggctcctggtgggaaaccaagaggccgctcttctgctctcagtgtcagggaaaggcagggacgcccccattttgctttctgtagtttgaggtggactcctagccttcctccaggacagccccgcctcactggctaggcgtctgggggcctcagccgctctgcggggtgtggggcagacaggaccagggagctccatcttgtcgagggaaactcaaactgcaggccacagagccaggagctgcatcctggccacactgaccctcaggccttcccatcaggagcctgtacctggagaaggtgacaccaagacacagggagccccatga

SEQ ID NO: 15933 - DNA, 1129 bp, Artificial sequence
  DNA replication origin
tcagccacaccttcctggtggaggctattcttcttttggaaagcagctcctggaatgctgccttcccaggctgggtttcccagctccacatcacacccctgggcagcccagcagccatctattgcgtggtggaaaaggtgtttgtggtgtttgtggggcccagcccagatgacacaggcgagtcccggggcccaagtgtctacatcgcattcgccccttttgcagctcagatgcctcctggggagggcaccaatgcagaggaaaggctgggaaaggctcccacaccaactccagcctgacctcccccgcatgctgtagtcccaagcagggagatcctggcgggcagcagcaagggaagcccccggggggcacctcatcacccacttcctgtgggtgggaagagtcacttgagcgctgtgtatcactgactccggacaccagtgagggctgggctggctctccagggcctgaagtgaacgagcccgggacagtggtgatgcggacagctgggaaaggcttgggggtggctctgtgaggagcagggaacaccgagctcaaagggaggttctgcatcctgtggggacgctcctagagagagtcggccgcagcgagggcacagacaggctcgtggacatcacgactgcaccatggacgtcagccagcaggccccggggcagagtggcatgggggcaggaatggtggttacaccaacggcatgagctcattttccaagatggatctagagcaggtcccacccacgcagaacaagccctctttacagatcaccagacgtggggagagcagggctgcaggccaataagaggaggctggggaaggcgtgctctgtctggatggacttcctggaatagcctcgagtgcaaaaatagcgtgtccatgtgatggcgaccaggtgtccctgcggcacagaaagcgctgagtcagcggcatggactcctccgaaggcatgtcagctgggtggccaccgctgtgggctggagcctagcacgccctccacgctaagtgcctcgccctgagcccgccgtctggaggcagggcagtttcacttcacacctgctgctctcaagggacacagtctgttctgcctgaaatagactcccaggcacatgtg

SEQ ID NO: 15934 - DNA, 1693 bp, Artificial sequence
  DNA replication origin
cccttccctgaaagccgaaggcccctcctgcatccaggccccagcgagcgaaggctggactgagcgggggggccccaggcctgggagggctcatcacagccccgctggactcagaagagggcgcggagcccagggccccagagggagctctgtcctctccggctcggcctcgccctcgccccaccgcggctgcaacggagcgctgagcccgagcctggagccgcctcgcagtgaggagggggcggaggagagggcgtcgggctcagcgctgccctgactggcctggggaagtccgggcaccactcagcctccccggcctgagccccttgctctaacgtggaacgatacctgcagctttctaagagtccagcaatggggcgcttgtggcgcttccgccacagtgaacgctcagcgtgcgccccgtgggtgtgacttgtgccagggcacgggtggccaggcgaggctgtcgggccacgcgggtacccagcagggagccacgggagcgcaggccagaagcaagcaggcagcgcagctgggtctccacaggtgcgcccgctggggagccaagtactatgattcccacaaccaagctcccagggagcatgggcagaatggcgggatgaggcgagactgggagacgcggaagaccctgcaggcccagggcacggaccggagcagccagcgggggcagggtggagagctgagcccatgtgggaaaatcacagcgaaggagaataaagggagaggcgccgtcaggagggcgggaccccgagtggcagtggacagagataatacagtcataagaataacgtgcgtctaggatgcagagactgacaatgcaagcaaagagcaaacactcaagataaaacccaggaaatcctgaaatgaatcttaagacaaaagggggaaaaatcccagaaaacaaagggcatgaacaacaggcatcagacacaattcgctgaagttaagcctcaaaacaaaatgtttttcaagcacccgaggagaaagagcaaagcacctatgacaggaaagtccggctctcctgaggcttttttctttttgagacagggtctcactctgtcacccaggatgcagcacagtggcacaatctctgctcactgctgcttccacttccccggttccggcaatcctcccacctcagcctccgagtagctgggaccacaggcacacgcctgtgcaccacggccacctccgaaggctttttacagaaacactaaatgttagaagaaaatgaagcagtgtccacaaaattctgcagggaaaacagtaggccaggaagagtatttggttctgcagcacagatggcagggcaggaggtgcagccttcccagtgacagcaagagagaagacagacgaaatcaaagtgttttttaaacaagtgtctgacggcattcaaagctactgaggaaatgaagaacgaggtctccaaaacagtgcagcagggtggtcccaacaccaggcaggtgggcctggcctggcccagagcaaagggtcagctgctcagcagaggacgggccaagggacagacctgcatttagagcactgggtatggcttgggtttagggttgccagatttagctaataaacaggatgcaatttgggggacatacactaagtaaattattcctgtttatctgaaattcaaatttaggccaagcgcagtggccttgta

SEQ ID NO: 15935 - DNA, 1125 bp, Artificial sequence
  DNA replication origin
ggacgtgggcgagatccgggcggtgctgaaggaggtcagcgggggcgggaggaggacgagggcggggggtggggtgggagtgggaggagcggggagcggtgaccgcggcgagctgcgcaggtggagcagctgctgacgcgcgagggcgtgggccacgacgaggcaggcgaggcgcggcggctgcagcgacgcgtggctctggcggagtgcgaggacagctacgggaacacgccgctgtcggaggcggccgcaggcgggcagcccctggccatccagctgcgggccgagctcggcgccagccccaacagcaaggtgggcgccgtgggccgcgggccgccgcgctgaggggcgcggtccagggccctcaggggcctccttcccccaggggcaaggcctggatcttgctcggggggcccgtcttgcagggcgctttcggtccgacgccgctgtaccgtgcagcctttgggggccacctggcagctgtggaggtgctcctgaagctcggagcagacccccgggtgtacgcagaggacgggagcacccctgagcgggtgtggaccccagaggtgtgggccccgggaggtgtgagccccgggaggtgtgggcctcgggaggtgtgagccccgggaggtgtgggtaccgggaggtgtgagtctggcaggtgcacacccaggcagggaaggctcacccgaccggctgtctctgaaagctgtcagaagcctgagtggcctgctagagcggtttcctagccccgccgtgcgccattcccttcctggaagtcctgactttaaaacctcgtcagtctgcagtggaagtggcagcgactcccattttgtgaatgcctttggtgtcgggttttgtgtcatttccttccgtgctttgcctgaggaagtggtgttactgatggagaaactgaggctggcgattccagggttggcagagctcacggcgctgggggcagcacggggcccacccatcggtcccctcactgtcagtacgtcggttttccagagaacttgagccacacagcccagccacagagctcctttctagagcctttgagctatgttagaaaggacagtctggctgtctggccgggcgtgatggctcacacctgtaatctca

SEQ ID NO: 15936 - DNA, 1126 bp, Artificial sequence
  DNA replication origin
acatccctgccctcgttcggctccagctctagtttgacctgggctgtcctgggaggtgtgaggtggtgtgcaacacctcctcgggtgttcatctgccatcattagatcctctttggtgaaatttctcttcatgtctttgctcattttatacctagattgtatgtttcattgttgtttgcgatgtgagttttttctatgttctaggtacacgtgccttgccagatgcgtggttcacaaacgtttgctcctgcctgtggcttcttttcttcttgacaggtcttttacaaagcaaacattttacattctgatgaagttctgtttatcaatgtggtttttttttttttttggattgtgctttttgtgtcatgtccaagaatccctccaagtcctaggccccaaagatttttctcctatgtgttctaaaagttttgtaattttaccctttacatttaaatctataatccactttgagttcattttttataggtgtgtgcttcaggtccacactaacccctttgcctgtggatggccaatgctccagcaccatggagtgaacacacagtcccctggcacccaagggctcccccagcacccccagctgctgcccttctcagctctccgggccaccatgccccaggcagcaggtctgctggacaccccagcacccctgactcccacttgcacctctggacgcctcaccgtatcctcagcccctccctaagcccaccgcctcggccctgcccctcccctccagcccaggaagaaggaccctttgcagacaaggagaaagaagagaggggcaggacaggctcccaggcagcacctacaggaggagagtctgggggtgggtccctagctgggcaaagactctggcagcagtccagtggatgcatctcccaggtgtctgccgtgggccagaggcagaacccagactccaggcagcacctccagatttgtgtgggatgtggggtgaggttaggggtggggtgggggaacataatgactgagatgggagagggactggggttcaaattaagttgatttaaatgaaactaaggtaggcgaggttcgtggtctggttttccagccactgctccaacaggcggagtcagcctcaccccacccc

SEQ ID NO: 15937 - DNA, 1530 bp, Artificial sequence
  DNA replication origin
gaggaactgttgctctcccatctgggagaaagggtgccattatgcagaaagggcctcagtgctcacagctggtgcgtggtgggccccaaagcatgagcccctgtggggctgctgtccccaaagcccaggccacccaggccgctgggaattctcctgggctccctgaccaagtccaagcaggaacctgctcctgtggctgggcctccaagggcttccttccccttcagtcccccaggacctggcccaggcttcccgcctctgtcagactcaagtacacgcctgaggccttgggtgccactgctgcttcctgagtaggaggctggcccgcaggatgtgcacactggagctccctcctctgtggtctcccacagatctctgcctgcaggacacaatccctggggccgccgctgcctctcaccctcctgagtccccagcactccaggagcaaggagtgggtgcagagagccgggctcaaagcccagctgcgccgggtgagtccctgacttcctgtgcctggccctccttgtctgtggagcaggggtgatgcttggagggggtcacagtgaggaggaaggaagagcaggagctcagagcaggtccacatgcgcctggtggcgggccagtcccggcatcacgcttgaccaggaagctgttcgtgggtggctccgtgtgtgaatgccacttgccccttcctgctctgggaagcaggggtgaccagggcctgttgtctagtgtggccagctccctaatagctggatgacagcggaaggaggcaaggcggtagctgagaagggccgggtggggcagggagactctcatactcggaattaggcctgcgaaacagtcggggcccgaggagctgctggctggagagcagaggcctgggagaagaagagcaggtggctgaaggtgggtgccacaaccaagagcagaccgagaaggtgtggcaggcctggcgacggggccaggtggaggtggacaggcacgggccatggagcaagcagaaggcactgcgttaggggtgcgcgggtgagcggccgcattcccacagagcaaggggtttgtggcgtgggaaggatgaagacaggatgaggggaaggaggtggggtgcgcgggtgagccgccggcgttcccacagagcaaggggttcgtggcatgggaaggatgaagacaggatgaggggaaagagcgggggcaggatgagttccctgtagctcttccaggagactggccacagacaagtgcaaacagggagactgaatgtgggcagaactgggaagaactcacagatgcacgggagggagggagacacagcagacgagagggagagaagcagtggcgcggcgtggccttgggtaactgccatcctggctgagtcggtgctgacttaagcatttgtctacagatgcagggggcagagatggaaagaaggggcagtgtagggggcctgcaggtctgtggggggccagggacatgcagacacgtggtaaactcacctccacggccacctgatggatccacaggctaacc

SEQ ID NO: 15938 - DNA, 2389 bp, Artificial sequence
  DNA replication origin
cacccacgaacagcttcctggtcaagcgtgatgccgggactggcccgccaccaggcgcatgtggacctgctctgagctcctgctcttccttcctcctcactgtgaccccctccaagcatcacccctgctccacagacaaggagggccaggcacaggaagtcagggactcacccggcgcagctgggctttgagcccggctctctgcacccactccttgctcctggagtgctggggactcaggagggtgagaggcagcggcggccccagggattgtgtcctgcaggcagagatctgtgggagaccacagaggagggagctccagtgtgcacatcctgcgggccagcctcctactcaggaagcagcagtggcacccaaggcctcaggcgtgtacttgagtctgacagaggcgggaagcctgggccaggtcctgggggactgaaggggaaggaagcccttggaggcccagccacaggagcaggttcctgcttggacttggtcagggagcccaggagaattcccagcggcctgggtggcctgggctttggggacagcagccccacaggggctcatgctttggggcccaccacgcaccagctgtgagcactgaggccctttctgcataatggcaccctttctcccagatgggagagcaacagttcctctccaggctgaggagactcggaacacgcactgagggcccgacaaatgtcgtctgtcactaggtggcctcactggacacagtggtgagcgtgctgcgctcgtgggacctgagcctcacggaggccatgctccagaacatggaggctgagcagcagcgccgggcccaggaggcccagaggcacaaggaggccgaggctgagcggtgtggaaggcaggaggggtgtgggaggtgctggcgaggggtgctggcaaggggcgctggcagggagcccgggcagggggtgctggtgggggcgctggcggaagcctctgtcccagctcattcctgctccttagtatgaccctcaaggtccaacagctgaccagggagcagcagcagtgtcacaaggaggtgagtgtgacctcagggaggagccaggaaaggaggagggagagccgggtggggaggagggggagccgagggagggccaggaagctgggggaagagccaggaggggaggtgtcctcaggcccctgggccaggagtgacctggtcggaggatactggccagccttgccagggcctgcccgtacgcccacccagctgcaacaggcctactgtgagcttagccggaggatctcagagcacgaccagtgtgagtggaggtgcatggacaagaccaagctcacgctgcaggtgggggcccgtggtggacttgatatgcccctgcgtcctcaacacccctccttgttccaaaccagcccagagctccccgctcccaggcctggggtttttccctctcaaacatggggagtcaccagccgacagtggcctgcttggggtggggtggggaggaagctcgggcagctgccctctccagccagagcatggggcagggcaagcaagtcagtgtggcctcctcctccaggccatcaaggacacagaggcccaggtggacaggctgcggcaggaggcccagaaggccgaggaggcgctggctatggccaggctggagcttcgggagcagacgcaggagggtgggcctggcatggggcgccggctgggggctgggacatacagcccagggcggggtccggcgtcgggcttgcctgtcagctgcactctgctaccccgacaggggaggaagaggcgcctgggctgaagtgccaggtcaccgagctgcacgatgtgctgatgaaagatgtaggcaaccgcatccgtgccgatggccggtcagttctccgggccagacgtgggcgatttggggtttggacagacagcagtgacctgatgggtgtccccaggtggcctcttgttattgaccctttgggccaggcggccaccttcctgcgctaccaggataccaactatgtggacacggtgaacccggagcccctgaggccggagacgatgtggctggctctgctgggggctctgcggtgaggcaggcagggtgacaggtacaccccaccccacctccctagccccaccctggcctcaccagcctcatggggcaggtatgggaagccgctggtgttcgacctgcgagaggaagacctgttcccagtcgtgcagcggcagctggaggcggtgcaggagaggtacctgtcgctgctgcggcccacggacgggcctgagtatagccccacgcagttccaggagcagcggctggagcacttccgcctctttttcgtcaccaaggtccagtggccgccagctgagcagctgcaggtgctgctcccagtgcgc

SEQ ID NO: 15939 - DNA, 839 bp, Artificial sequence
  DNA replication origin
agggtgacaggtacaccccaccccacctccctagccccaccctggcctcaccagcctcatggggcaggtatgggaagccgctggtgttcgacctgcgagaggaagacctgttcccagtcgtgcagcggcagctggaggcggtgcaggagaggtacctgtcgctgctgcggcccacggacgggcctgagtatagccccacgcagttccaggagcagcggctggagcacttccgcctctttttcgtcaccaaggtccagtggccgccagctgagcagctgcaggtgctgctcccagtgcgcgtgcagctgccaggcacaggcctctagtgctggccccagtcccaataaaacgtgtgccccggggcgcggtgctgcatctgtgctgcgtgcgtgggggcagcggtggcgtgtgccagtccaggactccggcagtcccgggccccggccggcggacatgggtctgcaggcacttgggggaggccctgctggggatgggcagcctgcccggccgacccgtgcgcagtgaggcgcagcgggagacgtgggagggacggtgagggtgcagccctcggagctcagcctcgcctcggagggcaggaagggtctgtgctagtgggtgggggatggacaggcagacgggaggtaaaatgtagtcaactttattctccttaaaccacaaaatagagtctttggttgtacaaacatcactagttacagtctcgccgaggtctcggctggggtggggcagttagttagtcacaggccagaactcctgtggggtctctttaaaatgctaacacccaggttaaaagacttggggcaagggtggtgctggagctg

SEQ ID NO: 15940 - DNA, 1266 bp, Artificial sequence
  DNA replication origin
tcccggggaggtgctggtctgggggccgaggtctggggggacaagaagcgggcattggaagcagcccatgcggcaggctgacccccccgacctgccctgacccacagaccttccacaggggtgggcgacggggtgggcgcaggggaaggggcctcggccagtcgctccaggggcccccgcgtgccccggccttcctgggacctgctgaggaccatctgtgctcggagagcgtcctgttccaatgacttcatcctgcagagaacagcgggcaggggtgacttggggcaggagcagggacaggcagcagggcggggtggcgaccccacacaggggctcacctggctgccctccacagcgcacgcttctcggcctccagggcccggagctcggcaggggacagggcacgctcgggtgccggtggctccggactctgcacgcgcagccgctcctggtggcgccgttcagctttggccgtccgcaccggggcgccacctcccaggggtgggggggacgccgggctctgcctggggaagggacaggacgtgctgtggggggcaggggcacgtggggtgagtagggggcgtctggtgggcgggtgctcaccttgaggtggggctcgggctggcccagggtggctgctcatcctcctgttcctcctcgcccagcgtctccccgtccagggcgagcctcgcttcggccccagcctctgccgcctcccgcagcatctgcgctctcttctgctgtagttttctggctgccggagggcagggtgggtcaggccagaccagccgagacccaacccccaccccacttccgtgcccctcaccttcctcctcctgcatcttccgcaggtcgtcagcacccaccagggacacgcgcttaggggggccctcggcctggggcacgcgcacctccagctcaaagtacttctgccgctcccggaaggacagctgctccggggaggctgcaggcccaggcgtggggggctggggggagcggaccttgaggtttggctggcattcctccgagatactggggcccccgggcacccaccccaaccacgcgcagcagggaggcgtgctgcccccacacacctgggcaggggcatcctcaggcgggtgagaagtgggcacggccgcgaaggccctgtaggcctgcttcacattggcgggcagctcatccggagaaggcggggagggcggctggggggtggggctcttgtgagctatgctggggcagctgtcggggctgcagctgtgtgcaact

SEQ ID NO: 15941 - DNA, 2206 bp, Artificial sequence
  DNA replication origin
agcatctcttccatcgaccgggagctgagccctgagggcccaggcaaggtcagaggtgcctgcagccggcagccccagggccagggagcccgaggccggtggtgcctgacgggtctgctctgctctgctcacaggagaaggagctgcctggacagaccctgcactgggggcccgaggccacagaagccgcagtgagtgtggtcgccccaccccctcacatcagggcactggagcggggtgcacattgcctgtggggtgctgggtagtaacccccaggaccccctctcctgccctgtgctggccgggtgctgccacggagctacccctgctagtgctgtgttcactctgcccccagggtcggggtctgcagcccctgaagctggactaccgcgccctggccgccgtgcccagcgctggcagcgtgcagagggtgagtgcccagtgtgcagtgccccccacctccgtcctgttgtcctgttcatcggccaccccaggacaaacgccagggccatccgggagggaacctttgggcgggggctggggtgggaggaggccacgtctgacctgcaggctaccccagcctggcacatgcttatcaccctcattctcaacccaagccatgttggtgctgccccacccacacaccctgagctgcggatgggtgacacaggccgaggcatccctctagtggcggtgcgagagcttcacctgctgctgctggggctgcccagccccagagggtgcgagtgggggcagaggctcctgggggattgggcaggcacatgtccccaaggggaggacaggctggagcagctggaggggcgggtgctggggacaggcaggaggatgtgcaggcccatccctccccttagagatacaaataaccctcccagagggtgcgccccaccagccccaccgaacgtgagtgccgaggggtggctcctgcaggcccttgcccaagcggtggggtggtggtgaggggccaggcagggcctggatctgaggcagcgcattcgggggctcttgggtactgaccctgcctcctctggccatgggcagcgccaagagggaggcttccgggaggcccttcatcctcatgaacaacagcacagtcatgggggcagcagtcagggcgccactgagccctgagggctgcacaccacaagtaggggctccccaccatcacctctgtctctggcccctcccccgagccctccctgctctcttctccggctgtcctgtctgctcccatctctcctgcaaagctccagccagcacactgccatggagacagcagctgcccagcccaggcccccgcatcctgtgggaacggggacgagcccctccgtgctgaccgagtgtctggggcatcccctgggctatagtcaggttggggaactgaagagctgctgtggcttttaggcaagccccagggcccccagtccctcctggtcgggggccacagccctgcccatcctcaccccacccactgcctactcctccaggtaccgtctggagcagctggagggaagatggctgaatctccctgctcccctagtggccagcaggtgagtgtcccaagttaacgggtgtgccccatggtgggtggagggcagggcagatggccgctgtgcacagggcccctcctccagggatggggggtcaggggccatcgtggggtgctgttgactccggttttccctctgctaccatggggcctcctgtgtgaggaaggccagggacgctttcctggccagagctgcctggcgatggggtggggggcctgagtgtgctgttcctggaggggctcaagctcctgagaccccagtcagtgtctcaggcccaacacctcccagggcccaccttatccctgcctgccttttgtctgggggtccttgcccccccactgttggcacctcccaacacactgccacgtgggggtggaggtggcagcccccatgagacccagccccagctcagcccctcacaggcaagatgtcagccccacccaggttggtcggtctctctctctctgtctctcccacccccctctctacccccgtcccttgccttaaacccctgatcctgctctcctctgcccccgccgcccccacctgccttttttagacaaaaccaggggtgatccagccattggctcaggcctggccaaggggctccccagcccccaggggcagaggttgtcccc

SEQ ID NO: 15942 - DNA, 1601 bp, Artificial sequence
  DNA replication origin
cccgtcaggcaccaccggcctcgggctccctggccctggggctgccggctgcaggcacctctgaccttgcctgggccctcagggctcagctcccggtcgatggaagagatgctctccaggctgttccggtggccgatgcctgccgcaaaggggttggcaatgacacctggggacacctgagaagaggggtgtgggctaagaaggggggactgcaacccggggtcccacctctggggcaggctggggtcccagcccagaatagtcagcaacggtgagcccaggagccgcgtccctgggcagggctgaccgcgtggctggggcagccttggagggcactccgctgggccccccaggacgctgcagcactgtccccggccggtccccatcacagctcacagggctgccgtggacgtggtcacgtctgcactaggcaagactgtgaagtagcatgatgcctgccactctgctgactgtgtaaagtcatccccaggaagagctgacagccaccaagatgggggaaggaggggcgtgagtagcaggcactggaactgatggggcagaacggccccctcgggtggaaaggctggctccagaccccagtgtgagtgctgggcagggattctgaaacaagggacaccatgcaggaggcccggccagctctgcactccccagagctcaatcacctgtcccaagccagagactggcagggcggagggggcgtctagaaaggaaaggcactcagatagctcaggcagggcagaggggggcgaggagacagggccaggacaggcaggggcttctggttgggcacaagatgtacttgaatcccgagcctggggttaacacgggcagagggaaccatgggaagagctgacttccaagcctgcggcgggcaacgggactgcttcaaacctccacccccagcagcagccagaagcagcggaggaggcagcacagtggacacaggcattgctcaccgccctcatcacagacggggtccctgcaaaatcgaggagctctcagtgtggcctcagggacaaacccagccctgtactgttggttaaaaacacagctgaaatggtaagtaaggggcaggcaaagagatgccaggcaaacacacgggaggcacagggaggggctgctcaggccgggggagaaagggtgtgagttcagagctgtcgagcaggcagacggatgccgtcaccacagaagatgctgtttacaacgatgatacagtcatcaactgtaagcgctcaacaaggaagcagctaaacacagaaagcaaagactagaaacgcgagtgtcgtaaaagcacagttacacaggcagacttagctacgtctctttcagactcacaggactagcgggacaaacaacaaacaaggtgcctgtcttctcagtttctgaaataacaagtcaaaaagccactgggcaggtccaagagaggcaggggtcctggcagagtgggaagcaaggtcccaggtagcccggcctctcatgtcagagagagctgttcaaacacagaaaaggcagacccgggtgctgactccgacagccactaggagctcaccctcttctactgttccaagaataaccttggg

SEQ ID NO: 15943 - DNA, 1060 bp, Artificial sequence
  DNA replication origin
cagaaggcacctggggagaggctgggcatcagcatccgcgggggtgccaggggccacgctggcaacccccgcgaccccacagacgagggcatcttcatctccaaggtgagccccccccaccccagcccgccctgggccccaccccccaacaggtctctcccataccacgtctccccacaggtgagccccacgggggcagccgggcgcgacggtcggctgcgtgtgggtttgcggctgttggaggtgaaccagcagagcctgctgggcctgacgcacggcgaggcggtgcagctgctccgcagtgtgggcgacaccctcaccgtgctggtctgtgacggctttgaggccagcaccgacgcagccctggaggttagcgatcccgccccggggaccgggcctccctctggcccagcccaaggtgttgtgagccgctgacacctctcggggcaggcgacgggtcccctgtgcctctgggtctgggcggtgctctgcggctctgcatcagccgtgcgggctggggagctgtgggcggagggccctgccttccctttctgctgagctccggctcatcgagctgtccagaggcccagtccaagtaggacgaggcacgtgaacggatggtgggaggggcgtgtgtttgggacgcactacgtggtctggtcctaaaagaagctgagcactggtgactcctgcagagtcccatcaggctgctaagggatgactccaagccctgcccaaagcccaccagccaggcagacgccttgggatgctgagggtccccgctcctgtgcctagtggcaccttgctcctctcagcccatccctgggccatgactccagggagcccctctggtgacccctcaacagagaactccctacccaagatctcctgcccaactgctggtccgtcccttcctggactccagagcagaagcccagacggggagttgggatgcgaggtggggccccaggagtcctccccaccagcacggcctggatcctggacaagcctggcctgtctcagggggctcccatctcccttccgtcttcttccccatgcc

SEQ ID NO: 15944 - DNA, 1458 bp, Artificial sequence
  DNA replication origin
tgagggtgtcgcccacactgcggagcagctgcaccgcctcgccgtgcgtcaggcccagcaggctctgctggttcacctccaacagccgcaaacccacacgcagccgaccgtcgcgcccggctgcccccgtggggctcacctgtggggagacgtggtatgggagagacctgttggggggtggggcccagggcgggctggggtggggggggctcaccttggagatgaagatgccctcgtctgtggggtcgcgggggttgccagcgtggcccctggcacccccgcggatgctgatgcccagcctctccccaggtgccttctggatgcacagttcccgtaggcccgggggtgccgggtccctccgcaccagcagcgacagctccaggcagggccggagcagggcactgactgcttcttggtgcgtggcatcccgcacgtcttgcccgttcactgccaggatgcggtccccaacccgcaggccgctgcgagcggccaggccccgcgggagcacctgtcagggaggagggtggcagctggtggctgaggccgcgctgacctgcgctggtacctgggatgggtgcacctctcacagaaccgcctggatgggccgccctaccttggagatgaacacaccaggctcctggacaccaaacgggtggctggaatggtcggagcctccgacaatactaagccccagagggcccccagctcttggcagacggatctcctggggatttagggcgggacaaggacaggcctcggtcaggacagggaaagggtgtgggagggctcccaagagtccgtcccggtccttggggatggcgggcgggggctgccctaatgcccacggggatttctgcgccaccagtgttctgctgcccaggcaggcacgcagcgtgaggacaatatcctcgctgactgtggccatgtggccagccaggagactgtgtcaaggggaccatactgaggagtctggctgtggggcagagccccagcctcaaggagctgcaggggaaagggcgagcaggccggcttcccacctggagtgggccgcaaggccataagagagcaggtcctgggaaggccagtgcccacagctgaagctgggtgggtgcctgggtgggggcttgtgtctcacctccactgggtatggcccttccaacgcggcagccagcaggctgggggccaggctcggcaacccaggcaccccgggggtggcagtggttatgctggtggtggcaacagcagcggtggggggtgaggaatgtggcagagggctgggaggaagagggcccccagcctcccgctccaacagcagggcgatggtgggggaggcagcggtcagcagggagacggcgtggtcatgcctggcctcagtcacgtccactccattaatctgtgagagcgtgcccgaatcagggaggcccaagggcagaaggggacagagggcgcggggcgggg

SEQ ID NO: 15945 - DNA, 1117 bp, Artificial sequence
  DNA replication origin
gaaggagcaggaatgcgggcccgtctccctggcccctgccaagctcgtgtctgtgccctagggcatattcatctctcgggtgtccgaggaaggccctgcggcccgggctggagtccgtgtgggtgacaagctcctggaggtgagtcggcaacctctccgccccgagtggcagctgtgccctctggaggtacatggtccctggtattagggtgcttggctgccttctcccggcctccccaagagttccaagcacaggacacccagacttccgggtgaagccacggaacctgtaaaccccaggagagaatcacctgggcaagtgccacctgggctttccgttgtcaccctggctcccatccagcgccctgattgctcatctttgttctgtgggtacaggtgtgtttttctaccagtgggtagggcagcagctgcacctggcacagtggcctctccaggaggggccgctcctgggctgaccgagaggggtcaggctactggcaggtctggtggggtttggaccctgtatgggagtcctggagcctccacctggacacctagctgttcagccggggcacgggcatccgggggctctgaagaggcatgcgcccttcttgtagggacacactgagggcaggtgagggccctgaagcccagccaggaggcgtctgcccagggctcatatgctgcgtctgctgctcagctctcctgacctttgcgtgggaactgctgctcctgggtgttggggtgggggtgtgggtcagtaacccagcgaccttaggtgtgtgttgggctgtgcagatgggccggaggtatccaggagcggggccatgtgtggcctggccgtgggggcatctgcttgcctcccgtggccagtgtgtgtcctggccctagggcttcccacaccgggtttcagaggacctggtaggggaggggtcggtgcccacgaggaaccttgtggctaaaggtctcgggtgatgtcagcgcctggggcctttcccctcgccctgtgcctcagtctccccatcctggagggagcgtgtggagcccccagcacgtggctgtctgtggcggcactgggtcctgaatacgcacgtggtccctggcccgcaggtgaatg

SEQ ID NO: 15946 - DNA, 919 bp, Artificial sequence
  DNA replication origin
ttctagacaccctgtctgttctgtttccagctgaccctcactatcctgcggcagactgggggcctgggcatcagcattgcgggcggcaagggctccacaccctataagggggacgacgaggtgagcactgcctaggagggcctttccgctgccactggcctgccccaccacagttcacactgatggcacacaggccccttgccctgagaacactcacacgctctggggacacgggctgggcccaaggcacctactgttgtgggatcccgaagtccaagagcaacctgagggtgcctgggtctgtcttcccttcacagccctccttctctcaccagctgcctgtgcaccaggcctggggccacgagccctttctcggggctgacgtgctccttctaaccccctggcactcaggatcccacagtggctagagctcagtcctcctgctggccagggctaggggctgctgggagtgggtcttcccctcctgggtcttctgcagaaggagcaggaatgcgggcccgtctccctggcccctgccaagctcgtgtctgtgccctagggcatattcatctctcgggtgtccgaggaaggccctgcggcccgggctggagtccgtgtgggtgacaagctcctggaggtgagtcggcaacctctccgccccgagtggcagctgtgccctctggaggtacatggtccctggtattagggtgcttggctgccttctcccggcctccccaagagttccaagcacaggacacccagacttccgggtgaagccacggaacctgtaaaccccaggagagaatcacctgggcaagtgccacctgggctttccgttgtcaccctggctcccatccagcgccctgattgctcatctttgttctgtgggtacaggtgtgtttttctaccagtgggtagg

SEQ ID NO: 15947 - DNA, 1039 bp, Artificial sequence
  DNA replication origin
gcggtggctaacctgcatgcctcactggtcctgtcctaacagggagtgtcgtttgaccaggccaataacctgctgatagagcctgctcgcattgaggaggaagaggtctgtactgctcgctctgcactctggccgggccgctgctggccttgcttcccgggctgtgggctcacgcctctccccgcccctgttgcttgagcgcagatccctctcaaaagagctctcagatccagctgggctccaggatcaggacacctcctgcctggggcagcccgtcttggcaggggtgagcggagaggctggtccagctcccatcagccgcctgtggtgctctgagccttacctgcctgcggaggcagcgcagtcctcactcgagggtggcaggggggcctcgggccaccatcacctggaggtgggcaagccccagcccaccacgctctgcagagcagtgccctcctgctggggtcttggggcttctccagctggcgtctgggctggccctggctggtgagtggcatgaggccccattcagctgcctagagaaaagccagaaatggcatctgcgtgctggtggggtctcctgcagagagcacaggcagccccactgcggcccttctagacaccctgtctgttctgtttccagctgaccctcactatcctgcggcagactgggggcctgggcatcagcattgcgggcggcaagggctccacaccctataagggggacgacgaggtgagcactgcctaggagggcctttccgctgccactggcctgccccaccacagttcacactgatggcacacaggccccttgccctgagaacactcacacgctctggggacacgggctgggcccaaggcacctactgttgtgggatcccgaagtccaagagcaacctgagggtgcctgggtctgtcttcccttcacagccctccttctctcaccagctgcctgtgcaccaggcctggggccacgagccctttctcggggctgacgtgctccttctaaccccctggcactcaggatcccacagtggct

SEQ ID NO: 15948 - DNA, 1400 bp, Artificial sequence
  DNA replication origin
ctgctgcagggcatgcagcctgatggggagggccctgtggctcccgggggctggcacaatggcccccacgcaccctgggctcctcgggcccagaaggaggaggaggaggaggaagagggtagtcctcaggaggaggaggaagaggaggaggaggaaaacagggctgaagaggaagaggccagcactgaggaggaggacaaggagggggccgtggtttctgcgccctctgtcaaggttggtgtcagcctcacccctgcctgacccagattcccctggccctcctgggcacccagggctgcggcaggagcagggccgaggcctgacccactggcccctggccacccggagaaggtggtggacacgtgtgctccacagtcggcatcacggccactctcaccagaccccaggcctgccctggcattggtctcagtccatgcttggactccaggcctgccctggcgttggtctcagtccatgcttggaccccaggcctgccctggcgttggtctcagtccatgcttggaccccaggcctgccctggcgttggtctcagtgccagaggcagctctgctggccagtatttgcccgacctgctggcgggcacggagttcacagaagtcaagcatggctgcccactctttgtgggtctccagggcctgtctacatgtgtcgtggtcccagggcagggtctgttcctctcccaagatcactgggctctcctgggatcctctcttgtgttgggcactgcaggcccgaggccctgatggctcttttctgccttgtcgggccctcctgaggtgccacacaggccttcggggcaccagtgtgtccctccctggccctcaagtctcctctccatgggtcacaaagggtctcacctgctctctgggcaaactcagattccagggggagtccccgggtctcactatccctgcccttgatgacactctgaccctgagtgtgggccagtggcatgatagctgagggggcccggaggggccacagcagggacagcccggtgggactctgctcagctctggagccccgcttgtccccaggtgtgtggtgtcactcacgcctccaggatggaggcgcccgtgccagggcagtcgagggagcttgctgtggtctcctctgtcctttctgcttgtggcgggggctgggtgaggcggtggtggtggtcttggcggtggctaacctgcatgcctcactggtcctgtcctaacagggagtgtcgtttgaccaggccaataacctgctgatagagcctgctcgcattgaggaggaagaggtctgtactgctcgctctgcactctggccgggccgctgctggccttgcttcccgggctgtgggctcacgcctctccccgcccctgttgcttgagcgcagatccctctca

SEQ ID NO: 15949 - DNA, 990 bp, Artificial sequence
  DNA replication origin
ctcggtaggttgttggcaaccggtgcttagcgcggggtggctctcaggcagggtttggggactagcctgggtcctgacgctcacctgctgcagaggatgctgggcagcaggggagcctctcggagacctggagcgatgccccgccgagccgcgtcagcgtcatccagttcctggaggcccccataggtgatgaggacgctgaggaagctgcagctgagaagcgggtatgagggtgaggatctggggggcgaacctctgcctgacccctgccctgtggctgctgctcatccttgtccctacaacagggcctacagcgccgggccacacctcaccccagcgagctcaaggtgatgaagaggagcatcgaggggcggcggagcgaggcctgcccttgccagccagactctgggtcgcccttgcctgcagaggaggtgggcatggagccacggcaacctggcgggccgctgacccgggagctgtggtggtccggtccatcctgggagtggggctgtgagggccagggcagcacagagaaggagcaggagatgaggctggtgacaggtttcagggacatggagctgcagggccagctgggtgaagggtgccagggtggacgtgtgggtcgtgcagggcgggtctgtggggctggagtatggggagaaccagtggtgggtgtgcctgggagcacagggaatggggtttggttgtggggtagggtctctggtggaactgccgtgggtgtcatcggcacctgggaaggggtttgggactgggacagagcaggcctgactgttctcactcagagctgtgacatgcgtgctgtgggtttttgggtgcagcagaaccagtgatctgggctggggtagggtgtgtggggccgtgcatgggaggggaggaggttcatatcacgctgggattttcctgggaacttgtgtggtccttgtttgttttaggaaaggctttccttggggctgggctgtggaaccgtgg

SEQ ID NO: 15950 - DNA, 886 bp, Artificial sequence
  DNA replication origin
tgctgctggggggtgctggtggcagcctgacgtggagccactcaggaagggctcttctcttgtcagagggggagcatgctggccggaggtgaggcggggcagtgaggccagggcaggggcctttgccgtttaccgtgaagaatctaggtctcgtgtttatcgctgtatgttgtaacactggggagcggttacagaagaggcaggaatgggaacttatttgtctgtagggaagacagatggagagcaggctgctccccaggggcgtctgcctgcccctcacaaagcagggcaagctgaggcaccaggccacggttcgggacggtggtgttgctatccccatccccaggctgggaaacaggagctagctgtggggagggtgttcatgggagtttccgggggggttcctcactggggagatggagaaagggactctggggttcagggccctgggaaggggctggccctgagcaggcaggctggaactgggggcctggggagccctagggatgacagggcagaccagtggggcaccagacaggctcacagggcgcagcctcgcaggtcagtccagggcacccatgggagagggtcagggatgacctggtggggtgttttggtggtggggactgaaggctgagggcagtgggcagagcttggggagcagagggcacgaagtggggtggagacagcttctgtggtcaggtccttgtcccggtctccaggggctgtgagggaccctggctggagctggcctggggtgtctgtgccctcctgccaggggctgtcatctccttcccacccccagcaagcccctagcgtcctctgacctcctcttcttggccaggccctgccccgctccctgggaaagctgactaagctgaccaac

SEQ ID NO: 15951 - DNA, 1329 bp, Artificial sequence
  DNA replication origin
gagcagatccgacagcaaggggcacctcgggagggcaggcgggtgggagctgggtgtgggggcgtatagtctcttgagcacggcgcagcaggaggctttgcctcatagtcactattttctctgttccttcttgcagccagacactctgggggctctgcccaatcttcgggagctgtggcttgaccggaaccagctgtcagcactgcccccggtgagtcagggtggggctggccccctgcttcgtgcccatccgcgctctgactctctgcccacctgcaggagctcgggaacctgcggcgcctggtgtgcctggacgtgtcggaaaaccggctggaggagctgcctgctgagctcggcgggctggtgctgctcactgacctgctgctgtcccagaacctgctgcggaggctgcccgacggcatcggttagtgtgcctgggggtgcctgggtggggcacacggagcctggccctgggaggagcgtggggcgtcggggctgtgtgtggtgtggaacacaggggaggatcctgagtgtgcccaggctctgggagctgtccctggggaggggaggtgggaccctggggcagcccagaaggctgaggaggcagctggtggtgctggagggggcggtggagtctgtgagggcggaagggtggcagtgccactggggcctggtgttttcttgaaggaggttgggtcaggcttgtggggcaaggtaggtagggtcctcccgaagtacggcggcggcagaaggggctgggggccttgctgtctgccttgagggcgcttctggccaggtgggtaaggcacgtctggggaccatgctcagccttgtccccctgtctccccgacgccaggtcagctgaagcagctatccatcctaaaggtagaccagaatcggctgtgcgaggtgaccgaggccatcggggactgtgagaacctctctgagctgatcctcacggagaacctgctgatggtagggtctggcttgggaggcagaaaggatggggccgtcgggggtgcagaacaaggacagggcatcagcctgtgtctgctgctggggggtgctggtggcagcctgacgtggagccactcaggaagggctcttctcttgtcagagggggagcatgctggccggaggtgaggcggggcagtgaggccagggcaggggcctttgccgtttaccgtgaagaatctaggtctcgtgtttatcgctgtatgttgtaacactggggagcggttacagaagaggcaggaatgggaacttatttgtctgtagggaagacagatggagagcaggctgctccccaggggcgtctgcctgcccctc

SEQ ID NO: 15952 - DNA, 1309 bp, Artificial sequence
  DNA replication origin
ggtgtcttctcagagtggaggctggtgtgaagagtagagggaggcagccacagtgggcgtgtgtaccgtgtgtttctttcctttttttgcaaatggggtgtcgtggttagaccccaggacccggtgtgacctggagcagacagaggcctagggactcttgacttgtgacactcacgtgtccaggagctcttctctgctctgcagtggtctctgccacagagtccgtgtcctccctgcccacagccttttttccggctgctgaacttgcgcaagctgggcctgagcgacaacgagatccagcggttgcctcccgaggtggccaacttcatgcagctggtggagctggacgtgtcccggaacggtggggagcctgggcaggggctgggtggggtctggggagtgtccgctggggctgcagacggcctgcaggccatggcatctgtccactgtgaccctctgtgacagatatccctgagatcccggagagcatcaagttctgcaaggctctggagatcgcggacttcagcgggaaccccctctccaggtgggtggcagcctgtggtggggtcggtaggggctatgggtcccacagccctggactggtcatccgagggcctctgcttcctcccatccaggctccctgatggcttcactcagctgcgcagcctggctcacctggccctgaatgatgtgtctctgcaggcactgcccggggacgtgggcaagtgagtgccttctcaggtggaactagggtggggtgggggaccaggattggccctgcccctgctgccactgctttccttcctcttgccccagcgcctggtctctctttcagcctcgccaacctggtgaccctggagctccgggagaacctgctcaagtccctgccagcgtgagtgtgacaggcattctcctaacagccagggcagggccacagcccagggaccagggctgcgtggccacacctccaccctgcttcctctgcaggtccctgtcatttctggtcaagctggaacagctggatctgggaggcaacgatctggaagtgctggtgcgtggaggcctgacagggcagagaccggagggcgggccacggaagcaagggcaaagaaggggacagcgagcagatccgacagcaaggggcacctcgggagggcaggcgggtgggagctgggtgtgggggcgtatagtctcttgagcacggcgcagcaggaggctttgcctcatagtcactattttctctgttccttcttgcagccagacactctgggggctctgcccaatcttcgggagctgtggcttgaccgga

SEQ ID NO: 15953 - DNA, 1437 bp, Artificial sequence
  DNA replication origin
cgccggccgcggccgcgtccccgtccagtctcgggcggcccgccccctgcctgcgccccctccccatgcgcggcgcccatgcggactgagccccgccccccggccccgagcccgccgagcgccgccgccggagcccgcgccgcccacccgcaccatgctcaagtgcatcccgctgtggcgctgcaaccggcacgtggagtcggtggacaagcggcactgttcgctgcaggccgtgccggaggagatctaccgctacagccgcagcctggaggagctgctgctcgacgccaaccagctgcgcgagctgcccaaggtgagcggccgcccgcacctgccgcccaaaggcgcgcccccagcccgtgattcctccggcggcagaatctgcccgggcgagtcaccgcagcctccagccggccctgctggtttgcactggccaggtccccaccccagccagccccacccttctcttccagccgccctggctggcgcaggtggcagcggtcatcaggtgcttgcctggggatagcgattgtcaccgagcctggaggcggagcctcagagtgaaacccgtggggattcagggaggtggatggggttagggtggaacttggattcaggtggctgatgagtactagcttcttgggccgctctggaggtgggtccagacctcctctccttttttgctgggtgcaggggtgagtgggggagccctcttgatgtactctttgctctcggatctgttcgctgtccccctttctttacccttgcttctcgtggtcaggtgctctcctaaggctgctacaagaaaggaggctggagaaagcagattaaaaagtatttcttttctggagatggggtgctgggtgatcagtacctaggggttgggtgtcccaaagaatgtgaccctgttctggccgtggcagtgacagctcggtcctctgtggccacctgcaggcctcgcgcgtagcactgtgcctgtggtactgtgttattgtggggagcgtttactgagttcttgctgcagaaccaggccaggcttgttgtcaggatgcagtagcagaggccagtgtgggcccctggagggtggcagaagtggttcaggggctgggtgggccctgaggtaagacacagggtaggggattggggctttgtctggtcgccagcaggtgtcttctcagagtggaggctggtgtgaagagtagagggaggcagccacagtgggcgtgtgtaccgtgtgtttctttcctttttttgcaaatggggtgtcgtggttagaccccaggacccggtgtgacctggagcagacagaggcctagggactcttgacttgtgacactcacgtgtccaggagctcttctctgctctgcagtggtctctgccacagagtccgtgtcctccctgcccacagccttttttccggctgctgaacttgcgcaa

SEQ ID NO: 15954 - DNA, 1068 bp, Artificial sequence
  DNA replication origin
ccaggcacctggagtcatcacaggtgagtcttaagtggtaccagatcctctcctctcctgtcctggcatctctcggctcgctgccctcagctgcctggccctggtggtctgggcacaaccctctgagcccagggcaggccagctctgtgcctttctgggaaggggggtggtagggagtgactgatggacctggttggttttcctgcaggtgtgaccccagcccgtcctcctatcccggtcaccatcccctcggtgggagtggtgaaccccatcctggccagccctccaacgctgggtctcctggagcccaagaaggagaaggaagaagaggagctgtttcccgagtcagagcggccagagatgctgagcgagcaggagcacatgagcatctcgggcagtagcgcccgacacatggtgatgcagaagctgctccgcaagcaggaggtaggcagaggggcagggtggtggcgggggagagggtaggggggcggggccgcagtgctcagctgtcttcccctcggccctgccccacagtctacagtgatggttctgcgcaacatggtggaccccaaggacatcgatgatgacctggaaggggaggtgacagaggagtgtggcaagttcggggccgtgaaccgcgtcatcatctaccaagagaaacaaggcgaggaggaggatgcagaaatcattgtcaagatctttgtggagttttccatagcctctgagactcataaggccatccaggccctcaatggccgctggtttgctggccgcaaggtggtggctgaagtgtacgaccaggagcgttttgataacagtgacctctctgcgtgacagtggtccctctccccggacttgcacttgttccttgtttcctctgggttttatagtgatacagtggtgtccccggggccaggcgcgctctgcccagcccagcctacagtgcggataaaggtgcggatgctgctggccctgaacgtccgtgtgtctgccgtcggtcctgtcaccgatcctgggcgtgtgtccttagggggtctagggcgaggaggcagggttgggggggtctct

SEQ ID NO: 15955 - DNA, 1051 bp, Artificial sequence
  DNA replication origin
ggcggggtcctgcgacccccacactatgactgcagggatggagcccgcacctccctgtcatgtggggagccctccccacagcagggctgggtgggtgggccaggaggggagtgggctgcccagcttcctgccgcccctgacgagccagcggttctctcccctctgtcctgctgcagatggcggctcagcggcagcgggcgctggccatcatgtgccgcgtctacgtgggctctatctactatgagctgggggaggacaccatccgccaggcctttgccccctttggccccatcaagagcatcgacatgtcctgggactccgtcaccatgaagcacaaggtcagcaggcttggtccgccccggccacttcgggctcgcccccacccctgggctcgcgcagcctgacaggtgtgtccctgtgtctagggctttgccttcgtggagtatgaggtccccgaagctgcacagctggccttggagcagatgaactcggtgatgctggggggcaggaacatcaaggtgaggcagggagccaaggcctcgatcccgcaggcgtgcagggctgcccctccacggaagccttttgtggccgggcctgggttgaccggtctttccatctcaccgcctcttccccaggtgggcagacccagcaacatagggcaggcccagcccatcatagaccagttggctgaggaggcacgggccttcaaccgcatctacgtggcctctgtgcaccaggacctctcagacgatgacatcaagagcgtgtttgaggcctttggcaagatcaagtcctgcacactggcccgggaccccacaactggcaagcacaagggctacggcttcattggtgagctggggtggctgaggcgggatgggggccacctgaggctggggctggccctgctcactgctgctcctgcccacagagtacgagaaggcccagtcgtcccaagatgctgtgtcttccatgaacctctttgacctgggtggccagtacttgcgggtgggcaaggctgtcacaccgcccatgcccctactcacaccagcca

SEQ ID NO: 15956 - DNA, 1313 bp, Artificial sequence
  DNA replication origin
gcagtgacaatgggctttggagatcctctctcacctttgcaatcggtcaatagaaatgctcacttcttccggggctcatgtccttagtcagggctagaggggggcagtgcagcccacgtgctggggaccttgctcccctggccggccctgcccgccagctctggacgagcgcagcagagcgccaggcgtggtggggccagtggtgtgggcacccacccgggaccgcccctggggaggcctccatctgctctgagggcccaccttaaaactaatcggccaggtaactgcggagggcagccggccagggcgggtagctgccagcaccaggcccgtctgcgcccacgccacctgcacgcacggggtgtgcccacggcctccagccccgtcagtctccaggctgcctggctcttgggttggggtcaggcccctgaggagagaggggtcctaactcatggccccatcagaccctggagggaggatggttggatggggtgggggtggggggacccaagcgagcaagggaagggcaagcagggccttgtgcctggctgtcagcaaggggcagaggccacgcagccagggcggaggaggcaggggccatggctatggccttggctgtggtgggcagaggagtgtgggaaggaggtgtccctcccttcccccagaggcaggctcaggaggaggccaggtcccatctcggggatcctgaggggaagatgtggacccttctctgggagcctctgttcagaggggtcatccctgtgtgtggctcccatggggcaacacacgccttgttctctctgggaagcatctgaatgggagcccgggctgggggtctggtcagggagagagctcttggcctgcctgggggtggggccccacactgaaaaggagacatggccctgtcttgggggaaccatgacctgagggacaggcctggtctcgtgtctggggagcctgctgagtgagggggatgtgattccacctttgggggggtcttgctctgagtggggagcctgaggtctgtcagggggcccagtgtgaggagaacacagtctcgttttcagggaatgcctggtttgaaggaagatatctcaccttgggaagtcccttgatgtggagagatgcttccaggcccctctccacgggatggggaggttcggcctgcattaggccagctgatgtctaaagagggaaactggtctctggccacaaggccttttgtggagaggggcagggcctggctccagctgtctgctttgcctgccctggcccacaggctccctgtggcccactgcgtgtggctctggaag

SEQ ID NO: 15957 - DNA, 1308 bp, Artificial sequence
  DNA replication origin
gcagacagcggcaaggcccggagtccccgccctgccagggaggccgcctgccttcccacactgccggccgccagcacctgcccaggggggccgcagcgccccatgtgccccgccctgcagccttgcagctgggccggctggggcagaaaggaagggagggaggaagggagggagggaggagggcagtggagcacagtgaatggccaggacatctcctggtagcgtgaatgtctgagggctgggcgggggggcgtgaggctcgaggcccaggaacctgtcggcctcacaccggcctcttcccacgaaggtatcgcagcctccggccacaggcctggagcagggccccaagggaggtgcctccagactgtcccctcagtcctggggctgagcccaggtggtctggactcactgcaggggtgagggcctgagcagtcttatccaggccacgggggcagggaggcccacgccctgcatgctgccaccatcggctgtgcacagctggggcagggagcacgggagagaccagaggccacagtgtgaagaccaggaaggggaaaagggtagagctgcagccaagcagccaagaaaggggctgcggcgctttaggggctccagcgagcaacaggtgggaaaggctgggccactcgtgcctcagagaggaccccgggggtcccgagcatgagtctttgagaatcggagcactgtaacagcttgcggggacggccgcaggcccaggaggaggaagagcgtgaagaggaggagatggtggctgtggtggggagggcggtagaggctccggccggggctcacctgcaggttggtgagctgctgctgctggtgcgcgatggtctgcttcaccagcacactcttgatgctctgctccatggcgtacttcttggcctgagagaggcggcagtgaggagcactgggggcccagcccatgggagacaggcctgccccgcaccccgcccctgcccctgcccccagttgactgtcccacacctgcagtgccctgggaggtccatgctcaccttctgaagggcctcctgctgctcgggcgtcaggggaggcagccccagcttggcggctgtgctctgcccgttctccatcttgatggagtctgtgccctggtaagggagcaggggaatccatcagcagcaagctcaagttctccttcacgtggccccaggagggccacccctagcacagactgtcccctgcctggcctgtactcaggccagcccttctgacattgctgtccccagcccaggccactgtctcccccgggacccatggggtagaacacag

SEQ ID NO: 15958 - DNA, 2313 bp, Artificial sequence
  DNA replication origin
ccttagctcgggaggagagcaggcctgggcggtggggtggtgtgcctgtcgttacaacatctccttcctgcctgcagcaggtcaatggccagcaaggaggggggtccgagccggcggcggcggcggcagtggtggcagcgggagacaaatggaaacctccacaggtactgaccttaagcatcctctccctcaggcccgcccgcctgcccgcccgcccgcccgcctgcctgtgcgtccctgggcccagagagggctggctgggggcggggcgggaggaacctcgggaacccttctctgcctctgggcagacaactgcccgcaggaccacggccctctccccgcaccagccctgcaccctccccacccaggcactgagctggcctttgccctctgcatctgccctgctccaagcaccaggcggggcctgttgacagtctggctgggcggggacgccggggcctggagctcgcgcgttcttaggcatgagcgtcttgcaggaagggtgggccaagcttcccagaactcgcagtgcttgaggagccagaaggacagatttcatttcagacctctgtgttttcatttaaataaaacagtgaagcaatgcgcaagtcaaagcacaggtctggttgggactcagccctccccatcttttttcggccccaggctccagagtgggtgcaggtgggtcttggtctgttcgatggcccagccttgggagcaggtcctctcagaggtggagctgggcctgtggctgggtagttgggttctttgtgcttctccatggtagcgcccgcctccagagcattccagtggggcctcagcaaggtggcctggcagcctcttggggctgggccctcctcttggtcccccaggcacactcagggggtgggactgggacatggtatgcagcttggatcctgggagatgtgggggctggtgctccctggcccttggctggcgcccagccggccattggttggtgggagaagggccttttgtttaccaagacaaagaggagattgaaaaatgtctgggggctgagggggttggcattgattaccatggtgacagcctgctctcaagtcccagcctctggctcttgggccctctttcccactaaggaggaatgggcttggggccagctgtgagggtggtgaggacaggcctagtgtgagccggactggggcacctggtgctgagggtggtgaggacaggcctagtgtgagccggactggggcacctggtgctgagggtggtgaagacaggcctagtgtgagccggactggggcacctggtgctgagggtgattaggacaggcctggtgtgagccggactggggcacctggtgccacccacagccagcctttgaccttcagggactggttggggctctggttgcctggggaggggtctccagggcttcctgccctttgagcctgggccagcatcccagcacttggcaggcaggagggggttcttggggcttgggccagcctgtcccttcctgcctcctgtgtccctctgtccttgctcatcacttctgtgctggggacccttctctcttctctgctgtccctcaaggctgtgtctggaagtctcggagggcccggttggtgggccagtgatctttgtgcttgctgagctggaggacaggcgcaggcatgctgtttgcccatcccacactctgatgggcctgctagccatgcctccctgctcacacagctgcgttcttccctctgcaaaaagcttagagatggattttgacaggagggacgtaaacataatcctggttggcatcagcttgggtctgcagtggctgtgactgcccaagggcctcttggtccccaggcccacctggctagggtgccagtggggtctgctcctggcttctcccagtgggccaggcaaagcccatgcaagagtgtgtggaagtgagctggagccctcttcagggcttgtgtggcccgagagaggcctgtgttctctgggaggtgtgcacagtgcctgcggggacggtggggggagcactgttgggagagaggcccttgtattagctccttgggtgggccccttgaaactccagggaagctgagcctgtgtctgtggcagggactgtgaggaagcctggaggagcctgggagcaaggagtcccagaacgtccagagagccgtggcccttttctcctgccttggaggacggctgaggctggctctcctgccgggcatgtgatagcagctctggggtcagactgacaacaaggggctggaccccttttctgcctccagctgtttatcttggtggttcccgaggagg

SEQ ID NO: 15959 - DNA, 1578 bp, Artificial sequence
  DNA replication origin
ggccatcgaacagaccaagacccacctgcacccactctggagcctggggccgaaaaaagatggggagggctgagtcccaaccagacctgtgctttgacttgcgcattgcttcactgttttatttaaatgaaaacacagaggtctgaaatgaaatctgtccttctggctcctcaagcactgcgagttctgggaagcttggcccacccttcctgcaagacgctcatgcctaagaacgcgcgagctccaggccccggcgtccccgcccagccagactgtcaacaggccccgcctggtgcttggagcagggcagatgcagagggcaaaggccagctcagtgcctgggtggggagggtgcagggctggtgcggggagagggccgtggtcctgcgggcagttgtctgcccagaggcagagaagggttcccgaggttcctcccgccccgcccccagccagccctctctgggcccagggacgcacaggcaggcgggcgggcgggcgggcaggcgggcgggcctgagggagaggatgcttaaggtcagtacctgtggaggtttccatttgtctcccgctgccaccactgccgccgccgccgccggctcggacccccctccttgctggccattgacctgctgcaggcaggaaggagatgttgtaacgacaggcacaccaccccaccgcccaggcctgctctcctcccgagctaagggctgagctcctcacggataagcaagggaggccaggcagggaggcattcccgacatgaccccccagcccaaactgccctctcttcacacccatcagcacgcccagggacccagtcagaagcagagcggagcatgggctgggccagggctgccagcgagtcccagcggggatggggaggagggtagagagagctgtgctcctgccccaggcaaaagaaagccatcctctcctgccggcaggctggacggccaaaggaaccggctgggtgtcccccatgccctcctgaggcagcagcggtgccttcctggcaacctgtacacaccttggccagcccacaactcagccccagctccagtgccttccacaggctctggcccagcccaggtcccagttctctcctgaagacacttttaagcagcatggtgggcaggggtctggatgcgcaggcctcccttccctggcaacagaaccatccagagctgtctcgcaggaggacggccaagaggttagccctctgcactcagtaagacccacacctaagggggcacaggaaggaggagcagctccacaatggtcttgagggatggcagggcaaagacaggccacgggcaggaaacgggtaacgctgtgggggtcgggagatgatggaagggccttgagacctactctaccttctcagaggctgcacaacgagaagcaaggcagcatgcagtcaccccactcccagctcaaggatgagacccacaatatctaagaacagaagagatcagcgtgcccacccttggagccatgtgcgcaaagccagaggctgggctgacccaccagagtgtcccaggtccttcagcctccagaggaggagcagcaccaccagcc

SEQ ID NO: 15960 - DNA, 2260 bp, Artificial sequence
  DNA replication origin
cccgggggcgtttaccgttcctccccgccccggaagcgcgttcttacctccttcctcgcgagagttccgtgcaccggcacccagatcgcgcgagacagcggaaggagcaagagtgggaggcgcgcgcggaggccgcgacggacgcaagatggcgacggcgaccatagctctcgtaagtgagcccccccatgagcgcgggcggccctcggcttgcggggccgggtcgtcgacccagcctgggcgcggagggcctcccaagaacgcggcggtcttcccaggtcccgcgcggactccctcgtgtccccgggtcgcgtgaggcgggggcggggcgggcgcgcgccggcggccggctcgcggcctcagcttccggcctgcggaccccagcttccggcggggcggggcgggggcctgggcgcggcgtgtggcccttgcgggcgagcctggcggggttgcgttcctgtccgctaggtccggcaagcgggggtcgtcgtcctccctttgccgacgggggtgtgcgccgtggtcacgacggaagcggggttctgggggtgacgcgtgggccttcgggttgatgggatcagaaggggacgggacctgtagaaaggggcctgcagctcagagcatggggcggccttggctcactacgcctgcagctgtgaattcgttctccggtgctggagagggatctggttatctccattctcttgtctccacgtggaaaggaaggacgtgcgctctcatcctacgtgttttgagaaatcgcattgtccccagctctgcgggaggatctggggacgcagtggggaaccagacaggcagttggaggtctagtgcgcaccagaagccagttcccacccagggtgccatttgctgggcgccctagggagctgcgtgggcatccagaggagtgagtcgccccctgctctgctcagtgcccacttccccgggcagggcaggcgttattaacgtagagggagaacacccatgcacacaacacatgcacgatgaagtctggtctttccttctcaccacttagcttataggacctaatccccttttggacctttctcagccgcagtttacccctgtattacttgtcacccttcccccagcccacacccagcgggatgggataaggtctgtttgagaagacagcttgggcaaatggctgaaggctggactggcaggaccagggagtgtccttagactgccattgccaggcccccagcgggcgggctggtcccatgtcccactgaggcagaaaccagttactagggggagagaggcatttacacaagatacccagcttgcgagggcagcccagtgtgtgattcacaggactggctaactccactctttctactatgtcctttctcttgaagccacaggagtaagtgacctttgaggggcactccagagagaaaggatgtaagggttgaggacctggtgactgtcttcaggcagcagtcagagagttgatggtgaaggaggaggaggctcagagacaaggactggacatgggaaggtggaggaggagagtggatgcctgactcccctagcacccgcagaacagcgccctgtgctcatgagggttaaatgggggctcaggtctgctgtggcgtggtgccagataggtggtgtcattgttgagttggacgtgggccataactgaccccacgaacgggttgtctgttggggtgtttgttgccatccaaattctgttgggtttaatacgtgtttttttatcgtcaggtttcaggcttgcatccggctccaggagtgagctgtagcctgtggtctaacccattcctcttttaatcattgggatggaaaggcttctagaagggttatctgttcccaccgtcctggttgggcacagtgatgagagcctgtcccctgtctcatgctgcttcagctctcatgggaggttgaatggagcagctgaacttggctgacagtggcctggtggggaaggaagccagaagatgcagaagggcctcccctcccatgggcatgccttctgcctggtggctgcagaatgaggccggctgcctctttgcagcaagggtaggtcttctggatgcatcttttcactttgacgcatggctccgttctcttcactgacagccagaccagctctcatttggggtcatcacccttggggttccagttcctttcttctgtaggccccagcctgcaatgtcacctcatagagaggcccccggctgccatggcctggcatagctcatagccactcctt

SEQ ID NO: 15961 - DNA, 1835 bp, Artificial sequence
  DNA replication origin
agtccgcgcgggacctgggaagaccgccgcgttcttgggaggccctccgcgcccaggctgggtcgacgacccggccccgcaagccgagggccgcccgcgctcatgggggggctcacttacgagagctatggtcgccgtcgccatcttgcgtccgtcgcggcctccgcgcgcgcctcccactcttgctccttccgctgtctcgcgcgatctgggtgccggtgcacggaactctcgcgaggaaggaggtaagaacgcgcttccggggcggggaggaacggtaaacgcccccgggaggggcgacggaaggggcgtgctcttggccgggcgaggggcgtggcccgcgcacctcgggcgtctaggggcgtgcgccgcgggactcgagtcgggcgtatctctccgcgtggccgacgcgggcgtgcgtagtacccttcgccgcccgtcgcccttgcggccactgctacgcttctcttctctgccttttttggagaaaacgctgtcgcgtgcgtcgtccagaggctctcccccaggaggcaggcgaaagagcggggccctcctgggctggaggagtctcgggtgatgaaaggcccgcgtgtttcaggctgacgtcgtgagatgcgtcgtccccgcgtcgcgacatccctgggaccgggaggccccgttcaattggcagctttttctccttccagggaaccgatgaccctaggttggctgacatcagtcgctagacccgcagcccgcaggccccgttagtccctgaactggctttcatggcccaaggtgtctgtcagtactgctgggaaagctgcctgtcctggacatttgccatctgctgcacccagtcccgagaccccaactcggtcatccgaagaagccacatctgtaagctcaggcaccttcagctgcctaaggccacaaggcatcccgggcaggcctcctttcaaccctgggaacatttagaatttaatacagacacttctacttaaatagggcagaatattccccgcctccctcctgaaaccttccaaaattataggaaaggggttttataaagacaaaccctgcaagggcaaagagctgggatattgcagagcttaagaaaggtggacagcgagagctactccagcccacttggctatggaggccagtgtctgagggtcgtgggtgaaagcacagctacagaaaggaaaccccagacctctgtccctacccaccggggctggcaggcactgcagtgtctgagacgtgagctccaggagaggagctctgaggccctgctcaagcaaggccctgtctgaaagcctgggagtaagtgagactctgggtcctacccctgcctccacccctgggctgggtctgaccacccgcatgccatcaggcttctcagagaagagggctcctctctgcagcagctcctagctcaaaagaaaagactggcagggcacctaggggtagagtgttgcccagtagaatggcccagccagatccctggcctcgaagctcaccaggtcataagccccagccactaaaagcatctcactcttcaatgcagctggacagcccaggatcaccagacacctgagaaagaagaaaagggactcagaagaaacagagacgataaaggaagccgaagaaaaatgaaaactaaaatgccattctcagtcaataaaaaggaactgggggctatagagaaagaaacctcgggatgagaaagagctcttagaaataaaacatgaggggaaagtgagcaattcaataggcttttaagatgaagtcttccagaatgtataatgacagaaccagatagctggaaaacagaatagcagtaacacaggtgg

SEQ ID NO: 15962 - DNA, 1349 bp, Artificial sequence
  DNA replication origin
atgagggtttccatctaggatatggaaattactttagattgctaattttgagttggaaggcgtgagaatttgaataattttgtaaatagtattggaatatttaagataactgagattcacgattttgtacctttaatttatttgatatgcgttagtaagtcttgctttggtttttggcttttggttggagtgctgtggtcagcagaatgccacccttccccaacaaaagaggttcattccttaatccctggaaccagtgaatgttagtttacatggcaaaatgtgtcctgcagatgtgtttaatattaaaaaccttgaggagggagattatcatgtattatctggctgggcccaacctaatctcatgagtccttagggacaacctttcctgtctgcagggaaccagagaaatggttcgtgacacagactgaacctgctagctctgaagatggaggagggggccaagagccaaggaatgtaggcagcctctacaagctggaagtggccttagtttacagtcagcaagaaagtggggaccttggccctgccaccgaaaggatgtggattctgccagcagcctgaaggagcaggagacagagtctcccctagaacctccaggaaggaaggcagcctgccagccttgattctagtccagtgagacccatagtcagacttccagcctacagaattgcaataaatttgtgttaagtcactaagtttgtggtaaattttacagcggcagtataaaactaatacagtggtgtgccttcctggttgacatttgaaatgcgtttagaaaggcatgaatgcgctaatgtatacatacagtttaaaatgcttaaggccatttcactaagtttggaattggaggagaggcaagccaagaatcaagaggccaggaaggcaggggtagaatccatgagggcatagaaatctctaagactgagccaggagtggagtgggagagaggcagggagccaggagctgacatcctcagaggcccagggagcagctgccccagggaggaggtgcgggaggtaacatggaggggctgtgagtctgaggagcagggaggatgtggggtccctgacgcctccaggccagggaatgcatgagagaaaaagcccattggaggggctgcagtggccagaggagatctgcagaggggctgcaagttctggtctcagggtgggtaaagggtcaaagaggtggctctagggcagagctgtgtgggaccaggggctttgctgacaacagcctcaactccagacctctctgtggtctgtttctcctgccaggtccctgttgtgcccagtgccatgcctgacacctgcaggtgtgtcaccgct

SEQ ID NO: 15963 - DNA, 908 bp, Artificial sequence
  DNA replication origin
cctggggctggggctccgggtcaggcctgggtcccacggtacttgaggaaggtgctctccaggaaggcggccagcttcatccggtcgtcctgcggaaggagggaggcatgggggacggaggggcgcggcctgccccgtgcgccccctccgccaggccgcgccgcaccgcccagcgcacctcgtggaggaagccatagtgcacgagctccgaggcgaggtcctgggcgctgtccgctgaggcaatggcgtaaggcgaggcatgaggccgctgcccacccgccgcctggggtcaccgcccgccgcccaagtcccctgcccagcctacttgggagcaggtcgtaggtcagctgccggtgcagccggtcttccagcaccagaagcagagtgagctggggaggcggcggggcgtggtcggctgggggttcagggctccgccacgctcccgccttccccacggcagcgccgccctcccaggccccgctcacatgccagcgcgccttgtcctcgcttctctccaggttgcactgcatctggatgacctgcagcgggggaaggctgggactcacaaacccagcagcaagaccacatgccgcggccccaaaggggccgggaagggacagcaaagactggaaaggggggaatctctaagaggagcccatctcactgctagtggcttggcaagctaaggaaagcttcgagaagagtcgacattaggggctgggtactgaaggctgaataggagctttcaccgcggagagaacaacttgaacaaagagggaactgtgggcgtggggaaagggaggttgggcgggacaggaccgcgccgaagtgcacggtgcctgcgggatcaggcctcccagagcctgggtgtcagctgaggactcccatgatctctgctggcagccagg

SEQ ID NO: 15964 - DNA, 1063 bp, Artificial sequence
  DNA replication origin
aaggggccgggaagggacagcaaagactggaaaggggggaatctctaagaggagcccatctcactgctagtggcttggcaagctaaggaaagcttcgagaagagtcgacattaggggctgggtactgaaggctgaataggagctttcaccgcggagagaacaacttgaacaaagagggaactgtgggcgtggggaaagggaggttgggcgggacaggaccgcgccgaagtgcacggtgcctgcgggatcaggcctcccagagcctgggtgtcagctgaggactcccatgatctctgctggcagccaggagcaggcagtttgcctgttaggacatgaattctggctgcactgcaccgagagaggcccctggccaggagggggtgctgcaggaaaagtctggggagacaccaggacatagatgtccgggaatcagcaccaggtgggggatgggaggggtggggggggtgggaggggtgcgggggtgggggaagattgctggcagggtggaagagcccgggtgagttctggaggaaggatgcttggagtaggttcagggcaggcagcaggatgcaggggaaggatctgaggggacagggagcctcccggaaaaggagagtgcccagcctgtcctataacccccatgacccccacaagggggtcagcctggatctggtctctggcagccaggaggagagctgggctgtggggatgcaggccctaagagaaggaggggcacctcttatctggctgttagaaggtctgagggatggcactgagcagcaggagaggggactcacctttctggtctcagagtcaaagggctctggcgtcggggtcttggccttttggacctcctccgggggtggggccagcacacggggcagccccaggggtcgagtggctgcaaagttcatcagtgggtagattccattcctggggacacaacagggtggctgggggttcaggcctgacagctgcctggcccccaaccttacatcagttctcacctgacatcctccaggaatttgtccagctccatgaaggagacttccgagtacctggc

SEQ ID NO: 15965 - DNA, 1600 bp, Artificial sequence
  DNA replication origin
gatgcaggccctaagagaaggaggggcacctcttatctggctgttagaaggtctgagggatggcactgagcagcaggagaggggactcacctttctggtctcagagtcaaagggctctggcgtcggggtcttggccttttggacctcctccgggggtggggccagcacacggggcagccccaggggtcgagtggctgcaaagttcatcagtgggtagattccattcctggggacacaacagggtggctgggggttcaggcctgacagctgcctggcccccaaccttacatcagttctcacctgacatcctccaggaatttgtccagctccatgaaggagacttccgagtacctggcatggaagtgggaggcacatgaggggctggccggggcgaggggaggggaggtgcggggaggggaggtgtggggaggggaggcttctgggtgctgactgctcaccgccactgcagcgggggcctgcggggccggggaagctccgccaagaccgcgtgcaggtccatggccttggtcttctcctccaccacattctcaggcatgaggtctgcggccacaagagcatcaaggcggtgtgctcaggccgtgggtcctgcagggccccttccacgtcccaacctccacctccccagccaccccccgggccggcctgctgctcacactggtgctggatgaagcagtgggctgccaggagcttcagcgagtgcacctcgaagagcacgcggtggaagaggaggctgtgggcagagggccggcgggcagggtcccgggccaggcagcaaaggatgaactcctggggcacagggaggagaggctggtggtgtgcaagggctctctgctctggccccgcagttcgaggagaggtggcccctgagttccccatgtccctcctcagggacacacaggacatgcagggatgcccatagggaggagtcccagcagcagcagccaggccaggacctggtcctctgagcttgaggacagctgggttctgggattggagcaccatgctctgcttccctcgacccccaaaaaatcgtggggagaagccatgatcctaaagtcacacctgcaagcctcctacccatggccttttgatcggctcagctcgggcccaacactggagacgaccttgatgggtccccactctgtccacatccgtgcccagcccggctccagctcgccaccagccccgaccaggcacccccatctcctgaggccatggagttaagtctagactccgagcagagggggctgtggatgcagcttccatcccatacctctttttgcctgcttggcacccaccatgtccccccacaagctggagcctcatcacctcctggaagcttaaagtcaaggacttggagtgaagcagacccaggtgcagatgttggctccaccactcactctaaagccttgggcaaaggactcatctcctctgaaccttggtttctttataaaacgggcatggtgatggcagccacagagggagggtctctcttgccttcttgtccttagaatgtgctgaccccttagggccttcaggcctggaaccagtatgtgctcccactgaggtcctctttggg

SEQ ID NO: 15966 - DNA, 1298 bp, Artificial sequence
  DNA replication origin
cgtgaagttgcacaagtactggctggatacctctgaggcctgcgcgagggtgagcacgggcaaggccccgggcaggcagagaccacagctaggtggggcgggcatggggacgaacccgcagctggtggaaatcctgagctcgcaccgtgcaggtcatcttcatcacagagtacgtgtcatcaggcagcctcaagcaattcctcaaaaagaccaagaagaaccacaaggccatgaacgcccgggtatggggagcgggctggggcagccacggggacaggacggggttggggcagcctcggggactgggatggtgagggggtgcccggcggcctcggacaggggctgggcgaggatgcggggcgggctccgcaggcccagccgcctctcctgcgcccacccgaccgacggagtcgtgcgtccgccgccaggcctggaagcgctggtgcacgcagatcctgtctgcgctcaggtgagggcctgggctggcctgggcgcggcgccaccgagcccccatctctccagagcctcctgaccggctcctcctactctcccctccccaacgtctgcagcttcctgcacgcctgcagccccccaatcatccacgggaacctgaccagcgacaccatcttcattcagcacaacggcctcatcaagatcggctccggtgctggcggggcagggctgggtgggggaacggggcaggggaaggtgcctggagccaagggcagaggagttctgatgccccagcagctaactccactctttctcccgccccttggcagtgtggcaccgaatcttctccaatggtaagtgcggactttggggggacggggtcctggagaggtccccgcccgctcagctctgcgccctcccacagcacttccagatgatctccgaagccccatccgcgctgagcgagaggaacttcggaacctgcacttcttccccccagagtatggaggtgagtggtgctgggtccgggtgccccgtgcctaccctgcgcttctctcctacgtgtcctgtgctctcttctgttcagaggtggccgatgggaccgctgtggacatcttctcctttgggatgtgtgcgctggaggtactgcccccgccctccaccttgtgctctgccctcctcctaactgtgccctgcctggctcacctgtgtggtcccttccccatgcctgacctggctctgtgccccagatggctgtactggaaatccagaccaatggggacacccgggtcacagaggaggccattgctcgcgccaggcactcgctgagtgaccccaacatgcgg

SEQ ID NO: 15967 - DNA, 1610 bp, Artificial sequence
  DNA replication origin
gccacactgccaaggggcgggagaaagagtggagttagctgctggggcatcagaactcctctgcccttggctccaggcaccttcccctgccccgttcccccacccagccctgccccgccagcaccggagccgatcttgatgaggccgttgtgctgaatgaagatggtgtcgctggtcaggttcccgtggatgattggggggctgcaggcgtgcaggaagctgcagacgttggggaggggagagtaggaggagccggtcaggaggctctggagagatgggggctcggtggcgccgcgcccaggccagcccaggccctcacctgagcgcagacaggatctgcgtgcaccagcgcttccaggcctggcggcggacgcacgactccgtcggtcgggtgggcgcaggagaggcggctgggcctgcggagcccgccccgcatcctcgcccagcccctgtccgaggccgccgggcaccccctcaccatcccagtccccgaggctgccccaaccccgtcctgtccccgtggctgccccagcccgctccccatacccgggcgttcatggccttgtggttcttcttggtctttttgaggaattgcttgaggctgcctgatgacacgtactctgtgatgaagatgacctgcacggtgcgagctcaggatttccaccagctgcgggttcgtccccatgcccgccccacctagctgtggtctctgcctgcccggggccttgcccgtgctcaccctcgcgcaggcctcagaggtatccagccagtacttgtgcaacttcacgatgttcgggtggtccaccagcaccagctgctcgaacacggtctggatcttctcctggggagggagggtggtcgctgggtggtcagcaggtggtcacccaagcaggatgaggagggggcagcggtctcacctcgtgcgccgcgaaggccttcctgtctccgaagtggagctcgttccacaccacctctaccccctcctccgtgtccatggctaggaaggtgctctgaagccctggcatgttcccttggtttacctgggggtgaataaagggttatgtgtgccctggtgtgtgtcagggttgtgggtgaggatttggtccctgtccacacctttccagtgggcccaagcgtgggctgcaggccctgagccactctgcgggaaggtggggcttggagggtagctgcccccaggagccaagggctcctatccaagggctgggctaaggggatttggagcaggtttcagggggtcgagggggatccccaggaagctagcggctgagtccagaggcatggggaggtggtcctgggaggagactggccctcagggagtcccagggcgagcgccaggccaaaggggtccaggggtggctgattcgcgggccgcgaggggccgcggagaggtttccagccgccgcgctctcccagcgcccccacgccccgcgcagcctccaggcccctcccgctctgggagggcggtgtcaccccgtgccccaacccccgcgcccacctgctcccgtcgcttttgccagcgaccacacgggctttcctccaggatgtcgctctcgtcctcgctctcgtcctcccgctcccgctcccgttcc

SEQ ID NO: 15968 - DNA, 1180 bp, Artificial sequence
  DNA replication origin
acatggcccaaggtccccccgtagaccatattgttagcacagaccaggggtgtccaatctgtgggctttcctggcacacattggaagaattgtcctgggcaatacccttaaataaaatacacttaacactaacaacagctgatgagctttaaaaaaaatctcaataagaaagtttatgaatttgtgttgggccatattcaaagctgtccttggccgaatgcaccctctgggctgcgggttggacaagcttagcatagaatctggtgtggccgaggtaaacacagacattcaaatcaggcagaacattccaagggcttagagggtgtctcccaggagctggtcagggccagtttcagggtggaggatttgaacaccccaaacctttactgcagagggcctcagcaggatcacctggcattggtggaaaccacacacaaggtgcctggtgaccaaggctggtcagaaaagagagaccacaggggacgcagcagggccagatgcacctctgccaaagaaagaaagaggcgtcccaaagggccagtgcatggagctgcgcggaggggaggagcggagttccaatttgggctccagagagagaaggtaaaggatgaggacccgccgtgaaggagggaggagaccacaggaaggccgtgggggctgtgggctgaagggggttttaggtgagaatcggggacagccccggtggtcggcgtggctggagggtgtgcttagagcggcctccggagggagaggtcgtgtgagccgggtgggctcccccctcatggttccactgtcccatgggagccagccgcggaaaggaaatgcgcgtttgaggagaaaagagaaaatcgccatcctggaaagtgagaagatgggcttgtgggcgggaggaggcactggtgggcgggccagggagagattcgtggtcaccgatcaaagtcagcctgggtcagcctgctggtgggcctttcccccgccctcggtgccccttcgacctgtcccttgggggtcggccggggaatgagtgcgtggccaggagagcgggtcccgctttcgagcccgcggggtcttctgcagctggagggtgccgtgggcttgggggcccccagatgccccgggtcttcccccagatcctaggggagcaaccgcgagagaagtgggcgctccgggctccaggtgt

SEQ ID NO: 15969 - DNA, 1024 bp, Artificial sequence
  DNA replication origin
cccgccgccaggagcagaccctgcgtgatgccaccatggaggtgcagcgcgggcagttccaggggcggccggtctccgtgtgggacgtcctcttctcctcgtacctgagcgaggcccaccgagacgagctcctggcccagcacgcggccggcgccctgggcctgcccgacctcgtcgccgtcctcacccgggtcatcgaggagacggaggagcggctcagcaaggtgtccttccgcggcctgaggcgccaggtgtccgcctccgagctgcacacgtccgggatcctgggccccgagaccctgcgggacctggcccagggcactaagacgctgcaggaggtgacggagatggactcggtcaagcgctacctggagggcaccagctgcatcgcgggcgtcctggtgcccgccaaggaccagcccggccgccaggagaagatgagcatctaccaggccatgtggaagggcgtgctgcggcccggcacggccctggtgctgctggaggcgcaggcggccaccggcttcgtcatcgaccccgtgcgcaacctgaggctgtcggtggaggaggccgtggccgcgggcgtggtgggcggcgagatccaggagaagctgctgtcggccgagcgcgccgtcaccggctacaccgacccctacaccgggcagcagatctccctcttccaggccatgcagaaggacctcatcgtccgggagcacggcatccgcctgctggaggcccagatcgccacgggcggcgtcatcgaccccgtgcacagccaccgcgtgcccgtggacgtggcctaccggcgcggctacttcgacgaggagatgaaccgcgtcctggccgaccccagcgacgacaccaagggcttcttcgaccccaacacgcacgagaacctcacgtacctgcagcttctgcagagggccaccctggaccctgagacggggctcctatttctttctctctctctacagtgactgggcttcctccgtgcagttttctgcaactctggagaagtggaggcata

SEQ ID NO: 15970 - DNA, 903 bp, Artificial sequence
  DNA replication origin
ggcgggtcagcgcgggcaagtccagggtccccgagccaaactcggccagcagctcctcccgggcggccccgctcacgtagccggacgccagcacgtcccacacgggcaccgcgcgcccccggaggcggcccaccttgacctccatggtggccgcacgcagggcctcccgggggtctgggcgcgggctcccggcctcggcctcggcctcggcccgggcctgggcctgggcctgggccagcagcgaggtgagggtggcgcccagctcctccacggtcagcgtgcccgcccggtatctgctcagcaggtcctggcgccggtcctcggacacctcgcggtagaagaggagctcccagacggagacgctctggccctggagggcgcccgagcctggcatcacgcgggcgtcgcgcagggcacagcgcagctcctcgctcagctggtgcacggcggagccccggcctgccagctgcagcatgtagagcccggtgtccgggtcgggcacgcagcggcgcagcagctgcacgtacgtgaggttctcgtgcgtgttggggtcgaagaagcccttggtgtcgtcgctggggtgggccaggacacggttcatctcctcgtcgaagtagccgcgccggtaggccacgtccacgggcacgcggtggctgtgcacggggtcgatgacgccgcccgtggcgatctgggcctccagcaggcggatgccgtgctcccggacgatgaggtccttctgcatggcctggaagagggagatctgctgcccggtgtaggggtcggtgtagccggtgacggcgcgctcggccgacagcagcttctcctggatctcgccgcccaccacgcccgcggccacggcctcctccaccgacagcctcaggttgcgcacggggtcgatgacga

SEQ ID NO: 15971 - DNA, 1198 bp, Artificial sequence
  DNA replication origin
ggcggtcagccggcgggtcagcgcgggcaagtccagggtccccgagccaaactcggccagcagctcctcccgggcggccctgctcacgtagccggacgccagcacgtcccacacgggcaccgcgcgcccccggaggcggcccaccttgacctccatggtggccgcacgcagggcctcccgggggtctgggcgcgggctcccggcctcggcctcggcccgggcctgggcctgggcctgggccagcagcgaggtgagggtggcgcccagctcctccacggtcagcgtgcccgcccggtatctgctcagcaggtcctggcgccggtcctcggacacctcgcggtagaagaggagctcccagacggagacgctctggccctggagggcgcccgagcctggcgtcacgcgggcgtcgcgcagggcacagcgcagctcctcgctcagctggtgcacggcggagccccggcctgccagctgcagcatgtagagcccggtgtccgggtcgggcacgcagcggcgcagcagctgcacgtacgtgaggttctcgtgcgtgttggggtcgaagaagcccttggtgtcgtcgctggggtcggccaggacacggttcatctcctcgtcgaagtagccgcgccggtaggccacgtccacgggcacgcggtggctgtgcacggggtcgatgacgccgcccgtggcgatctgggcctccagcaggcggatgccgtgctcccggacgatgaggtccttctgcatggcctggaagagggagatctgctgcccggtgtaggggtcggtgtagccggtgacggcgcgctcggccgacagcagcttctcctggatctcgccgcccaccacgcccgcggccacggcctcctccaccgacagcctcaggttgcgcacggggtcgatgacgaagccggtggccgcctgcgcctccagcagcaccagggccgtgccgggccgcagcacgcccttccacatggcctggtagatgctcatcttctcctggcggccgggctggtccttggcgggcaccaggacgcccgcgatgcagctggtgccctccaggtagcgcttgaccgagtccatctccgtcacctcctgcagcgtcttagtgccctgggccaggtcccgcagggtctcggggcccaggatcccggacgtgtgcagctcggaggcggacacctggcgcctcaggccgcgg

SEQ ID NO: 15972 - DNA, 1198 bp, Artificial sequence
  DNA replication origin
cggctacgtgagcagggccgcccgggaggagctgctggccgagtttggctcggggaccctggacttgcccgcgctgacccgccggctgaccgccatcatcgaggaggccgaggaggcccccggggcccggccgcagctccaggacgcctggcgcggcccgcgggagccagggccagccgggcgaggggacggcgactcggggcgctcccagcgagagggccagggggagggcgagacccaggaggccgccgccgccgcccgccgccaggagcagaccctgcgtgatgccaccatggaggtgcagcgcgggcagttccaggggcggccggtctccgtgtgggacgtcctcttctcctcgtacctgagcgaggcccgccgagacgagctcctggcccagcacgcggccggcgccctgggcctgcccgacctcgtcgccgtcctcacccgggtcatcgaggagacggaggagcggctcagcaaggtgtccttccgcggcctgaggtgccaggtgtccgcctccgagctgcacacgtccgggatcctgggccccgagaccctgcgggacctggcccagggcactaagacgctgcaggaggtgacggagatggactcggtcaagcgctacctggagggcaccagctgcatcgcgggcgtcctggtgcccgccaaggaccagcccggccgccaggagaagatgagcatctaccaggccatgtggaagggcgtgctgcggcccggcacggccctggtgctgctggaggcgcaggcggccaccggcttcgtcatcgaccccgtgcgcaacctgaggctgtcggtggaggaggccgtggccgcgggcgtggtgggcggcgagatccaggagaagctgctgtcggccgagcgcgccgtcaccggctacaccgacccctacaccgggcagcagatctccctcttccaggccatgcagaaggacctcatcgtccgggagcacggcatccgcctgctggaggcccagatcgccacgggcggcgtcatcgaccccgtgcacagccaccgcgtgcccgtggacgtggcctaccggcgcggctacttcgacgaggagatgaaccgtgtcctggccgaccccagcgacgacaccaagggcttcttcgaccccaacacgcacgagaacctcacgtacgtgcagctgctgcgccgctgcgtgcccgacccggacacc

SEQ ID NO: 15973 - DNA, 922 bp, Artificial sequence
  DNA replication origin
tgatggcggtcagccggcgggtcagcgcgggcaagtccagggtccccgagccaaactcggccagcagctcctcccgggcggccctgctcacgtagccggacgccagcacgtcccacacgggcaccgcgcgcccccggaggcggcccaccttgacctccatggtggccgcacgcagggcctcccgggggtctgggcgcgggctcccggcctcggcctcggcccgggcctgggcctgggcctgggccagcagcgaggtgagggtggcgcccagctcttccacggtcagcgtgcccgcccggtatctgctcagcaggtcctggcgccggtcctcggacacctcgcggtagaagaggagctcccagacggagacgctctggccctggagggcgcccgagcctggcgtcacgcgggcgtcgcgcagggcacagcgcagctcctcgctcagctggtgcacggcggagccccggcctgccagctgcagcatgtagagcccggtgtccgggtcgggcacgcagcggcgcagcagctgcacgtacgtgaggttctcgtgcgtgttggggtcgaagaagcccttggtgtcgtcgctggggtcggccaggacacggttcatctcctcgtcgaagtagccgcgctggtaggccacgtccacgggcacgcggtggctgtgcacggggtcgatgacgccgcccgtggcgatctgggcctccagcaggcggatgccgtgctcccggacgatgaggtccttctgcatggcctggaagagggagatctgctgcccggtgtaggggtcggtgtagccggtgacggcgcgctcggccgacagcagcttctcctggatctcgccgcccaccacgcccgcggccacggcctcctccaccgacagcctcaggttgcgcacggggtcgatgacgaagccggtggc

SEQ ID NO: 15974 - DNA, 3760 bp, Artificial sequence
  DNA replication origin
gctggaggacgtgcaggaggggaggaccactgtgccacagctgctagcctctgtgcagaggtgggtacaggagaccaagctcctggcccaggcccgcgtcatggtgcccggcccacggggtgaggtacccgctgtctggctgctggatgctggcatcatcacccaggagacccttgaggccctggctcagggcacgcagtcgcccgcccaggtcgccgagcagccggcggtgaaggcctgcctgtggggcacaggctgcgtggccggtgtgctgctacagccctctggggccaaggccagcatcgcccaggccgtgagggatggcctcctgcccacaggcctgggccagaggctgctggaagcccaggtggcatctggcttccttgttgaccccctgaacaaccagagactgtcagtggaggacgcggttaaggtcggcctggtgggcagggagctgagtgagcagctcgggcaggccgagagggcggcggccgggtacccagatccctactctagggcctccctctctctgtggcaggccatggagaaggggctcgtgccacagaacgagggcttgcccctcctgcaggtgcagctggccacagggggtgtggtggaccctgtccacggggtgcacctgccccaggcggcagcctgcagactcggccttctggacacacagacgagccaggtgctgactgcagttgacaaggacaacaagttcttctttgaccccagtgcgcgggaccaggtgacctaccagcagctcagggagcgctgcgtgtgcgactccgagaccggattgttgctgttgccactgccctcagacacagtgcttgaggtggacgaccacaccgcggtggctctgagggccatgaaggtgcccgtcagcacagggaggtttaaggggtgtagcgtgtcactctgggacctgctgctctccgaatacgttggcgctgacaagcggcgggagctggtggcactctgtcggtctgggagggctgcggccctgcggcaggtggtcagcgcagtcaccaccctggtcgaggctgcagagaggcagcccctgcaggccaccttcagagggctccggaagcaggtgtcagccagggacctgttcagggcgcagctgatcagcaggaagacgctggacgagctgagccaggggacaacgactgtgaaggaggtggcggagatggacagcgtgaagcggtccctggagggaggcaacttcattgccggggtccttatccagggcacccaggagaggatgagcatcccagaggccctgaggaggcacatcctgcggcctggcacagccctggtgctgctggaggcacaggcagctaccggcttcatcatcgaccccgtggagaaccggaagctgaccgtggaggaggcgttcaaagcaggaatgttcgggaaagaaacctacgtgaagctgctgtcggccgagcgcgccgtcaccggctacaccgacccctataccgggcagcagatctccctcttccaggccatgcagaaggacctcatcgtccgggagcacggcatccgcctgctggaggcccagatcgccacgggcggcatcatcgaccccgtgcacagccaccgcgtgcccgtggacgtggcctaccgctgcggctacttcgacgaggagatgaaccgcatcctggcggaccccagcgacgacaccaagggcttcttcgaccccaacacgcacgagaacctcacgtacctgcagcttctggagcgctgtgtggaggaccccgagacgggcctgtacctgctacaaatcataaagaaaggagaaaactacgtgtacatcaatgaggccacgagacacgtgttgcaatccagaactgcaaaaatgcgcgtggggaggtttgctgaccaggtggtctctttctgggacctgctgtcctctccatacttcacagaggacaggaagcgggagctcatccaggagtatggagcccagagtgggggcctggagaaattgctggaaatcatcaccacgacaattgaagaaacagagacgcaaaaccaaggcatcaaagtggcggccatcagaggggaggtgacagctgcagacctgttcaactccagggtcatcgatcagaagaccctgcacacacttcgtgtggggaggactgggggacaggcactcagcacgctggagtgtgtgaagccctatctggaaggcagcggctgcattgcgggggtcacggtgccctccaccagggaggtcatgagcctccatgaggccagcaggaaggagctcatccctgcagcatttgcgacttggctgctggaggcgcaggccgccaccgggttcctcctggacccctgcacccgccagaagctctctgtggatgaggctgtggatgtgggcctggtgaacgaggagctgcgggagaggctcctgaaggctgaaagagctgccacgggctacagggatccggccacaggagacacgatcccgctgttccaggccatgcagaagcagctcatcgagaaggcggaggcactgaggctgctggaggtgcaggtggccacggggggtgtcatcgacccacagcaccaccaccggctcccactggaaacagcctacagacggggctgtctgcacaaggacatctatgcgctcatttccgaccagaagcacatgaggaaacggtttgtggacccgaacacgcaagagaaggtctcgtaccgagagctgcaggagaggtgccgcccacaagaggacacgggctggctgctgttcccagtgaacaaggctgcacgggactccgagcacatcgatgacgagacgagaagggccctggaggcagagcaagtggaaatcacagtgggaaggttcagaggccagaaaccaacactgtgggcactactgaattccgaatacgtgacagaggagaagaagctccagctggtgaggatgtatagaacacacaccagacgggcactgcagacggtagcgcagctcatcttagagttgatcgagaagcaggaaaccagcaacaaacacctgtggttccaaggaattagacgacagatcacagcttctgaactcctcagctcagccataatcacggaggaaatgctccaggacctggaaacgggacggagcacgacgcaagagctcatggaggacgaccgcgtcaagcgctacctggagggcaccagctgcatcgcgggcgtcctggtgcccgccaaggaccagcccggccgccaggagaagatgagcatctaccaggccatgtggaagggcgtgctgcggcccggcacggccctggtgctgctggaggcgcaggcggccaccggcttcgtcatcgaccccgtgcgcaacctgaggctgtcggtggaggaggccgtggccgcgggcgtggtgggcggcgagatccaggagaagctgctgtcggccgagcgcgccgtcaccggctacaccgacccctacaccgggcagcagatctccctcttccaggccatgcagaaggacctcatcgtccgggagcacggcatccgcctgctggaggcccagatcgccacgggcggcgtcatcgaccccgtgcacagccaccgcgtgcccgtggacgtggcctaccggcgcggctacttcgacgaggagatgaaccgtgtcctggccgaccccagcgacgacaccaagggcttcttcgaccccaacacgcacgagaacctcacgtacgtgcagctgctgcgccgctgcgtgcccgacccggacaccgggctctacatg

SEQ ID NO: 15975 - DNA, 1174 bp, Artificial sequence
  DNA replication origin
ctgctgctctccgtgaagtatggacggtttcaggggcagagggtctccgcgtgggagctgatcaactctgagtacttcagcgagggccgcaggaggcagctgctgcgtcgctaccggcagcgcgaggtcacgctggggcaggtggcaaagctgctggaggcggagacgcagagacaggcggacatcatgctgcccgcactgcggagccgggtcaccgtccaccagctcctggaggccggtatcattgaccagcagctgttggaccaagtgctggccgggacaatcagcccggaggccctcctactcatggacggcgtccgcaggtacctgtgcggcctgggagctgtgggcggtgtgcggctgctgccctctggccagcggctcagcctctaccaggccatgaggcagaagctgctggggcccagggtggccctggccctgctggaggcccaggcggccaccggaaccatcatggaccctcacagcccagagagcctctcggtggatgaggccgtgcgcaggggtgtggtggggccggagctgtatggcaggctgaagcgggctgagggtgccattgctggcttcagagaccccttctctgggaagcaggtgtctgtgttccaggccatgaagaaaggtctcatcccttgggagcaagctgcccgcctcctggaggctcaagtggccacaggagggatcattgaccccaccagccaccaccacctccccatgccagtggccattcagcgtggctatgttgaccaggagatggagacagccttgtccagctcctccgaaaccttccccacaccggacggccaggggcgcacgagctatgcccagctcctggaggagtgccccagggatgagacttctggccttcacctcctgcccctgccagaaagtgctcctgccctccccaccgaggagcaggtccagaggagcctgcaggccgtgccgggggccaaggatggcacatccctctgggacctgctcagctcctgccacttcaccgaggagcaacggaggggcctgctggaggacgtgcaggaggggaggaccactgtgccacagctgctagcctctgtgcagaggtgggtacaggagaccaagctcctggcccaggcccgcgtcatggtgcccggcccacggggtgaggtacccgctgtctggc

SEQ ID NO: 15976 - DNA, 1338 bp, Artificial sequence
  DNA replication origin
cgcacggcctcatccaccgagaggctctctgggctgtgagggtccatgatggttccggtggccgcctgggcctccagcagggccagggccaccctgggccccagcagcttctgcctcatggcctggtagaggctgagccgctggccagagggcagcagccgcacaccgcccacagctcccaggccgcacaggtacctgcggacgccgtccatgagtaggagggcctccgggctgattgtcccggccagcacttggtccaacagctgctggtcaatgataccggcctccaggagctggtggacggtgacccggctccgcagtgcgggcagcatgatgtccgcctgtctctgcgtctccgcctccagcagctttgccacctgccccagcgtgacctcgcgctgccggtagcgacgcagcagctgcctcctgcggccctcgctgaagtactcagagttgatcagctcccacgcggagaccctctgcccctgaaaccgtccatacttcacggagagcagcaggttctggaaggcctgctgggtggcactgtccaccagcggggactgcgtgctgctgagtggcaggaggtacaggcccgtctcggggtcacgcacacagcgctccagaagctgcaggtacgtgaggttctcgtgcgtgttggggtcgaagaagcccttggtgtcgtcagaagggtccaacaggatcaagttcagcatctgatcgaagtagccgcgccggtaggccacgtccacgggcacgcggtggctgtgcacggggtcgatgacgccgcccgtggcgatctgggcctccagcaggcggatgccgtgctcccggacgatgaggcccttctgcatggcctggaagagggagatctgctgcccggtgtaggggtcagtgtagccagtgacagcgcgctcagccgacagcagcttcgcgaacacatcaggcccaatgacagcagccctcagtgcctcctcaacggagtgccccttgtttgcttttgggtcgatgatgaagcctgtggcagcttgtgcctccagaaggatgagggcagtgccgggccggaggagccccttgcatcgggcctcatagatgctcaggcgttcctgggagccagggagcagcaggccagcaatgcagcccgtaccctgcaggtacctctgcaccgaggccaggctgcccacatccttggctgtggcctgtccatgctccagccgctcgtacaggtcctggtcgatgatctcggctttcagcagctctcctggtgtcacggtgtccctcagcccagaaaaggtgaccctggcagtggctgcagcctgctcgagggtggcgctcagctta

SEQ ID NO: 15977 - DNA, 3110 bp, Artificial sequence
  DNA replication origin
tgggggtgatgttctatttaccatgagaaccaggcagggcacaccaggtccctgcaccctgtctgcccctgtggtgccgcctcctggtgctcaggcctgtcccctgccagatgggagcctcctcctggctgcttgctcctgggacatgatgggcctgggagcagcatagcctttggcttggtgacactagctgtgtcccctggcagaagtgttcctactccagggaccaggacatctaagcccacccgccccagagctgtggggtcgaggagcccaagctccatcataggtcagtggggggtggggggtgggggccactgtgccaggccttggttcctgggcccctgtgacccacctcctgggacacacgcacatgggaagccacgttctggagtggtatagccgacttcctggagaatggtgccctagcctgcaaggcgtcactggggagctggcaccccggctgtgccttcaggaagtgattcctacatcctgtcaggccagcagcttttggctggggcagactgtgatgtggccagcgggcccgtggcccattgcaccacgaagacaagcgcccaggcatccctgtggcgcaccggccagctggccagacgtctgcagcctcttgtgagctttctccaatgctggtcgtttaccagcagccctactccatggtcctctgaatcctccacgtcttcccagccacctgacactgtgtcctgagcacggtccctcgggacagctgagctgcaatgctgcttcctggagccctggctctctgcactcggccagtgaggtgatggtgagccctcctggtcccagctccgtgtctgaggctctgagcagcctgtcagcagcaggatgcctggaggaggcccgggaccagtatctgcagaagggaagggagagggccagggttttgccaaggtgggtaggtgggctgcagtcttaacaggtggtcctgaggggcatctacgagcctcgacagccctcagagttgcccctggagcatgcccttcgtgagaccagacatggggagaggggatggggaggacccagtgccttctagggttaggctctgcatgttccagagcatgagcagcatggggtgcctgtgagacctccaggaggcagctgggcacatggttttgggacccaggacaggctgggctcctgctgcagatttggggagctgagggtaggtgggaggaggtctcagagttaatgggtgaacgaagatggagcggaaccctgtcactggagaggggagcccccatagcccatgtggtggaggtgggtgggggccagctccaaaatgcatttgtcgagtttggcagccgggggtggtggctgcctcaagagcggtggagtgggggtgggggtcaaacgtgggatccgacccttctcctgagaccttgtgtagaggtagggaaaggttgtcatggacaggctgctgagcagagggaggttccagctggaatgagggggagaatcaagagagggactggggcccgtagtgctgagaaaacggggagcagaccctgctcctgggtgggtgggcacaggggtgcagaacactgaccaggggcctaaagagcaggaaattgctctcacagctctagaggccagaagccggaaggcgaggagtgggcagggccgcacttcctccggagctcgaggggaggatcctgcctgccttttccagcttctggggccccaggcgtcctgggaattccttggcttatagatccaatctctgcctctgtcgtcacacggccgccctctccctgtgtgtcttcttataaggacactagttatgttggataacagccaatcctagcccggtatgacctcaccttaactgggtgatatctgcaaagatcctatttccaaataaggtcacattcacagggactgtagattaggacttagacatacgtttttagggacataattcaatctggtgcagaaggggacaggcctgggtggaggcagttgacgtgcaggagtggtggggatggaggtgaggcacctgctgctctgctcagggccagtcgtacagctgtgtgtggaaggggttggcgcagggcatgccggggctgcagccggaggaccagggcccatgggggagagacagccttgcctggcctgcacccggctcctggcaggactgccacacgtctgctgagcctgcggcccccggggcagggtgtgggctcagaggggcaatagcccagaggccgtggtgctcgcagatgtgagatccaggacaggcagaggaggatgcagggccaggctgaggcaggagaccagggcttcagagggctggggtcttgctggagcctggtggatggctgtggagggagggcgggacctcaggagccagcaggaggtggcagaggcttctctggagtgacaggtccaggtggggtgggaggtttcaagagatcactggagctggggtggggcagggcatggggcagagcctttggagaacaaaaggtggggagatgccggtgcccaggctgaggggcgggccctgtgggtggagccacagcccttttggagcagggctgggcccctcgggcagggctaaggatgggaccagggtgcccaggaaggactcgaggacacaggaccctgggctggcgggagggcgttggcctggggtggaggtggaaggacagcctgcgggagggacagccctggagtcccgagaggcctcccggcgccgcctgggtgcctgcgcccacatggtccctctgagctggcacttcccttggcacccccgcggcagagtgctcctgggcagactcagctcctcggggacactctagctgcacgtctgtgggtggagcccagcccgggacagcatgggattgccccatgaccgcatcttccctcgtgcccaccaggccatgcggggtccctgattgagcctttctgtcccctgcaggacagaggtggacctcagcaggctctgcataaccagccgtgtgtgatgagtggccacaccttgcctcctcttcccgtcccaggcaccaacagcacagagcaggccagtgtacccagagccatggcagccacgctgggagccggcacgcccccca

SEQ ID NO: 15978 - DNA, 1164 bp, Artificial sequence
  DNA replication origin
gctgcaccccctgccccccctcgctccggaccctctgtccagctgccctcccaggccccacatggagtcaagacacccactcccgggccttcctcctgccaagcctgggaaggggcagggcccagggaaggggcagggcccagaggggttcataccaggcccaaggtcaggaagagatagggagtggtgcagccagccacaggccgcatctcacgcatggtgcggggcatgcactggcaggcacactcacacacgcagggcaagcctgcccccgactccctgctcccaagcgccctgtctccagccttcctccctggatctcctctttgtttggggaacttgagccacttgcctgagcttacgaggcccgcttagcacgcggcctgtctgggctggcggcctgtgcgcaggtcaggggcccgcccaaggtgctgtccccaccctcactggccctgccccgccctcgctggccctgccccaccctggcccgcactgcccctcccccttgctgggaaatcaggtgctcctctcatttcctcaccgccatccctggccggatgtcaggggacagggcagggccctgaccccctagaagcccctcgtctggcctggatgccatagtgagtggctgccttaggctcacagatcctggagggtcctggaacgaggcgtgctggagagggcccagccctaggggaggcaggtgccagtagaggtggacacaaaagcgcccaggctgggttcccagaagcagagtctgtctgaggcaggggtaaccgggagtggtctcaggatggcctcaggaagggaagggaggaggaagcaggtggacgaaggagaagctggcctgtcctgccgtctcatgtaccccccagaagcagatctggacagccccgtagccaccccggtcaggctgtgcccttgagcctggcctcttcctggggaagtgcagaaacaagttttgcagggtggacctggcccctggggctgcctccccgtcctccagactggatgccctcaacccgggcgcgcctgctggctcagggcttgtcaggtgtgaccaggtcctcttccctgagggtcccctctagggctgggggtgatgttctatttaccatgagaaccaggcagggcacaccaggtccctgcaccctgtctgcccct

SEQ ID NO: 15979 - DNA, 1658 bp, Artificial sequence
  DNA replication origin
aggccaggctcaagggcacagcctgaccggggtggctacggggctgtccagatctgcttctggggggtacatgagacggcaggacaggccagcttctccttcgtccacctgcttcctcctcccttcccttcctgaggccatcctgagaccactcccggttacccctgcctcagacagactctgcttctgggaacccagcctgggcgcttttgtgtccacctctactggcacctgcctcccctagggctgggccctctccagcacgcctcgttccaggaccctccaggatctgtgagcctaaggcagccactcactatggcatccaggccagacgaggggcttctagggggtcagggccctgccctgtcccctgacatccggccagggatggcggtgaggaaatgagaggagcacctgatttcccagcaagggggaggggcagtgcgggccagggtggggcagggccagcgagggcggggcagggccagtgagggtggggacagcaccttgggcgggcccctgacctgcgcacaggccgccagcccagacaggccgcgtgctaagcgggcctcgtaagctcaggcaagtggctcaagttccccaaacaaagaggagatccagggaggaaggctggagacagggcgcttgggagcagggagtcgggggcaggcttgccctgcgtgtgtgagtgtgcctgccagtgcatgccccgcaccatgcgtgagatgcggcctgtggctggctgcaccactccctatctcttcctgaccttgggcctggtatgaacccctctgggccctgccccttccctgggccctgccccttcccaggcttggcaggaggaaggcccgggagtgggtgtcttgactccatgtggggcctgggagggcagctggacagagggtccggagcgagggggggcagggggtgcagcttcgagtgtgggggcatctggaggaggtggctgctgcctaggagagcacggggtcagggttagggtgatggggtggggaggaggccgagcagatttccccggagcctgaggcacaaagggcccctcctgtggattccccacttcaggtggcccccaggccccaagtggtggagggccgttcctgaggagggtgggtctgcatctcttgggtgaggtcactgtctgtcaccagactgcccggcaggcccccaccgcagcctgggacaaaggttggggaggctgcagccgcctgcctgagtcaggtcaggacagaccctggcagctgcctgggcccacacaggaggcagcagccttagcttctgcccggctgtgtgcccttgtgggaagaccccacccacctgcaacctgcaccatgatcagagatcagtggccccaataacaagcttggcacagtgcagcgggggcccagggcagggaagcagagccctgggcccaagtgatgaacagggcccttcctgcctctgcctcccacgggtctccaggcgaccgtgtgaccgcttacctgacccggagtggccacccctgggaccgctcacccaacagcaggcagcttccccggatccgtgacgcctccctcccggcaatgttgccaggagtcacccctctcaatttgtcggcctagctgcctcctggcctgggcgttccccaccctgcagagcgtgcc

SEQ ID NO: 15980 - DNA, 3585 bp, Artificial sequence
  DNA replication origin
tggctgtgctgctctcccatggggtcagagctggaggtacaggtggtcctggctgcccccacaggtgggtctagccagcccaaggacagcacctctcagaacagcactacccagcctctaaactgtgttggggtggggcagagagggcctgggtacctgggtgtgccttctaccttttcaatcaagtagaattcccagttaagagcatggtattgctacgtatgacttccatttatgtggcaactggaaagaatatacatttggagcaagataggaaaaaatttcactctgagatacaggttggggcctcctttcctgtgtttaatgcaacctcgaggcccagagtgggttccgtcctggctgagccttcctcccctcctcctcccccttctcctcccctccttctccccttcctcctccccctcctcctcctctgtcttctataaaatgggagaagctgggtttgcctcacacctggaccctgcggccccctctgcccttgctctccctggcttatttccctggcttggggactgtttgagtttcccggagctgccctaaccaaccaccaccaatggggtgactcaaacaacagaaactatcgaccctaagctctccaagccagagtctaaaatggaaatgtgggcagggctatttccctcagcggctatgaggtgagacccagctccaggcttctcctcggcatcttcttcctgttatcttcacatcatcttccctttctgtgggtcttcgtctgtgtccgatgcccctttttgaaagcacaccaggcacatgggatgaggcccgcctactccagcatgacctcatcccaactaaccgcatctgcaacgaccctgcttccaaagaaggtcacattcccagaggatttggagtctggacttcgacgtaggaatttgggggatggagttcaagccacagttgggaggaatcctctggcccttcctctcctggccctgaccgagcagcatgggggcctttggcaggcagaggctgtgctcctcgtgccggccggcttccgaggcctgggcaggagaagctgggccagcccgtgtcatcaccctggctgactggggatgggggatcagtgagacgcacagcgaggagggtgtggagaaagagaatttgggatgtggggggtggttccgtgggggacagaggcagcagggctccaacccccacctcagcccttccctgcccccggaggcagctgcatcactgggctcccctgatggcaggtgtcccctgagagccactgggagagcagcccatgtctttgctgtgagggcacccagcctgagaggaaggctcacccccaaggctgcccgccccctgtacctgggcctgcggttggagctgccggctgctatgtccaggcccttggtggagaggtcagcctgctgctcagctctgtcccacccgctcccgccgggccctccatcctgcctgcatctgccctgtctcctctctgggccatgtgccgtggaggggacaccctgctcccagatgctttatggagcaatggcgggcactccccttcgagctgggccatgccaggctccaagggaccaatggggatcctggccaaaggctccaaccagcacggtgactccatggagcagcccaggggcagcgtgggcactggtcttggggctctgggacctccctccttggaccaggtcttctgagagcctccctgacctgcagggggaagctaggtgccagtgccaggaggaggtgggtagagccgtgggcagtactgggcatgggagccctctcgctcacctcctgacaccctccctgatgcccttccttgctgtgtaggtggtataggcccaggcctgggggctggaggagtggcctgtggctccggggactgctgggctgaagcactggactggagcccctggggaggtggtggctcccagaagccctgactgggagtggcccagggacctggggagtagggcaggcacccaagtctgcccccagaggtgtccccagaggtcactgggctgggggccaccacagggcaggggatctggagtcacaggaagacaaagccgagggagaggagccaggggacagatgccagtgggtgcagcagagcagggccagctccatgccacctgcctataccaggggggtgacgggcagaaatgggtgcagcggagcagggccagctccgtgccacctgcctatactggaggggtgacgggcagaaatgggtgcagcggagcagggccagctctgtgccacctgcctataccggaggggtgaggagcagacaggcatgtggcccgtccctgggcacacaagaaggcttggtctggccagcctaacacccccttcttgcagcgaggggctggcatacacccaggttttgtggcctggcaggggcgctgcctgcaatggctcaccgcaggaagaagtggctctggggtgtgctccaggccacaggccatagccagcaccaccatgcctcccagcaagaccacacagacagtgtccaggcatccggtgagcagggctggggatggatgcggttggcctggcagtgccttggggaaatgcgggttccaccagagctcctctggggtcagggccccgcagtcggcagcagccatgctgtgcggccagtgtggcaggtgtggacagggtccaggcagcctgggtgagcaggtgtgagtgtggacctggtgggtgggtgagagcagagccagggcagtggtcccaagcaccctaacccctgaaggcctaacctgtccctcctgcacctgcgtgggcgcctgcaattaccctcatggtgtgcattggaggtggctggctggctctggatgattttctggtcaagaatgactcaggcagaggtgggggctggagcttgggagaagggggcacttgtgggggtggggagcacctgagccctcaggacctccaggactacgggacagaggaggaggggccttggggacagaggaggaggggctttgggccctgtacttccgtggccctgcccacctgggatatcggggcagccaaggggagggccctccagaagatccatggaaggttcccgtgccaggctgaggctgcccccaggccagcccccgaggctgtgagcctccatgcccagtgtctctggcatgccccagccttggaaggtgggtgccaggatgggcttcagagaggggaccaggtactcccagggtgacagggaacattctctgtgcccaggtggaggagccagaccggggggtgaggcctggcactgctccaggcaggacatcccagctcttacaacgtcatgggggcaggggggcctgccaaggagagccttgaagacccctggacccagcagacacacgacgtgaagcagcgtccccaggaagctgagcagacaaggtggggtcggggctggaggcagggacaccagcccgcaccgcattagtggcttgtggggatagaaaccgccgctctggccggtccgcgtttcactccaaactcctttcccaaaaaaaaaaagctgttctgaagggcacaggacgcctccgcgcccgccctgcg

SEQ ID NO: 15981 - DNA, 899 bp, Artificial sequence
  DNA replication origin
caggagcaggtgtttgcgcccacctggcccaccccagaggaagggtttccacctgcctgtaccctttggggcggctgcagctcacagccctgagcagcaagggtggctgggagtgccgagggctttcagtccccaggccaggccgcccaggacgatgctggctcccccccagctgagggcccgggtggccagtatggcatgggaggcataagcccccggccaggcagcggcacacccagtggtggccccgagacagcacttcctaccaggcacctagagattgcccgtgtcaggctctggaggggactggggccaggtggggagggtgccaggcccaagactggcactcaggtggcactgtctctccccagctgtgttttaggcagaggaggaatccctgggggaaccctggtcagggcctcagcagcaggacacggggctgaaggccacctgggggccaggccagcaagcctggtggggctgcgggagaggctttggccagagggccgctgggccccagccttgcaggtgccttggaggattgagggagggaggaagtcaccccagagtccctcgggaggagagatgaccacgggcaggctggacaacttggacgctctgggctggagctgctgggaggggcctagccagaggacacccaccctttagggagaagagggtatggcaggggagaaggaaggcagggacaggcggggttgagcagcgatttctggtgccgatttcatggctcagctcccatccttctaacaactgcaatcccccatgcatggctgtgctgctctcccatggggtcagagctggaggtacaggtggtcctggctgcccccacaggtgggtctagccagcccaaggacagcacctctcagaacagcactacc

SEQ ID NO: 15982 - DNA, 1093 bp, Artificial sequence
  DNA replication origin
gagcccctcggagccgtgtgcacagcggggttgcctggtgcagcaggcagaggccaggtgaggctgtgggggcatgagcggggagggcacccgtgcggggagggccctgcggctgcccagtcttggtccccaggtgaggctgtggggggcgtgagtggggagggccctgcggctgcccggtcttggtccccaggtgaggctgtggggggcatgagcggggagggcaccgtgtggggagggccctgcggctgcccggtcttggtccccaggtgaggctgtggggggcgtgagtggggagggccctgcggctgcccggtcttggtccccaggtgaggctgtggggggcgtgagtggggagggcactgccggctgcccggtcttggtccccaggtgaggctgtgggcggcatgagcagggagggcacccgtgcggggagggccctgcggtgcccggtcttggtccccaggtgaggctgtggggggcgtgagtggggagggcaccgtgtggggagggcacctgtgcggggagggcaccatgtggggagggcaccatgtggggagggcaatgccggctgcccggtcttggtccggagttcgggggtcctggagcaacttttcctggcagcccacagcttcgaagtggccaggacactctcctggctgcgctgtggcagggcggctggagcccgagggccaggaggggccgtacagtgcctgcaggtaggaactgggcccagggagaggcggcaggctgcgcagggctccatgtccccagcacacatgtgcccccagcctgtgtctgcagcatgtgtgtgacgaggctgccgcgcggatccaggacgtgaaggtcttgtagacaggccggaggctggtggagctgctcatgggtaaggggccctcagccttgtccctcagcccggctggctggacccccaaggagtcccgagtgcttccagaaaagcccctccccagcccctcatccgccatgccttggggcgccatcctggtgctgatgtctgtgatgttgccccagggggacacgtcccaggcccccagtccaaggccccctcccaatgcccgtgtccccgcccctg

SEQ ID NO: 15983 - DNA, 1145 bp, Artificial sequence
  DNA replication origin
agcagtgagttcctccaaccctggcctattcacctcccccgaggtgcaagaaactagggggagggtgagaagccccttcccagtctctcctacttacatggctggggccgggtcctggtttccctggaaacaagtggcggcaggaggcagggtcaagaggaaaacactgaggctgtggctcgactggctgcactggccacactgacagctggatgggacgggccaagctgtggctgggagggaaggctgggggcagggacgtcagtaaaggtggagctgacccctgggctctgggctccctccgtcccccaggcctgctgcagcagtggccacagacagtaagtctgaggatgtggccttagccccagccttgagcacagggccgagggggctgggcgggctgggtggcctcttccagatctgtttcaggtctcctcgccccacagtgctcaccacggggaaacccggcctcatggtcgggctgcggggggctgaggaggagccacacgggggctaggccccaagtctggggggtccctgccgccagcggtgttctgggagctcctgggcctggtggagcccccgtgccattgaggtgacagacactggtgatggagatggcggtgacaggctgtggaactgaagcctggtgagtgaggggggcagatggctctggtgaggcaggagcagccagggtaggggggagggcagcccctggagctgtcattcctcctgcaggcatccccagggtccctggatgcccttcgcagctggctggatggtatggaggagctcaggcctttcatggcctctggtccctcatgctgtggcagctgcaggaacaggaggtgcagggagcggggggcagggctgagtagtgacacctttgggacacctctgaatcgcctctgaatctcagctcaagccactgattcccaatgatgccgctgggtgtcaggtcacagccgaccctccctggggggcagacagatggcagactctggtggaagatgtggctcttgtccccgtggctgctgacccctgtgaagggcactggtgggagggcaggacagaggccaccagccccctgcgctcagcccgcccccatgtcccagcagctgctcctgtacctgctgggggcaagg

SEQ ID NO: 15984 - DNA, 1270 bp, Artificial sequence
  DNA replication origin
gctcacatgcttggcacctctgggcctggaggtgggggtacgagtgggcagggtgggccgtccgagggtgtgggccagagcagcccctcccgggagaggcgtccaccacccatccacccacagcgcgtctgcgggcccgcccggcctgcctacccaccccacccagcatcttctgatggaaagttccccaggcaacagcagcacaaactctgtgagaaagacatgcccgggcaggggtgggcctgggccccacagggactcccagtgtctgtccagactgcccggaggctgggcccctgctctctgtcccctctcttacccaagcagcggtggctcctgctgggcctggggcccagcacagtggtgggcacaggtgggctttggcctgtgtgcccaacacagcatccactcctcggtagaggccagtgttggatgaaggactcagcgggtggggggagggtctgcactggcacctgcggacacagctgaccaccctgcacctgcagggaccaggggcgcccactcctgcgctggggagtcacctctccccattgtcaggcctgggagaggggggctccaggctggggaggggcaggttcattccaggcctgggtgggaaaggcgtggccacagggtggaggttcctggcagcgagaccggccagtctggggtggtgggaagtcttgggtgggggctgtcgggtccccaggggtggggcagctggggaatggagaggctatcgagggtgtaggtgaggagacagggatccttgaggtctgcatggctgcagaggaggaggcgggagagcccacctgtagctcctcagtccctggcccacaggagtgtgatcagcacccccatgttgcccgcccccagatcctcccagggcaggcctggcatccaccgccagcaatccctccctctggctgcctgcccagcgtgggggctcagtccagtgggccagacgggccttgggagcagtgagttcctccaaccctggcctattcacctcccccgaggtgcaagaaactagggggagggtgagaagccccttcccagtctctcctacttacatggctggggccgggtcctggtttccctggaaacaagtggcggcaggaggcagggtcaagaggaaaacactgaggctgtggctcgactggctgcactggccacactgacagctggatgggacgggccaagctgtggctgggagggaaggctgggggcagggacgtcagtaaaggtggagctgacccctgggctctgg

SEQ ID NO: 15985 - DNA, 1477 bp, Artificial sequence
  DNA replication origin
atggcctgttgttctgagctgaactgtgtcccccaaaaagacatgccgaagtcctaatcctagtacctgtggacgcaacattacttggaaatagagcacttgccaacgtcatcaagtgaagatgaggtcactagggtgggtcccaatcctaatggactggtgtccttacaagaaagcgctgccctgtgaggacgcgccagggcacgcgcggtgacggaggcagaggctaaagagctgtcgccgcaggcccaggacggccacaggttggtagcaaacagccagaagctgaaggagcagggagaggtcggctcagagtttcagaggagcaggccctgccgacaccctcttcacaggctctggcctccagaatttccagataacacgtctctgttgtttgagcccccactttgtggtgcttgcttgcggcagccccgggagaccggtccacctgagccatcttgggggcctggaacggggggcagggtcagcccggctgagctgtggcctgagggtggggagggagtggttccccagaaatgtcactgccaggatctggggcagcgtgtgctgaaagatgtatcggggcagggcctgggagggggtgagcgcatctcagcagacgccggggagggagaggcggagggcagggactggattcattccagccctctgcatgccgcagcagccaccgcctgagacaaacccccgaggagagggaacccgctggctgagcccaagagtctgaggcatggttgctcaaataaaaatggacctcagctgtgaaaacagcacagttcacttttcgcccacctgtgtttgtggtccgaggtggtgccagttgtgtgactatggttatggactctaggaggcctcgtgtggcttcagagggctgagggcgacgctggaggacacgctgagttcctgatggttccgtcgggctgagctgcgtccggataaatgtgacaggaagcagctcggacacactgatggctggaggccctgcagctcctgctgcttggcatgcgccgcgggcctgcgtgtcagagccgcctctctagctcggctcttgcggtcatgctggccttggtctccacatggctttgggttggctgttcttcgtgccattttctttctggctccgtctccatctctggagtgggaggtgtctgaacaggcatgcggagcatcaccaggtcccagtgccacgacccccggcacggtgggtcgccatgatgctgtgtggcctgccaggtgataggcgcccttgggccacatggtgacagagggtgcgagggtgccactaccccgtgatgagctgtaaacacacattgttatccatcccaggaaaacacaaactgcttctgttcctctttcttggcaggtaagggaagggatgccctcccgggctctgggagatgtgcgtgtgcgggatgccacgtgacacagctgaacctgaggggccacttttggcaaaggc

SEQ ID NO: 15986 - DNA, 1657 bp, Artificial sequence
  DNA replication origin
cttggtctccacatggctttgggttggctgttcttcgtgccattttctttctggctccgtctccatctctggagtgggaggtgtctgaacaggcatgcggagcatcaccaggtcccagtgccacgacccccggcacggtgggtcgccatgatgctgtgtggcctgccaggtgataggcgcccttgggccacatggtgacagagggtgcgagggtgccactaccccgtgatgagctgtaaacacacattgttatccatcccaggaaaacacaaactgcttctgttcctctttcttggcaggtaagggaagggatgccctcccgggctctgggagatgtgcgtgtgcgggatgccacgtgacacagctgaacctgaggggccacttttggcaaaggcagtgcgacaggcccgtgtcacgggacccgtggtcgccgtggtgatccgcgtggcagcgccgggactgcggccctcaggtggtggagccaccccgcagagtcgcgctcagggacagccgggtgaccacgggctgtggagctgggcactgcgctccagggcagggcttatgccctgaacccgtaagcagtgcatcctcagcctctcctccccagtaagtagaacgcatgggcctggggtgaagaggtggaaatgggaggggccacactcgccatccctgccggtgccctcttgcagatcctgcatcccctcctgcaaccagataccgccaagggccgagagcccagtctgagcagaggacactgaggccaccgccacgccagggcagctactccattttcaagtgaacctgagcacagctcctgggttgcatgaggggtgggcttggtggtgccaagcaagaaaggacaggcatagcgccggggctgactgcgtgggtgtgggctcaggacctggaggccgtagctcgagcactcagtccagcagccaggagcggctccagcaagggccaggctgtgaccagggctggctcagacaccgccgtgatcccaggaggaatgagctgatggtgggctccaggggttaccgccagagagtaagtatccaggcctggaacctcctgtgggaagggggttggcagcttccaggaaggccctgcctcctgcagccccggtgggccccctcgcacctgtatctactccagcaggtacattcccgggcctctccaacaccctgcacacctgtccagtgctcccacgtctccggccgcctgcctaagcacggctgctggcccgatgtccttcctcagtaccggatgcctgctttcaaatgctgtgtggggctcatgagccatgggccccgaaccaactgggaaagacccagcctccccgatctgcggcggggtctgtgcctgatcctggctgactcgggcccgtccttggctctcagtccactgcagttggtttggggcccacagctcatgagcccagcacagtcccatgccccgctgcctccgaaagctccctcgtctctggcagtgggggccacgtcggggctgtgatctccgctgcagccagagagctgtggtgggcagcgtccccagcgtcccctgtgttcaggtgggctgcgacaccgggcccctcctgacgtcctggcacccgcctttcactccctccttccttgtcacccccagaagcactcctcct

SEQ ID NO: 15987 - DNA, 1598 bp, Artificial sequence
  DNA replication origin
tccctcgtctctggcagtgggggccacgtcggggctgtgatctccgctgcagccagagagctgtggtgggcagcgtccccagcgtcccctgtgttcaggtgggctgcgacaccgggcccctcctgacgtcctggcacccgcctttcactccctccttccttgtcacccccagaagcactcctcctcgcagcccctgacgcaggctctgccgacccccagctgtgcagccagctgggcccccaggaccgccagttccacctcccggaactaccttccttcctccaccgcacactggccagggaggggccgtcagatgttagcaaactcttcctgcccaagaggccacacctgccagcccactctcaaaatcagccctggagaaactccccaagcaagaaggggtgtggactccagaaaccgcccagtgaggccccggtagggggagctgtgggcggtgggctctgcgcttgctgctccccggcctggtctgcagaccatcatccaccccttcaccgcaggccactgccgcggtcgatggtggctttgaggaaaaccctggctgggtgaccagttgtgacaagagctggaggctaacatcgccgggcccctcctccagccactgtcctctaagccctggggctgcaggaaagcaacctgggaagcccacctccctcaaatgcatatggggggatccatggcgccctggcccccaggacagaccctgtagcctgccagacagcggggcagccgtgaacgtgcagtgggggcgtgggccgcatcaggcacagacacggctgagcggcaggtgctgtggaggcagccaatcaatgagccagtggactttcacatgaacaaggggcgtgaccaggccggaagcaagggtgagagtttgtttaggaaaagtaccagacctgctagtgcagggatgcaggcggggtgcccagcatcccgggggccaggccagggccttgctgctggtggctgtgaaggaaaaggagaccaaaaatatacaagaaaatccagtgctttggagaatggaggtgagaggaggccgggaaccgcggactcgggttccccggagttggggtgaaggggaagatctcacacagaaagggtcaggggtcagggaggccacgggggagaccctgaaaaccccaccccgtgacccagaagcctcagaggcaagaggaaaatggaaggaacgttgggatagagagaaacctcctaaaaggggcgtcacaagggcctccgatttctcagcagcagccctggctaggtgaggacagctgcgtcttgctctgaaggaaagaatagcgggccttagacctccttccccaccttacaactccgtccccaccttcgccctctgtccccgaccttagacctccatccccgaccttacgcctccgtcccgatcttagacctccgtccccagcctcaaagcttcatctccgaacttaggtctttgtcactggccatccagatttctcttaaacaggaggccatcgtgagaacaaccatctcaggcccccaggccccccatggcgtgaacatgtggaggggtcaggaaggagaaaatgagaaaagaatctgacggg

SEQ ID NO: 15988 - DNA, 866 bp, Artificial sequence
  DNA replication origin
ggaacgttgggatagagagaaacctcctaaaaggggcgtcacaagggcctccgatttctcagcagcagccctggctaggtgaggacagctgcgtcttgctctgaaggaaagaatagcgggccttagacctccttccccaccttacaactccgtccccaccttcgccctctgtccccgaccttagacctccatccccgaccttacgcctccgtcccgatcttagacctccgtccccagcctcaaagcttcatctccgaacttaggtctttgtcactggccatccagatttctcttaaacaggaggccatcgtgagaacaaccatctcaggcccccaggccccccatggcgtgaacatgtggaggggtcaggaaggagaaaatgagaaaagaatctgacggggtgcgtggcagtcacggccgtagggctgaggggagaggagaaagtgcagctccacgcacggtgctccgggccaggtgccggcgaggggggccgggggagcacgtggcatggatgccgctgagaagagcaggacgagcttgtctgagccccaaggcagccgaggtcagagcggacgtgcaggccccactcaccaggccagcaaaggaaacgcaatgcgtcccgggcaaaccaataagcgaaagcatagtgtgtagaggctgcagaataagacgaggaaatctctccaaatacagcaggagctgccggacccagccacgctcacccaggaggataccctcggaccccctgagaaagagcaaatgagacccggcaactggcgggctccgagggacaatcttagaataaaaagacacgtgggcccagggcaggaggcaccaacctctgaccaactagaatcacaggcgtg

SEQ ID NO: 15989 - DNA, 3506 bp, Artificial sequence
  DNA replication origin
gatctttttatcagttggcacagaggcttctcgttttgagtggggcccaggaaaaggaagggtagcacagctggtgaggctgtggaacaaagtcctgccactcaggccctgtgagctaacagagctcttgtaccaggagcacctgccgcaggtggggaaggatgcgtcaaggggtctccggcaaggcccaaaagagctgcagcaccagccctaagttttgaagcaaggaggtcccgactgcaacagagaactgcggactgttcagagaagttcctggggatggtgtggccacagctcccaccaggagccagtgccacaagacccacccaggctaaggtcagcggcacagtgaggatccagggtaaggggcggtgcactgccgggcaccagccatgagagccagagggctgcacgggcaggtggcgcagcttccagcttgcccgccagtcaggccacagcctcagagggtccctgtgactgggtgggggccaagcccggcctgcttcatggcggttgggttcatggtagtcggaccactccacttgggctggccctggagtcaggggtcggggcgatccctggcctctcatgaggagaggagagcagctcatggtaaggacacacgtggacagggctggggaagggctcggctggccggtcagggcctgagaagggcaacgctggaagacggactggggaatggaactgccgggtggacaccagcgtggggacttgtgggtgttcaccaggggcaccggctgccgagcgggcacccagccacccacaagccaatgacgcggccagtgacgcagcgtccggtgctcccacacggctcccgcctggagcgatggaggaccagacgaagccaggcgccccatgacaagcccagctcctgtcggcagcagcacatcccgtcctctggccataaagaccaccaggggccctggacgcaaaaccagccagagaccaaccggtcacttggaggtaaactcagccctggaggccccttccccttggaaagacaacagctggtattccaggcacggacccacctttccagcccacgatgcctccgtgtctgccctgggagacgggctcctgtgtaacggcccccagggcctctgactgcttccggcaagggggtgcagagggagcgggaacacgggcgccgcagagcctagagcgtcggcgagcttctcggaaagagttggtgccaccgtcctgacaccaaccctctgggactgtggtggtcccgtcctccaggatgtggtcttcggcctaaatcagtggccccacagaggaccgcatgggtctggggaccaaggggtagaggcaggagtggccgcccactcaccagctcccagtgacccactgacaacctgtgcttcctttccctgcaactcttaagctgtgagggctcagaggtcctaaaacccagccacctgggacagagtaaggcactgccccgctcgatggctgtgggtcacccggccggggccactcctgttccagcggaccagcaggcagagcaccctctaccgggccggggcagggagggtaaagcccagcaagagcgagaagactaggacttggaccccagggtgaacgcctgggtcccaccagcaggagaggcgaaggccaggcacagtggctcacgcctgtaatcccagaactttgggaggccaaggcagggaggatcacttgaggccaggagttcgagaccggcctggccaacacggtgaaaccccatctctactaaaaatatgaaaattagctgggtgcacacctgtagtcccagctactcgggaggctgaggcagtagaatcatttgaacatgggaggtggagactgcagtgagccgagatcatgacactgcactccagcctgggtgacaaagcaagactctgcctgaaaaaaaaaaaaaaaaaaaaaagagtatcggctgagcctggaccagtggctactgcaggctggggtggccccgcttccctcctcccctaagtcttcccagaaactgccaccagtcggaagcctggagaagcccatccagatggaatccccggagtgtgatgggcatggggccgagacatggcagactgtggtggaggccctcatactaggcccactgcctgtggccccttctctggagggctgcccggccagcagcaaccaactgacccggggccatgtggcaccctccccggaggccaaggggccacagccagtgactgatatgggagcataccacaccccgcctcagataaggaaacgtgagccccttatagtgcgaagggtggggctgggagactggtcagcacctgaccagcagcaggtcccagggggcccggcctcagtgtggccaccaccctgccccacactgaatccctctgcccagggtctctcagctgccctcctgcgagcacctggtctctgctgcacacagacgtacgtccctgactggccatagtggctgagctcagagcctggagcctggggctgcaatgtccaccctgtccctgacacacacctgaccccaagacacaaggccggaggcacgggaaggttggaattgcttttattgggggcggataccgcaaggccccgcccacggtcaggttagtgttctgcccttgcagaggcgccagcagcctgacacctccacctgccacccgcccggggttagtggaacatgcaaagctcagagggtggaggcaggggtggtcgctgctgagaccagggctgggtgcaacaggagggtcagcacagagcctggctggtgtccctgggcccaaagggggctggggctccatgggagagagacgggcaggcggcaccccagtgtggggctccacaagctggaggggcccctggacccaccaggaggacaggtctgcagttcccagccatgccggctggaacgtccgcctccccactgggtctgggtcctcggggcctggggttagaggccgacatggaaggcacttactaggggaacagaggctggaggctgacgccggaggccaggggtctcaggagtgagtgtggggggtgagctggaaagcacagatcagacagcactgtgggggctgggcccgagggcctcgtcttcccatggggaaggggcttctctgggtagactgggagagaggctgactggggccccccgtccccagcaaggcccaccgtgcaggccagtgctagaaacaccagggccctctacagacagggttgggcccagctgccctgtgcagctaggactggcaggcgggctaccctgggaagacaggagggtgggctggggcccagcttgggaccctccaaggcacctggctgtgtgagtggcaggtagaagggagtgaggagacccgagggggtgaggcggccagcagggctgggccagccctgtcccccaagatacaggctgtctggacagcagatatatattaatatattagtctggtctttttggttaaactttaggcaccacttgggaggaagacaccttt

SEQ ID NO: 15990 - DNA, 1882 bp, Artificial sequence
  DNA replication origin
cgcctcggtgggagccgggctgggccgcatgcagagcggggtgggcgcaggcagcctcaggccacggcagactcagggccccccagggaggccgaggaccccgaggcgtagcggcggccgtagcccgaggaggagtaggaggatgaagagaaggtcatggagaagccggagccggtggcgtcaaagctgccgcggcgggagccggcccgggagccggtgcgcgagccggtgcgggagccagcggtagagccggagccgctgacgctgtaggggctgtagtagcccttggtggactgcgcggcagcctccagcagccgcagccccgtgccctcctccaccatgctgcggtccagcgcgtccttataggagatcttgagcttggtcttagggcaggtgaggtacttggagtaggcgcccacgtcacgcagcttctgtgcggtgcgggcgtccaccgtgccgcgctgcagggcctcgtccaggggcacgcggcccggcgtgtcgggctcgatcaagccgccggtcaggtactgcacctccaggaagcgctggccggcctcgtagtagagccagcccttcttcagggcctgggcggccgacatcttggtcttggtgcgtgggtcctcgaagccgcagaaggccttctgggccaggttgatgcggtccaccatgatcttgtccaccaggcccttgttgacggcgtcggtgacagggaagcgctcaccggtgctggggtcgatgatgcccccggtgcaggcctgcgcctccagcagccgctgccccgtgatgttatccaccaggttccggtgcatggcctcggtgatggacaccttctccagcgtctccgtgtccaggatgccagccacggggcccgtctcctcagtggggtctgaccaggaggccagctgggtcctggagacggcggggctgatggggtaggaggaggaggatcccaccgaggaggaacgggagcggaaaccaccggcgttgcccgagagcatgtcggcgaactcggtgatggagagcgtgccggcgcggtactggtccagtgccgagcggtcgatgaggttcttggcgatggcatcatcgatgtcgtactggcgcccggagcggcggtcgatgatcatggacttgaccacgccgtccgaggaggagatggtgatctcctcccactcgcactcctgctcggacagctccaggtacgtctggtggtcaatcaggcccttgcggtaggcctcgtacactgacatctccttgcccgtctcggggtccacgatgaccactcggcgcttgcgcacggaggacttggaggacgtcttccgctcccgcttcttctccttcagcggcaagagacacaggcccgtctgggggtcagtgatacaacgctccatcagctgcaggtaggtgaggttctcctccgtgttagggtcaaagaagcccttggtgtcgtccgaggggtcggtcaggatctcgttcatctcctcatcgaagaggccgcgcttgtaggccacctccacgggcagccggtggctctcctcagggtcgatgatgccgcccgtggcgatctgggcctccagcaggcggatgccatggtccttcaggatcaggcccttcttcatggcctggaagagggagatgagcttcccagagtaggggtccttgtacccagtgacggcgcgctcggccgacagcagcttgtccttgaactcggggcccacaatgcccatacgcacagcctcctccaccgtcagcttcagtcccttgatggggtcgatgacgtaaccggtggccgcctgcgcctccaggagctcaaaggctgtgccggggcggatgatgcccttcttcatggcctggtacaccgagagccgttccttggtggcgtcca

SEQ ID NO: 15991 - DNA, 2059 bp, Artificial sequence
  DNA replication origin
gccctgaagaaagacctgctgccatccgacatggccgtggccctgttggaagcccaggccggcaccgggcacatcatcgaccccgccaccagcgcccggctgaccgtggacgaggcagtgcgtgctggcctggtgggccccgagtttcatgagaagctgctatcagccgagaaggctgtgacagggtacagggacccctacacagggcagagcgtctccctgttccaggccctgaagaagggcctcattccccgggagcagggcctgcgcctgttggacgcccagctgtccacgggcggcatcgtggaccccagcaagagccaccgcgtgcccctggatgtcgcctgcgcccgaggctgcctggatgaggagaccagcagggccctgtcggcaccaagggccgacgccaaggcctacagtgaccccagcacaggggagccggccacctacggcgagctccagcagcggtgccggcccgaccagctgaccgggctgagcctgctgccgctctcagaaaaggctgctcgggcccggcaggaggagctctactcagagctgcaggcccgtgagacctttgaaaagaccccggttgaggtccccgtgggtggcttcaagggcaggacggtgacggtgtgggagctcatcagctctgagtacttcactgcggagcagcggcaggagctgttgcgtcagttccgcacgggcaaggtcaccgtggagaaggtcatcaagattctcattaccatcgtggaggaggtggagaccctgcggcaggagaggctgtccttcagcggcctccgtgcccctgtgccagccagcgagctcctggcttccggggtcctcagcagagcccagtttgagcagctcaaggacggcaagacgacggtcaaggacctttcggagctgggctccgtgcggacgctgctgcagggcagtggctgcctcgccggcatctacctggaggacaccaaggagaaggtgtccatctacgaggccatgcgccggggcctgctgagagccacaacggctgcgctcctgctggaggcgcaggcggccactggcttcctggtggaccccgtgcggaaccagcgcctgtatgtccacgaggccgtgaaggcgggcgtggtgggccccgagcttcacgagcagctgctgtctgccgagaaggccgtcaccggctacagagacccctactcgggcagcaccatctccctcttccaggccatgcagaagggcctggttctccggcagcacggcatccgcctgctggaggcccagatcgccacgggcggcatcatcgaccccgtgcacagccaccgcgtgcctgtggacgtggcctaccagcgcggctacttcagtgaggagatgaaccgcgtcctggcggaccccagcgacgacaccaagggcttctttgaccccaacacgcatgagaacctcacgtacaggcagctgctggagcggtgcgtggaggaccccgagacgggcttgcgccttctgccactgaaaggggcggagaaggctgaggtggtggagaccacgcaggtgtacactgaggaggagacaagaagggcatttgaagagacacagatcgacattcccggcggcggcagccacggcggctccaccatgtccctgtgggaggtgatgcagtcggacctgatccccgaggagcagcgggcccagctgatggctgacttccaggccggccgggtgaccaaggaacgcatgatcatcatcatcatcgagatcattgagaagacagagatcatccgccagcagggtctggcctcctacgactacgtgcgccgccgcctcacggctgaggacctgttcgaggctcggatcatctctctcgagacctacaacctgctccgggagggcaccaggagcctccgtgaggctctcgaggcggagtccgcctggtgctacctctatggcacgggctccgtggctggtgtctacctgcccggttccaggcagacactgagcatctaccaggctctcaagaaagggctgctgagtgccgaggtggcccgcctgctgctggaggcacaggcag

SEQ ID NO: 15992 - DNA, 2264 bp, Artificial sequence
  DNA replication origin
cagacactggagatccagcgacagcagagtgaccatgatgccgagcgcctgcgggaggccatcgctgagctggagcgtgagaaggagaagctccaacaggaggccaaactgctgcagctcaagtctgaggaggtaccgccccctctacgtgcgacgggcgggtgggcccggggatctgctttggtgggtgatgggtgctcctgggctggcggtccctgatcacaccctcttcttctgcagatgcagacggtgcagcaggagcagctgctgcaggagacgcaggccctgcagcaaagcttcctctctgaaaaggacagcctgctacagcgggagcgcttcatcgagcaggagaaggccaagctggagcagctcttccaggacgaggtggccaaggcacagcagctgcgtgaggagcagcagcggcagcagcagcagatggagcaggaacggcagcggctggtggccagcatggaggaggcgcggcggcggcagcatgaggccgaggagggcgtgcggcgcaagcaggaggagctgcagcagctggagcagcagcggcggcagcaggaggagctgctggctgaggagaaccagaggctgcgtgagcagctgcagctcctggaggagcagcaccgggccgcgctggcgcactcagaggaggtcactgcctcgcaggtggctgccacaaagaccctgcccaatggccgggatgcacttgatggccccgcggcagaggcagagccggagcacagcttcgatggcctgcggcggaaggtgtcagctcagaggctgcaggaggccggcatcctgagtgcggaggagctgcagcggttggcgcagggccacaccacggtggacgagctcgcacggcgggaagacgtgcgccactacctgcagggccgcagcagtatcgcagggctgttgctgaaggccaccaatgagaagctgagtgtttacgccgccctgcagaggcagctgctgagtcccggcacggccctcatcctgctggaggcgcaggcggcctcaggcttcctgctggaccctgtgcggaaccggcggctgaccgtcaacgaggctgtgaaggagggtgtggtgggccccgagctgcaccacaagctgctgtcggccgagcgcgccgtcactggctacaaggacccctacactggccagcagatctctctcttccaagccatgcagaagggcctcatcgtccgggagcacggcatccgcctgctggaggcccagatcgccacgggcggcgttatcgaccccgtgcacagccaccgcgtgcccgtggacgtggcctaccggcgcggctacttcgacgaggagatgaaccgcgtcctggcggaccccagcgacgacaccaagggcttctttgaccccaacacgcacgagaacctcacgtacctgcagctactggagcgctgcgtggaggaccccgagacgggcctgtgccttctgccactcacggataaggctgccaagggcggggagctggtctacactgactccgaggcccgggacgtctttgagaaggccaccgtgtctgcgccgttcggcaagttccagggcaagacggtgaccatttgggagatcatcaactcggaatacttcacggcagagcagcggcgggacctgctgcggcagttccgcacgggccggatcacagtggagaagatcatcaagatcatcatcacggtggtggaggagcaggagcagaagggccggctttgctttgagggcctgcgcagcctggtgccagccgccgagctgctggagagcagggtcatcgaccgcgagctctaccagcagctgcagcgaggtgagcgctctgtgcgagacgtagccgaggtggacactgtgcggcgggctctccggggtgccaacgtcatcgcgggtgtatggctggaggaggcggggcagaagctgagtatctacaatgccctgaagaaagacctgctgccatccgacatggccgtggccctgttggaagcccaggccggcaccgggcacatcatcgaccccgccaccagcgcccggctgaccgtggacgaggcagtgcgtgctggcctggtgggccccgagtttcatgagaagctgctatcagccgagaaggctgtgacagggtacagggacccctacacagggcagagcgtctccctgttccaggccctgaagaagggcctcattccccgggagcagggcctgcgcctgttggacgcccagctgtccacgggcggcatcgtggaccccagcaagagcca

SEQ ID NO: 15993 - DNA, 1000 bp, Artificial sequence
  DNA replication origin
gcatcgaggctgagaaccgcgcactcatcttgcgtgacaaggacaatacgcagcgcttcctgcaggaggaggctgagaagatgaagcaggtggcggaggaggccgcgcggctgagtgtggcggcccaagaggctgcgcgactgcggcagctggcagaggaggacctggcacagcagcgggccttggcagagaagatgctcaaggagaagatgcaggcggtgcaggaggccacgcgactcaaggctgaggcggaactgctgcagcagcagaaggagcttgcgcaggagcaggcgcggcggctgcaggaggacaaggagcagatggcgcagcagctggcggaggagacgcagggcttccagcggacgctggaggccgagcggcagcggcagctggagatgagcgctgaggctgagcgcctcaagctgcgtgtggccgagatgagccgagcccaggcccgcgctgaggaggacgcccagcgcttccggaagcaggcggaggagatcggtgagaagctgcaccgcacggagctcgccacccaggagaaggtgaccctggtgcagacactggagatccagcgacagcagagtgaccatgatgccgagcgcctgcgggaggccatcgctgagctggagcgtgagaaggagaagctccaacaggaggccaaactgctgcagctcaagtctgaggaggtaccgccccctctacgtgcgacgggcgggtgggcccggggatctgctttggtgggtgatgggtgctcctgggctggcggtccctgatcacaccctcttcttctgcagatgcagacggtgcagcaggagcagctgctgcaggagacgcaggccctgcagcaaagcttcctctctgaaaaggacagcctgctacagcgggagcgcttcatcgagcaggagaaggccaagctggagcagctcttccaggacgaggtggccaaggcacagcagctgcgtgaggagcagcagcggcagcagcagcagatggagca

SEQ ID NO: 15994 - DNA, 1156 bp, Artificial sequence
  DNA replication origin
cggccgctggcaaggcggagctggagctggagctgggacgcatccgcagcaacgcggaggacacgctgcgcagcaaggagcaggccgagctggaggctgcgaggcagcggcagctggcggcggaggaggagcggcggcgccgtgaggctgaggagcgcgtgcagaagagcctggcggccgaggaggaggccgcacggcagcggaaggcggcgctggaggaagtcgagcggctgaaagccaaggtggaggaggcgcggcgcctgcgggagcgagcggagcaggagtcggcgcggcagctgcagctggcccaggaggccgcccagaagcggctgcaggcggaagagaaggcacacgccttcgcggtgcagcagaaggagcaggagctacagcagacgctgcagcaggagcagagcgtgctggaccagctgcgcggcgaggcggaggcggcccggcgggcggctgaggaggcggaggaggcccgggtgcaggcggagcgtgaggcggcgcagtcccggcggcaggtggaagaggccgagcggctgaagcagtcggcagaggagcaggcacaggcccgggctcaggcacaggcggctgcagagaagctgcgcaaggaggccgagcaagaggcggcgcggcgggcacaggcggagcaggcggccctgcggcagaagcaggcagctgacgcggagatggagaagcataagaaattcgccgagcagacgctgcggcagaaggcgcaggtggagcaggagctgacaacactgcggctgcagctggaggagaccgaccaccagaagaacctgctggacgaggagctgcagcggctgaaggcggaggccacggaggccgcacgccagcgcagccaggtggaggaggagctcttctcggtgcgcgtgcagatggaggagctgagcaagctcaaggcacgcatcgaggctgagaaccgcgcactcatcttgcgtgacaaggacaatacgcagcgcttcctgcaggaggaggctgagaagatgaagcaggtggcggaggaggccgcgcggctgagtgtggcggcccaagaggctgcgcgactgcggcagctggcagaggaggacctggcacagcagcgggccttggcagagaagatgctcaaggagaagatgcaggcggtgcaggaggc

SEQ ID NO: 15995 - DNA, 1908 bp, Artificial sequence
  DNA replication origin
gcagtgcctgcagctccccctcagccccgccacgctggcgctcggtggcctccaactgcaggcgcaccacgcggatctcctcctcgatgcgcagccggctgcgctcagccgcctctgcctgccgggccttggcctggatctccgcctccgagctctgccgcagctgctgcagctcctcctgaatgctgcgcttctgctgctgcgcgtccaccgccgcctcctcccgccgcaccacctcctcctgcatgcgctgctgcagctccttcgcctcccgctccgcctgtgcctttgcctgggcgtgcgcctcggccagctgccgctgcttctccagcgcggcctccacctcggccagccgctcgcgctcctctgcccgctgctgctcagccagcctctgtggccacagcagagagaagaagagaagcagagagagtgtgaacacgggcaggcgctgacggggcacgcaccggcacagttcactcagacagcgcggagcaggggtcggggaagacagaggccccagcccggcggaggagacagcgtgcacccgcccagggcgctcgggcagcgatcgcagccggccccactgtgctcaccagcctggggaaggaggcccaggcgtcctccctgcttcccgcagacaggcgacggagacagacggacggggagagagagagcaaagcaggagctcggaacctgcgagccacacccagcacacagccctgcctgagctctgctggacaccagtgggcctggctcccaccactggacccctctccccgaccagggtgggaagcctgggtggggcggggtgaggcgaggcggccagcgtggagacagcagtgcagacccgagccaactcggaagaggattcagggccacgcagaaggtagggagaagccaacagatgggtgccttggaagaccctccctagccccacaactcagcacccccgacttctggcagcaaagggttgagcggaaaggccaacgcagaacgccaaggaagagcccacaggacggccgctaggctgcaggggggacgctcacgagggaggagaggcggcaccagccactgtgggggagcagtgtagccacaccaggccaggggggcaggccacaggtggggcagcctggggcaggctgagctgggggcagggggtgctggcagcgccagtggggagagtggggagggccacgagaggtggcctcaggcagctcctgtggctgtgtgtgggacacaacaggtggtgagatggaaccctctgcccagcctccgcccaacgggctgtacctcctcctcctccatgcgccgcagagtctcgctgatgaacttgatgtactggctcgtcagtgtggtcagctcgctgtagtgcgtacgcaggtccacgtactgtggagtagagccagggttagccctgcgagagctgcagctccagccagaggcctgccagcccctcacccagttaggttcggccccaccctacctcctggatgacactctctgatcccgactggaccttgggcttcttggccggggaggccaccggctcaagctgcgccttgtacgtcaccagctggagttcatagtcctgtggcaatgcactgcggtcagccaccagctctgccctccgatggcccctgcccagcccctaaaccctcacatgggctttccctggcatggcccaggctcagggaaagcccgccatcatcctggcaacggtcccggacttggggcctggtgcaggcggctgggcctcaccttgatggcgttgatgtactgtttcgcaaacctctggcactcctcgaccttctcgccgtggcgctcgatctcctccagcagggcctgggtgatggtgtggtcagagccgtggccgcagggcacgcccagccgccccgtccccaccgaccc

SEQ ID NO: 15996 - DNA, 1582 bp, Artificial sequence
  DNA replication origin
taccagcagctgctgcagagcctggaacagggtagggcacggcagggctggggcggttgggctggtgcgaggtgggcggtggagtgacccacatgtgttccccaggtgcacaggaagagtctcgctgccagcgctgcatctccgagctcaaagacatccggctgcagctggaggcctgtgagacgcgcaccgtgcaccgcctgcggctgccgctggacaaagagccggcacgggagtgtgcccagcgcatcgccgagcagcaggcaggggccgtccccccccatccagtcccatccctctccccatccctcctcccaccctccctcctttggccttcaaggggcgctgtgtgctgcgctcggtgatgagtgcgttcccactccctgtctttgcagaaggcacaggcagaggtggaggggctgggcaagggggtcgcccggctctctgccgaggccgagaaggtcttggccctaccagagccatcgcctgcggcccccacgctgcgctcggagctggagctgacgctgggcaagctggagcaggtccgcagcctgtctgccatctacctggagaagtgagtgcacctggccacaggcgaggggctggggtcggctggggggtgctggggtgagggctgtgaccttgcaggagggtgcaggagggaacgagttgggggctgttcagagatctggccaggaggcgggaggcccagctggggtggtggccgcagaggtggtgagaagagttcagggctggatacgcttcgacagtggcggccgggggacttcctggtgatgagattcgggtgtggggaagagacagtggagctgggcagcggctgctgagtgaggtggggaagctgtggatccactttcagtggcacagtaaggaatcctgcaccctgcctctcgtctgtcctgttcctggcctggacttaagggcctctggcatttatttccaatgtgttatgtcatagtctcttcctgtgttgcaaaccacaggtccacccgctgtctactcctcacagaaccagcacagtgatagggccgccgcctcttcctgtgttgcaaaccacaggtccacccgctgtctactcctcacagaaccagcacagtgatagggccgccacctcttcctgtgttgcaaaccacaggtccacccgctgtctactcctcacagaaccagcacagtgatagggccgccgcctcttcctgtgttgcaaaccacaggtccacccgctgtctactcctcacagaaccagcacagtgatagggccgccgctggctaccacagggtgccatttccaccccggtgtccccttcgcccagtcttgggctgcaagggctgagaactacgcttccaggccctgtgggcaccaggatgccgctgtcatccagccagtgggctcgtcctgtctcggggccttggggtctgccgttcctggctggcgcaccccctctccaggctgggtcctgagtgtccttgtgttacagaggctcccaacctccttctccccaaggctgttcttctcctgaagcaagcctctgaccacagggtcagctgacccccagggttgggtctg

SEQ ID NO: 15997 - DNA, 847 bp, Artificial sequence
  DNA replication origin
cagcagctccggcagcgaggccgccgtgccctccgtgtgcttcctggtgcccccgcccaaccaggaggcccaggaggccgtcaccaggtgggtggcgggggctcagcaggtgggggctggaaggcgggtggggcgctggtgacgctgactgtagccctgacctgccaggctggaggcccagcaccaggccctggtcacgctgtggcaccagttgcacgtggacatgaagagccttctggcctggcagagccttcgccgcgacgtgcagctcatccgctcctggtccctggccacggtacgcctgcccccgagccgggggctctctgggtgggaggaggggagaggcgttgtgcagggcacggccgcctcgcccggcactcagccccacgtgcttcccccagttccgcaccctgaagccagaggagcagcgccaagccctgcacagcctggagctgcactaccaggccttcctgcgggacagccaggacgcgggcggcttcggacccgaggaccggctgatggctgagcgcgagtacggctcctgcagccaccactaccagcagctgctgcagagcctggaacagggtagggcacggcagggctggggcggttgggctggtgcgaggtgggcggtggagtgacccacatgtgttccccaggtgcacaggaagagtctcgctgccagcgctgcatctccgagctcaaagacatccggctgcagctggaggcctgtgagacgcgcaccgtgcaccgcctgcggctgccgctggacaaagagccggcacgggagtgtgcccagcgcatcgccgagcagcaggcaggggccgtccccccccatccagtccca

SEQ ID NO: 15998 - DNA, 1039 bp, Artificial sequence
  DNA replication origin
ggaggaggcagtaccttctgcagcccgcaggggaggggcaaggggcgagggcattgtagggaccagagcgtagctgggaggacatggtgggtgagctggggtgagaggagggtgccctgtctgggttgggaaggagcgagggtgcatgggtctgcttggggccaacccccggggcctgtcccagctatacctcctgcttccaagtgctgccaccccgggagcatcaggagggccccacaggcctggtcccggggtctgggggtgcctggggcaggcctgtgggtctccatggccctcgtctggatgctgcccctcccccacaggacgagaaggaacagctgaacgagtacaagggccacctctcaggcctggccaagcgggccaaggccgtcgtgcagctgaagccccgccacccagcccaccccatgcggggccgcctgcccctgctggccgtgtgcgactataagcaggtggaggtgagcgcaggccgggggtccactggggggcgtggccaggcagggcagggtgtggccatgtcctcaccgactctgcccgtcccaggtgactgtgcacaagggtgacgagtgccagctggtgggccctgcacagccgtcccactggaaggtgctcagcagctccggcagcgaggccgccgtgccctccgtgtgcttcctggtgcccccgcccaaccaggaggcccaggaggccgtcaccaggtgggtggcgggggctcagcaggtgggggctggaaggcgggtggggcgctggtgacgctgactgtagccctgacctgccaggctggaggcccagcaccaggccctggtcacgctgtggcaccagttgcacgtggacatgaagagccttctggcctggcagagccttcgccgcgacgtgcagctcatccgctcctggtccctggccacggtacgcctgcccccgagccgggggctctctgggtgggaggaggggagaggcgttgtgcagggcacggccgcctcgcccggcactcagccccacgtgcttcccccagttccgcacc

SEQ ID NO: 15999 - DNA, 1696 bp, Artificial sequence
  DNA replication origin
cggcccggcccacggtggaggtggggctccctgggtaggggcggggctgcggggggggccgtgccgggtccccaggcggggcggggcggggcctgaccgggacctgctgtcccgcagtccttccaggcggccctgcagacgcagtggagctggatgctacagctgtgctgctgtatcgaggcacacctgaaggagaacgctgcctactttcaggtgagaaccggagccccctccgcactgtggctcagcggcagccttgcaggagcccctggaccccctcggcagctccaatcaggagccctcctgtctgcagacgttgccagctgctgcctgcagcctgaccggggccttggacaggggtgctccccaggcctcctgggggctttgccactccttcctcagtgcccccgtcttgggcctgccctgggacaactgtgggctggggctctggtcccaggtagcctggcgtgaccccctcccgctgccccagttcttctcagatgtgcgggaggccgaggggcagttgcagaagctgcaggaggcactgcgtaggaaatacagttgtgatcgctccgccaccgtcacccggctggaggacctgctgcaggatgcccaggtgagggagggggtgtgcaggggcgtgtcaggaggggctggcctggagtctgggctgcacgggtactctggagactagggggcaactggaggggccagcaggagttgggaggcaccatgggaggtgtagaggtcagccgaagcgggaatgaggcaggatgttctgggctgcatgggtactctggagactagggggcaactggaggggccagcaggagttgggaggcaccatgggaggtgtagaggtcagccaaggggggaatgaggcaggatgtggggagccgagaggcagccggtccaagccgggccgcccccatctccatagccacagagtgagtggaagcctgaagtcagcagctgccgccagcccttgtgctgtagaaggggcaccgccagcccttgtgctatagaaggagcactgccagcccttgtactatagaaggggcaccagctgtttggcctgagatctggagcgggcagagtggaactgggctttgtgctctgggagcaggggtgggatcacccaggagggcgggtgcacagtggggagtgacagggaagagggactggagactgaaatggcctctgaggtcggcagggctgggccggggggagagccggcagctcccaggtgtgtgccgtcctgcggcctggcccccgcagaggggtgggatgggaggaggcagtaccttctgcagcccgcaggggaggggcaaggggcgagggcattgtagggaccagagcgtagctgggaggacatggtgggtgagctggggtgagaggagggtgccctgtctgggttgggaaggagcgagggtgcatgggtctgcttggggccaacccccggggcctgtcccagctatacctcctgcttccaagtgctgccaccccgggagcatcaggagggccccacaggcctggtcccggggtctgggggtgcctggggcaggcctgtgggtctccatggccctcgtctggatgctgcccctcccccacaggacgagaaggaacagctgaacgagtacaagggccacctctcaggcctggccaagcgggccaaggccgtcgtgcagctgaagcc

SEQ ID NO: 16000 - DNA, 1181 bp, Artificial sequence
  DNA replication origin
ggatgtccggctgctggctgcaggcaaagtgccacagcgggcgggggaggtggaacgggacttggacaaggcggatagcatgatccggctgctcttcaacgacgtgcagaccctcaaggatggacggcacccgcagggcgagcagatgtaccgcaggtgggccccgccctgccctccctgaagcccaggtacacacggccccaggcccgccaacacctacctgagtcctctgctgccccagggtgtaccgtctgcacgagcgcctggtagccatccgcaccgagtacaacctacggctgaaggcaggcgtggcggcccctgcaacccaggtggcccaggtgactctgcagagtgtgcagaggcgccccgagctggaggactccactctgcgctacctgcaggacctgctggcctgggtggaggagaaccagcaccgtgtggatggcgctgagtggggtgtggacctgcccagcgtggaggcgcagctgggcagccaccgaggcctgcaccagtccatcgaagaattccgggccaagatcgagcgggcacggagtgacgaggtgggtggcgctgagcgatgggcagtgcgggggtgggccgggcccagccactgcagacctcaccgtctcatctgttgcagggccagctctcccccgccacccggggtgcctaccgtgactgcctgggtcggctggacctgcagtacgccaagctgctggtgagtgggggcagggccagccgggggaggtgggtagcccgcggcctgctgacacgcaccctcctgcccacagaactcctccaaggcccgcctcaggtccctggagagcttgcacagctttgtggcagccgccactaaggagctaatgtggctgaatgagaaggaggaggaggaggtgggcttcgactggagcgaccgcaacaccaacatgaccgccaagaaggagagctactcggtgagcggtggcccagctgccctgaaccccacagccccctccccagctgtgccctggccgtcccctatggtcagagaccagtgggggccctgggtcgagtttgctgggagcgtggcagagccgggtgtggccggccgtccctgagaccctttgctctggtgccaggcgctgatgcgggagctggagctgaaggagaagaagatcaaggagctccaaaatgctggggac

SEQ ID NO: 16001 - DNA, 1147 bp, Artificial sequence
  DNA replication origin
gggaggcgagctgcagtctgtggccagggctgtgccggacccggccaacgcggccccttccctgtgctgctgctgcaggctggagtgtcttcagcgcatcgtgaccaagctgcagatggaggcggggctgtgtgaggagcagctgaaccaggccgacgccctgctgcagtcggtgagggggtgtggggcaggcagtgggcgggagggaggccggaggagcctgccccgccctgcagccctaaagccaggagggggctgtccccctgggctcctggggcaggggcaggggcaggggcggggcatgtggtggggaatccaggcctgagctcctccctcctcgtgtgcagctaactctcactgcctgctttgggcagagttggtttctggccacggggcagaacccacgctgggctgccttgcccccgccaggccccctccccgacagcggcttactgttaggggaggggttgggggagggcccaacccactgctgattgcccaggaggacagggcccacgtggcattacaggaggagttacccagggtgggtgatggaggatgaggcccaggaccccacagacatggtcatgggggtctcggttcttggactgggctaagtactctggacttggtcccaatcccccagaaggccagtaggaagatgtgtgaggtgggcagggagggaaggggaaggacagggatggaggcagtggcccactgaggctgaggaagcggctgagggtggccgtcttggccggggcccctgtgaggtcagagggggatcagctgtgctccgagtcatggcaacgaccttgcaggatgtccggctgctggctgcaggcaaagtgccacagcgggcgggggaggtggaacgggacttggacaaggcggatagcatgatccggctgctcttcaacgacgtgcagaccctcaaggatggacggcacccgcagggcgagcagatgtaccgcaggtgggccccgccctgccctccctgaagcccaggtacacacggccccaggcccgccaacacctacctgagtcctctgctgccccagggtgtaccgtctgcacgagcgcctggtagccatccgcaccgagtacaacctacggctgaaggcaggcgtggcggcccctgcaacccagg

SEQ ID NO: 16002 - DNA, 1619 bp, Artificial sequence
  DNA replication origin
gcagcacaggctgactcacccgctgcttgtcctggctgcacaggaaaccacaaatctgagagctgagcaggcagagcctggtgctggcacggcagctgagtcacacaggctggcaggacgacaggcagctaggggtgggtgggcagaacctggcctgagcatgccactgagtgtaaagccaggctgccagaggccccacctgccagcctgcaaccatcgatggagctcgacccccagccttttccaggcctgggggttctgggccaggtttagtggtacacttgtgggttcctcttatgcccactgcccttccactctgctccatcccagctccgggaggtgcagggtgcagcctagccctccccagctaggggagtgggcacctgctgtgtggtggcagtgagggttgggggttctgagctgcgtggtggcagctgccaccggctggagtggctggacttgtggccccgaggcatggccagtcccagcagcttcccaacagggaagggccctggagcccggtgctgccctggctggtttggtggccccatgcactccccctgggtgctgagctacccctgcccctgtgcatgtggctgtgggcacagagcaggcctggtggctgtggctgagctgtggcctcctctctgctgtgagcagatctcagatatccaggtgagtgggcagtcggaggacatgacggccaaggagaagctgctgctgtggtcgcagcgaatggtggaggggtaccagggcctgcgatgcgacaacttcacctccagctggagagacggccgcctcttcaatgccatcatccaccggcacaagtacatggccccgggggcagggggctgtgggctgggggcacccccacagcgcctccactaggcaacttcagacacgttggggcagggaggagggcaggaggaacagggatgagtgccagctggccgcctcggggtggtggagttcagggcccagccccaccctggtgtccttcagaagcaccaccacttgatctcaagactggagggcccgcgggctgctggtcctcacagccaggtgcatgtgccctctgtggacgcctccggaggggcctggtggggagggtggctgcagggaaccccagctgcctggcaccctcagctctgcgcagtcctctgtgctgtgcccctgggcttctgggtgtgggggtggcagggtgctctcagctctgcccatgtgacagtgtatttttcagggtgagtgttgggggggtccatggttgctgggatgtgtgaggagccggcctgtgcacccgcctgtgtggtgtggccgctggtcttgtcccacccacctgaccagccacctgcttgtcccaggcccctgctcatcgacatgaacaaggtgtaccggcagaccaacctggagaacctggaccaggccttctctgtggcggagcgggacctgggagtgacgcggctcctggaccctgagggtacgtctgcgtggccttcctccctgtcccttcccctgctgcctgccccagagccaccgctgagctgcccttccctgcagacgtggatgtccctcagcccgacgagaagtccatcatcacctacgtctcgtcgctgtatgac

SEQ ID NO: 16003 - DNA, 1254 bp, Artificial sequence
  DNA replication origin
gggtcccaggccagctctgggcagcacggtggacgggcagcttgacacccaaccacctacccgcccaagagccaggcaggggttggccgacgggccaccagcccccagaaagccgggctccacggtcttggggagctcccgtgccgctgcagccggcaggcacagccactcaccaggcgtgagctcctgcttacgtcccgctccctcggctgcccggccagagcagggcaaagggtaaagggcagaggtcaaggttcagagtccaagcagcagagaaaccaaagcaaagcggagcatgaggttactgtgtcccgacgcggagggcggcaaggcccagagcagccgaggtccgagggttgcggccactcccaggccaggccctcggctgtgatgcccagcagcctgggcgggaggtgctgccagggacgaggccagcctgcccccagggagaaggcaggaggggttgagctggattccaagtagagtgggcggccggagaggccccaaggagggaaggcaggcagaggtctccaggtggggcaggcggggcccggagggggcaggggcacacgtaccaggctgtcccccgagaggacctccagcagggagatgaggttgtggccatcgcggaggtcttcatacaggtcactgatgtgcctctgggcctgtggggacagcagcggctgaggtggccagtcccccagagccaccaataggccctgagtggctgatctacagagtgggtgctggtcccagagggaaggaggcgggggctgagtctcccgggagcccacggaacacaccctgccccacggaggcacctacctctgcccgccagtgctgcaaggagagaccaggaaagaccagaaggaagaggaggaagagagaggcaggagcaggcgtagggaagaaagaggacagaaaataacaggtttcagagatgaaaggtgagcacacaggcagcatggggacagccttgggcggcaggggccaccctccctcagcgcctcccacagcctcagcccctgtgacacgcaccagcatgcgccaccaaccttgatgaggtgcttgttgacccacttggtgaaggttttcttctgcacacgatcccgctcatctgggggagacaagaccagcttacctggggcctgggagaagccccgggggccctcaggtgaccaccgtgcagacacagcagcctggctggccaggtcctgcctggggagccccaaagcctccctcagatcacacact

SEQ ID NO: 16004 - DNA, 1205 bp, Artificial sequence
  DNA replication origin
agcaaagaggcacccagaggcaggaagtagggaaggggagcttgagccaggcttgggaggtggaggcccctgaccgagcccccagcccacctggtcccagccctgccccgccccagcccttctcctcacccggtcccagccttgcccgagtccgtgtctggagtccccaccgtgccccttcccttccctgagcccctgccccattcctgaccctggcccggcccagggcggcatctttggaggcctgttagtggcagggagaaggctggaacaggggcctggctggggtgggctccacgtgggtcctggaccttggccccggctcccagtttccagctgtcgtggactccctgtgcccacctccctggctgttccgggatctcacactgtgcctcagcagagtggcagccccgttcctgcaggcaggagccacctggtcacggccgggcccccagagcccatacccagcaggcgcggggcttggcctcagggtagctgctggcccagggcttctgaagaggcgacagtgtttccagaggctttggacccagggaggggcggcagaggtgtggggtccggggtgcccttgggcacaagactggaggtgctgaccagtgcggggtcagattttgatttgggggcttctggtgactcctgaggttctggaggctgctgggccggacaggcagagcaagagggtcaccctgaatctcatgccaggctcagagaccatgcatggagaccaaggggtgtcttcgttgggcggcgtgtacgatgtggcagagccctaggggctggctgtgccccttggcgtggagtgggggcttccccacctctgaggggtttgggcaccccccattgtgagggttctggtgccccctcacggcctcaggggcagtaggaatgaggtggggtgagctcttcccagaactgaggccgagtgcagctcccagctggaccgaatctgcctgatgtgcggctggaacattcttgtggttggggcagcgcattctttcctatggtggtcgggtgggctgggcaggcccagaagctggccagaggcagctccgccccggaccccagggagccggaggccccagccagcgcaggccctttgccctttgccctttacagcatgagactgcttcccttgagccccacccagctgcaaacagcaccccccacccctggggtcgcccaggtcc

SEQ ID NO: 16005 - DNA, 1642 bp, Artificial sequence
  DNA replication origin
gctcagctcctcggttctgcctccagcgttgtctgcccaccacctggccccatgccctgccttcctccctgggccctgcagtccccaccgcacatcctgctgggaggccccctcccatgccgcttcagtcccagggcagcctcccagcccggcccgtgggttggggcgcggcttcctggctgcgctgggcggggctgcgcgccaggggcaggttctttgggtctgggcctcgctcccgcagtgggcggattgtgggggggaggtggaagaggtggagagcgaagccggcagcctcgcagcgtgggctggaagcagaggcgccgccgcggtccagctccccgcactgtccgtgggccgaaccagggctccggccgtggccggcatgtcgggggcggggggcgcctttgcctcgccgagggaggtcttgctggagcggccgtgctggctggacgggggctgcgagccggcccgcaggggctacctctaccagcagctgtgctgcgtaggtgggtgcagtggcgtggccggtggcacagaaggggccaccatcgctctcacctagtggggctgggtctctgctgggaaccgccgcctgggctgggatgggggtggcgccttggcccggtgcagccttgcccccgagctccggaaacacctggggaggaaggcggggtgatgttcccctacccccatttgtttgtctctagagaaggggctggagggggcggggctggagggggcggggctggcccacccccggctgttccacgtcagcctgggctttggcctgggtttccaggacacgggggagggaggaggtgctgaaggcggggctccaggccttctgtggacttgctgcagtcctgggccagtgggattcccttcccagtcttggggtttccatcctaggaccgtctccactagctgcgggacctcagccatagggtccacacctgtaaaacgggggcgatactcctcagagggccacggcagtgcctgtcgtgagggaccctgggctggcggccgagggtcagcagccctggacagcacaggtgtcaggcaggtgtgcagaggcacctgagctgggggtgttctgggtgcgtcccaggtgggagagccagctgagctgcagctgtagagggtgggtgtagcctggctgggtggggcgggtgtgtctgttggttttagggtcagaataggattggatggggcggggcaggctgggctgggagggaggggaggtgatgaggagggaagagctcagagcaaagaggcacccagaggcaggaagtagggaaggggagcttgagccaggcttgggaggtggaggcccctgaccgagcccccagcccacctggtcccagccctgccccgccccagcccttctcctcacccggtcccagccttgcccgagtccgtgtctggagtccccaccgtgccccttcccttccctgagcccctgccccattcctgaccctggcccggcccagggcggcatctttggaggcctgttagtggcagggagaaggctggaacaggggcctggctggggtgggctccacgtgggtcctggaccttggccccggctcccagtttccagctgtcgtggactccctgtgcccacctccctggctgttccggg

SEQ ID NO: 16006 - DNA, 999 bp, Artificial sequence
  DNA replication origin
gctgcaccgggccaaggcgccacccccatcccagcccaggcggcggttcccagcagagacccagccccactaggtgagagcgatggtggccccttctgtgccaccggccacgccactgcacccacctacgcagcacagctgctggtagaggtagcccctgcgggccggctcgcagcccccgtccagccagcacggccgctccagcaagacctccctcggcgaggcaaaggcgccccccgcccccgacatgccggccacggccggagccctggttcggcccacggacagtgcggggagctggaccgcggcggcgcctctgcttccagcccacgctgcgaggctgccggcttcgctctccacctcttccacctcccccccacaatccgcccactgcgggagcgaggcccagacccaaagaacctgcccctggcgcgcagccccgcccagcgcagccaggaagccgcgccccaacccacgggccgggctgggaggctgccctgggactgaagcggcatgggagggggcctcccagcaggatgtgcggtggggactgcagggcccagggaggaaggcagggcatggggccaggtggtgggcagacaacgctggaggcagaaccgaggagctgagccgcgtctggcaccaccagggagtagaggcatcctgtgagccaggaccgtggccgaagggggcaattgtgggctgaggtggggaggcagggacagtgtctggtccccagccaaaaacatggatggggaagaagccctcagcccaagtcccatcctggcagctgagtccccggcagctccgggcgtccccagcgccacgcctagaagccccatcttgactcatctcaagtccggggatccagcagaggagctgagccaggcagcgccctcactgcaggagaggtctggccagccaggtccccgataggcagtccctctggccagaagcccataattgaggctgcccaatccccagggccccgccccatcc

SEQ ID NO: 16007 - DNA, 1144 bp, Artificial sequence
  DNA replication origin
gctgcattgggatctgatctgcataggatatgctgtgggcctgcctgtggcccggctctctgacccaggccttccacagagcagggcttcgggactcctgggtggagccaggccagtctcctgccgtggcccaggagaggcgtctccatcccagatccctgggaccccaggagaggctgtgctgtggggcaggcgcaggcctgagccctggtttcgggctgcctgggtctctggcctgcgcgtgactttggggtggctgtcccggccaccggtggggccaggtgctgtgttgagtgacctgcgcagggccctctgggagaatgggcggcctcttctcttggcccctgtggcctttccaagagcaccccctggcttggcagggcaggtgggtggggactgcaccgcctcctgcagggacgtgagcccgcacctcccgcgccctgctctattatattagaaccccctgtgggagctgggggaccgaggtgtcgggtggcaccgtccagccagacctgactgcagcggggcctgggtgccctggcgccgtgcgtcatgttccaagtctgggtggtgacggtccttgcgcgccctcctcggatatttatatcccctgggcccctgcccactgctcccctcccccacaagctgctgctgacagcagcacggccgtgccctcctcccacccgacgctgccgccagtggcttgtgcctcctccgaggggcctgtgacctcccacacccctggcccgctccgtctgccccgtgggctcctgccaccgtccccgatgaagatcgtgcccggtaggtgggcagcccttgaaagccttgtgaaatcctggccccttgctggggacaggggccagagggctggggctgaggctggaggccaggggcgctgtccctcgccctgcacacagcctgcctcatgtgccctcacccagaccccctcagccctggtctgcagtctcacttttggggtgttggggctggtgaggagggcgaagttgaaggagtgcagtgggttcagctgcaggcttgaggtgggggctctggcatccctccatgcctgccagctgtccccagagggcagccttggaggcagagtgggctgctcgggcccctcttctggtggggacagcagggg

SEQ ID NO: 16008 - DNA, 1168 bp, Artificial sequence
  DNA replication origin
tggctgccttgcccttcttcccagccacagggtgctctaggtggagggactatggcccggccagctttccacagggatcactggcttggccgagtcacccgtttgcgggatttctgtagatcgccggcaggcttctaaggggtagttacgatgggatttgatttgcacttcactggtcagcaagcacctgggtggagaggtatggagaggggaggcaggtgtcaccattgcccctggacagatgcctggggctgtgctggttggggaggactcaggtggaggaagagaccacctttggggctgaggaatgtgagtctcaaggagtggggtgtggtgggcagtttggggctctgctcccgcctggctcctgaaataccgctgggcacatggatgcctggaatgtgggtgggagggtgggagggcagggctgggctggtggggcctgcagcgggaaggggaggctacagggtggggtctgctgggcggggggtctgctgggcggggcaggaacagtagggaagacccgtgggctggggccggagggctctctgggattgcaggcaggccagtcccctgcacccccaggcaggtctgctgggctggtctgacccgtcagtcggctgggcttcatctctgcttactgactaaggggtggctgcgaggaggagccgctgctaccagggcatgagtgggccctccctctgcctcccaccccttccctccttcctgcctcgccttcctccctgccggctctcggagcagcctggcctgtgtggcagccatggacaggtacagcatggaggagctgattcagctgggccaaggtagggcaggcagagctgggggctgtgggaggcagaggagagggccggggccgcctctggcagacctgtctcttcccgttgtccaccgttctgtgccgtcagacctgggatgcagggataggcacagccccctctcggagctgccccaggggtgtgtgtgatgtgtgtcccggaagcacaggcctgtccggacctccgtggagtggtagaagaactgcccgctgccagcctggggcactcctcccgccaggagctggttctcacccaggccattgagtcaggctcctctgaggcttccccagcacgtggcagggagtgggctgaaacgtccggcctgtcggccc

SEQ ID NO: 16009 - DNA, 1974 bp, Artificial sequence
  DNA replication origin
cggtgtgaccggtaactgagtgcttggccagcttggacttggtggtggctggggacggccctgggcgggatggggagaagcgcagggtccaggcaggaggctcctccggcagggcagaggccaggctgtggtgtggtgtctgctggcccagcctggggcctagataggcctttcccggtacgaaccaggtcgcacaggacaggacgggtcctgtcatcccagaggcttccagagaccctttgctctgccccttctctgtggcctccctctgtccacaagcacctgtaccagcaggacccaggtgggcagatgtgtcccctgcagcccgaggctcacacacacactgtggagcactctgccctccgtgctggctccggatggcccggtcccccagcacctggccccacctccctctttggggctggcacctgggagcagcttgctctctcaggctgaagaagggggcctggggtggggctctcagggtgggcaggatttgccagggtgtgggggagggggcccaggggaggcccaagtttagggcgcagctgcccgtgtgggatgctgggcggagccctggtgctggctggcctggggtgagttggacttgttaggggcttgccttgggcccatctgggaggatcagtgaggctgtggggtggaggctggcctcccctcctggctctctctgcggctttggacaggtttagtggcctctccagctcctctctaaatggacgacatgtctcccgacaggaggcatgagacaaagactgcttggccaggcatgtagtccaggccccggcccatgtggccttcctgctgtcctctcccacccggcacccctgcccacccactccccggtcatttggcagcccagcttccccatgctcaactcctagctgtggtgactgggagtccctcccctcctttttctccttccttgtccgtggctgggctgggcctgcagggcgggcagctggcggcagggccaagagtggggtgtgctgggtgtggctgcagcaggcagagcggagggcacccctccccgatggaggtgactcagtccccccaaagccacagccgccagcagcagctcagagtttccaacaggaagcgagccacagctccgggatgagtcagggccagcaggctcaaacccctctctgccctggacctcacgggctgagcttgggatgggaagctaggggaaggaggcggctcggatgtggggtgtggcagagggccagggctgggcctcaggcagtgacaggggtccggatggccctgcatacagcccggggcagttctgatgatacctgagaccaggcacttcttggagtttttaagtgaccaagcagtgagctgccctgcccttccccactgcacagccgctccgtgggttggcagaagggcaaggtcagagctcgtgggccaactgtgctggtccaggatggccctgttggatgggctgcccctctccacccagccctggctagggagcaccagctgtacccctgcagtgaggcccctgccctccctgtgccctggtggtctgcttgtccctgggtggggcccatgggggcctgccagcaacacatctgtgtgggaagccatccgtccacctgcttgtttagccatgcacaggccagggccagacccagatggagcccctgccccagggggctccagatatgtggggtgaactgggtgaggagagcgtgatgggaaggtggcttcagaagcaatcagggagggctctgaggaggtgcctaccctgccaggagcagcccagagagagggacagagggaggccggaaggccagagggagaggacccatgggaaggccctgggcctgtggcagagtttcagttgcttggtgtggtgggaagctgtaggaatgtgtttttatatgtgagtttcatttacgtttcatttttattttacttattgttttgagatggagtcccgct

SEQ ID NO: 16010 - DNA, 1435 bp, Artificial sequence
  DNA replication origin
ttctcgcagcgccccgggccttctcgtggtaccctgcctgctgcctttgcccccgcactgactgcccggctccagcagccatggtggccggcatgctcatgccacgggaccagctgcgggccatctatgaggtgctcttccgcgagggcgtgatggtggccaagaaggaccggcggccccgcagcttgcacccccatgtgcccggcgtcaccaacctgcaggtcatgcgtgccatggcgtccctgcgggcacggggcctggtccgcgagacctttgcctggtgccacttttactggtacctcaccaatgaaggcatcgcccacctccgccagtacctgcacctgccgccagagatcgtgcccgcctctctgcagcgcgtgcgccgccccgtcgccatggtgatgcccgcacgccgcaccccccacgtgcaggctgtgcagggtcccctgggctccccacccaagcgggggccgctgccgacggaggagcagcgggtctaccgtcggaaggagcttgaggaggtgtcacctgagacccctgtggtgcctgctaccacccagcggaccctggccaggccaggcccggagcctgccccagccacaggtcagctgcaccctgaccccaagtcatgatgggtggcaagtaggggtctggttgtcgggtcttgggcctgggcctgggctggagtggttggagtggtcagccggcttgcggagcgtcgctcacaccagcaggtggccccccctagccgagggtcagggggtgcgcttgctgatgggcccatgtggcccctcctcctcggctggggaccttcgggtgtgtaggccaaggaggagcctgtggcccaggcacaccccggggcgccccctcccctctctccaacactgcccttgccttcgccccctccgcctcctctcctgtcccagtgacctgtcttccccgaggctcctcggcactgaggtgggggtgtgcgaggaggtgctggcgccggttgggtgtggccctcctccagcacatggcctggccgcctcccttgccgcgggggttgatgggtgaggcttggtgccgcacagagtgcccggtgtgaccggtaactgagtgcttggccagcttggacttggtggtggctggggacggccctgggcgggatggggagaagcgcagggtccaggcaggaggctcctccggcagggcagaggccaggctgtggtgtggtgtctgctggcccagcctggggcctagataggcctttcccggtacgaaccaggtcgcacaggacaggacgggtcctgtcatcccagaggcttccagagaccctttgctctgccccttctctgtggcctccctctgtccacaagcacctgtaccagcaggacccaggtgggcagatgtgtcccctgcagcccgaggctcacacacacactgtggagcactc

SEQ ID NO: 16011 - DNA, 949 bp, Artificial sequence
  DNA replication origin
ggcaagggcagtgttggagagaggggagggggcgccccggggtgtgcctgggccacaggctcctccttggcctacacacccgaaggtccccagccgaggaggaggggccacatgggcccatcagcaagcgcaccccctgaccctcggctagggggggccacctgctggtgtgagcgacgctccgcaagccggctgaccactccaaccactccagcccaggcccaggcccaagacccgacaaccagacccctacttgccacccatcatgacttggggtcagggtgcagctgacctgtggctggggcaggctccgggcctggcctggccagggtccgctgggtggtagcaggcaccacaggggtctcaggtgacacctcctcaagctccttccgacggtagacccgctgctcctccgtcggcagcggcccccgcttgggtggggagcccaggggaccctgcacagcctgcacgtggggggtgcggcgtgcgggcatcaccatggcgacggggcggcgcacgcgctgcagagaggcgggcacgatctctggcggcaggtgcaggtactggcggaggtgggcgatgccttcattggtgaggtaccagtaaaagtggcaccaggcaaaggtctcgcggaccaggccccgtgcccgcagggacgccatggcacgcatgacctgcaggttggtgacgccgggcacatgggggtgcaagctgcggggccgccggtccttcttggccaccatcacgccctcgcggaagagcacctcatagatggcccgcagctggtcccgtggcatgagcatgccggccaccatggctgctggagccgggcagtcagtgcgggggcaaaggcagcaggcagggtaccacgagaaggcccggggcgctgcgagaagctcccgcgctacagggtgtgacagcgggcagcggcagggcaggcgggcgggca

SEQ ID NO: 16012 - DNA, 1518 bp, Artificial sequence
  DNA replication origin
gacgccatggcacgcatgacctgcaggttggtgacgccgggcacatgggggtgcaagctgcggggccgccggtccttcttggccaccatcacgccctcgcggaagagcacctcatagatggcccgcagctggtcccgtggcatgagcatgccggccaccatggctgctggagccgggcagtcagtgcgggggcaaaggcagcaggcagggtaccacgagaaggcccggggcgctgcgagaagctcccgcgctacagggtgtgacagcgggcagcggcagggcaggcgggcgggcaggcaggctggggtgctgagcgtgagggcgcgggctcccggctgtgtggctcgtggcgcctggctccgtgcaatccctgccggcactgccggctgcccgccttcctccaggacgccgggccggccccctctgactcagcagcatgggcggcccctcccacccacagccgacggggcccttgtagagtggggggcacctcaagaggcagcggccacccccacagctgcccctttccccccaccaggccccacggctccaacgtcagaaatgacatcagtttctaaacacatccttcaaggtccctaagactgtgctggggcaagtgggggcggatatagaccaagagtctaaagaagagggtggcagggcaggcaggggggctgagggcaggaggggtactcggcagggatgtgggctctggtgtcccggcttcacaaggatctgaaggggggtgctgggctgccaggcctggagggatgagggatgcgaggcttgagcggagaggactagggcctggggaagaagctggggtcttgcgggaggaagtccgaggggagcggctgggggcagctgccacagcacatgaggagggctgcaggcaccgctgctgctgtccatcaggcgggcaaacggacagagcccccacctccacacaccaggcttagaggcagtggccactcaagttaacacttcccattccaggccagattaggagtggcctctccaagcccacagccctctgagcagagcaccggctagggggctcagaggggcctcaattcacccccacctccaacccagctgttggaggccagagattcccagccgctgccacagagaaagtcaccgagtccctaccgcccacagatgcccaccctgggcagcccaagtgcccgtctgcaggccagatggatggctgcagggtggaagaatgccaggccagaagacggccagggcccaagggaagggaagaggaaactgccctgtgaggccctgcaggcctggcccagccacacccatcatccacccccccctccccgccccgctgctgccgcccccactgagggtccaggcatgagaaccgcacccaacactcccactgtcccacgctgtgctccatggacccccacccgtatcgctgctcgccccaagccgacacaccccttcccaccaagcccggcaaacccgggaactgattataaatagggcggtgggggggagtgg

SEQ ID NO: 16013 - DNA, 991 bp, Artificial sequence
  DNA replication origin
gcaagtccacactgcggctctttgtcttggggtggggtgggggggctgggggctgcccaggagccctgactggttgctctggaaacccaaaggggtctggagtggggggagaaggggccgcccagtcgcacaccctggccctcccagtgctgaatcagctcccgcttcggttcccacagggtgggggcagggggcggtagcttccgcccgggggtcttgggggacgcctggaccctggcgcaggggtgtgtgtgcttcggggggggtgtgtgctgcaggaggtgtgtgctgcgaggcgggggggggtggcgcatgccgcaggggggcgtgtgcggagctggcagggtgggccaggaacattctgctccgggctcctccctgcggcttcccttcccgcctgcaggcccctggctggtgggagggaggggactcccgccgagccccgccccatctctgctggaggaagctaccgccctttcctgcccggagccggcttgggggaggcggggctggttgggtggcggcccagcgggggtcagtcctggcacccctgcaggcctgtgtaggagagaacctaggtccacgtgcttttaagaggccttgggatcattttgggacagtgtgggtatcgtgggttagtttggtggggcccttggagatctgggggggattaggttagggaatcaggccaggaagatgcggtcggcctgccgggagtgcaggaggtcagtgtgggggggtgcgctgagggactggccaagagggtagggccttctttgggcacagggctgggcaggcttggacccagctggtgttgttcccaaagccacaaccctggtgggtggagggtccgcaggtgctggtggtccgaggggcgtggccactgtggtccctacatcttcctggagcctcacctcctgaggctggccttttcctgcctggggctggcttcagagggagggagagccatgccgcagcgagctggccctgc

SEQ ID NO: 16014 - DNA, 1928 bp, Artificial sequence
  DNA replication origin
gtggctcacacttgtaattccagcactgggaggtgggaggattgcttgagcccaggagtttgagaccagcctgggcaacacagagacagactgtctgtataaaaaattaaaagatgaactgggagtggtggtgcacgcctgtagtcccaactactcagaaagctgaggtgggggcatcgcttgagcccaggaggtcgaggctgctgtgagccgtgattgagccactgcactctagcctgggtgacagagtgagaccttgtctcaaaaaaacaaaacaaaaaaaaaacagcattttttaaaaatgtatgaactttttagatctctttataaatatctgtcactttcacttgaggtttactaaggaagtatgattcacttgcaggccaaatttaggtttatccagatacagctcagtaaaacctagctgggaattcagcagtggcgcgatctcggctcactgcaacctcagcctcctggattccagtgattctcgtgcctcagcctcctgagtagctggggctacaggcgtgtgacaccatgcctggctgatttttttgtgtatttttagtggagatggggttttgccatgttggccaggctggtctcaaactcctgacctcaagtggtccacctgcctcggcctcccaaagtgctgggattccaggtatgagtccccgtgcccggcctgaaattctgttttaattcctcacttcaccattttccttaagtttggcaactggtgtttcttgagactccccacaccccaactggctgagtcccagggagggcagggacgggcagggggacgagagactccagaactgctgggtctacggtggaggtggggctggcttctggccctttgcctgttagctcgtacccgtgggagctgccggcctcgctcctggatcatggtcacgtcctccatgccagccccagcctggcgcacagtgggtctgtttacaggaggggaaggacttgcgggtgaaggcagaggaaaggccttgctggagactgaggcaggctagtcacttctatcttgtggaggctgtcctgccccacactaccagcacggactggggtggagcacagtcccggggccagtgttgaaggggtgccctggtgtgggcagggcccagcattcctccgtgccccctgcagcgcagtgagtgaggcagagctgacctcaccctgccagtgctacctgctcccccaggcgtgcgcagtgacacacagctactcctgcgggctgaggaggctgaccccattagccataggggtggttggatcagagcagctgcgaagggtccctggtggtcgtggggggtgggtgagggatggagctgcagtgtcatctggcggcagtggagatgctggcgagtgggcagactggggggcgcagccaggaggacctgtggggctgcctgtggggcatcctgaggctgggtgggagaggcagagaccagggtgcaggtcggacctgtcatctttggagccagtgtacaaggtgcctgacccagggctgcgcagaggcgagacgcccggggaaggggcacactgctggggccggggaggtgggaggtggccgaccagggtctgggggcttgatctcagcagcctgccagcccaggccctggagttgggccggctgaggaagttactgggagatctggatgggtgggtatctcctgcagggcgcgggtaacggcttcaaggccctcgcacgtgtgtcccacaggctgttctaagcatggctcgttgcagtggactcggggggctgtggggtgggccgggggctgcggagctggggagtgggccgtccgagcgctcctggatccggcctggtgacctggcagtctggctggggttagcggggtcgcgtgccccagaaccacaggctgggggggaggggtgcgcggtgcggccgg

SEQ ID NO: 16015 - DNA, 1132 bp, Artificial sequence
  DNA replication origin
aggctggctggcccgactgagctcgcactgagccccaccctgcgcaggggtggcctccagagcatggaaggctctcctcccacctgtcccgcagcatccgcagaggccgggctgttgttgggccaaggctgcgaggcagaagcctggggcaggtgaggtggctcctgtggacctgccgcaggctcaggcggggagcagagcaggggtctgtgcctccggagggctgagtgtgtgctggatgtatctggcaggatttcactgggcctggtctccctggggctattgtcgggggccccaggtggaggtatctgccagcagggtgtctgcctgtcgcaggtcgcctctgcatggggtcactgggtcacagcccactggcctgctccaccaccaccagagagccccagcagggcaggctgccagggggttaggggctgggtgggtgggtgggcgtgaagatggggcagggagcaaagctgagggcaggcagggtggtggtgggcagggcctcaggggagggcccatcccattcgcaggtgtggtgtgggggacagggttggagccccttctttggcctgggcctgtggccagggcagccagggcctggggactggtgaagaggaggttgctctgtgcccagacagaggggttgggaaggagggagggcttatctgtggtgcctgggctcaaccttggttctggggtccccagtggtgtggggaatttgcagagagcttcatgaggatttggctttgcccagggtgtgagacctggccaggagacctgatggcaccccagctgggcatgggggccatgctgggttcgaccagcaaagcagaagctagaggtaggggttttccggaggcactggtgctggtgagcccgactgcagcctgggggtccctgcagttcactggcctggacacacagacccgcgtgcttcttcggcaagactcctttgtgatccatgaattggggccagagcgatgagatctcctgggcagtggccggggctttgcttcccacgctccagagctgcgtcaccagggcgcccagcttcctctaccccagctccctttcctccccgctgcctaaatctcttgctcgtgggcccttcgctgccagcctgggacct

SEQ ID NO: 16016 - DNA, 874 bp, Artificial sequence
  DNA replication origin
gggacccaaaatggggcatgggccgggtcatctgtaggcccagtggaaggggagttgggaacacgcgttcagacggtggaaggagggtgccagctgggaagacaggatcctgtaggacttgggacatcagcctgtggggcctgctctccaggatttgggtcctggttagctgcagaagagtcctcccagctggtggtcagctcttggcaggactgttgctgcttcttcctggaggcagaggagacccaggaccaggaatgggatggggatcactttgtgtccctgtgtggctccaggagtagcggcagacccagggccagtgctgcaggaaaggaaggccccaggacggcatcagggtggctggtgtgagtctgggtgctcttgggcaggctggtgtgtcaggtgggctggggccaagtgggacggtgagggtggggaaggccatccacaggggcacaccagggtgggcgggggggtgggggttggttgggggagtggggctggtcagggctggaagtgtgggtctgcaggagcagaaggaggtagctgcagtaaaggtctctggttgtggcttttatgatttttattctgctctgtttttcaaatgaatgtgtcttttgaccttttgaaagtgcatctctttctcttctttcttgctaaacgagtggctacctgggaagctaacagagcaggcacaggataggcctaagagacacagctggacgccactgtcatgactgccacaagaatgcatggttgtttacagaatacagatacccccagagaatgtgccctgttttaggttcctgtggctgctgtcacacgtacccacaaactgggtggccttaaacaacagaaatgtattctcttacgg

SEQ ID NO: 16017 - DNA, 1014 bp, Artificial sequence
  DNA replication origin
tgccagggggcatgtgggaagtgctcaggaggccctgctggtgccaggctatggtgggtccagcagggtggcagggagggagaaccctctccaggacagagcggtgacatggaggctaggccgcagcaggtcacagcctcagctggatgctggcccgagttccctggggaaggagttccctgggccttggcctgagggacctgcatggtcacagggggcatgggcatcacctggcccagggtgagtactgagtggtcgctcacatttacccagccacacatcatcagtggccagtccagactgctgctcaccactgagggccctggagattttcccagggttgggctgttgggagggtgtgggcagtggtgccctgtggcctcagtttccccagtgaggcccaagaggagctggcagcagaggggccaggggccaggtacctcaagaagggactggaggaggctgggaagggcgatgctagtgggaccaggtgcccagatctcccaccgctggggtcatgggtgatgcccacagacccacagtgggtagggagatgcggggctgggagagcaggggccgtgggtcatgaggtcagggacccaaaatggggcatgggccgggtcatctgtaggcccagtggaaggggagttgggaacacgcgttcagacggtggaaggagggtgccagctgggaagacaggatcctgtaggacttgggacatcagcctgtggggcctgctctccaggatttgggtcctggttagctgcagaagagtcctcccagctggtggtcagctcttggcaggactgttgctgcttcttcctggaggcagaggagacccaggaccaggaatgggatggggatcactttgtgtccctgtgtggctccaggagtagcggcagacccagggccagtgctgcaggaaaggaaggccccaggacggcatcagggtggctggtgtgagtctgggtgctcttgggcaggctggtgtgtcaggtgggctggggccaagtg

SEQ ID NO: 16018 - DNA, 822 bp, Artificial sequence
  DNA replication origin
aagaggccagacccagggccagtacaggccaatccataaccattcctgtctgcctgagcccctcagcccccccattctccctgtcccccatccagggcagattcctctggggctgaggctactgcagcctgtggcaggagagctctgggcaccctatgggagaggcctccgtgctgagggctgtgggctggtgacttagacagtcggcccagctgccaagaggtgtccagtcgcccagccccccaagcctggcctgtgacagctcatagaggctgggccgtcctgccacaccatgggagcctggagagagacctggggtgggtgtggcagggcggggacagttctaggagagagttgtggcaatgcaggtgagtggaggtgaggcggtcagtgaagaaagaaagagcggcccagcagcagtccagcgttgtgggcaggggcctgtcctgggggtcagggcatgagtgcaggccggggagtggggagtggggccagccgggggcctgggcagctggggatagagactttaggttgtcatgttagggatgggagtggggcttaggggtgctgtgaggtggtcctggagagggcagcaggggtgagaatgaggccggggtgagtaccgttggtgagtgggtggcgttggtgtggggcaggggccaggggtgggaggcctgcattggtctgggggaaaagcgggcctggagaggggctgggtgtgttgggtctccacagggcgtgtgcccagcctgtggcctgcactctcttcaggaccccttgccagccctgggcctgcccagtgccactgtgcctggccccctc

SEQ ID NO: 16019 - DNA, 744 bp, Artificial sequence
  DNA replication origin
tcccctctgtggcattgcctcggttccacctcactgtgccctctcacagacaactccctgtctgaccctcactccggtgaccttcaccccccaccccacaacgtctcagaccctcccctggacacgtcattccctggctctcccctggaaatccccggtcttccctgtacagtcaggcggccactgctccgcttggaacatcgccaacttcctgtctgcctgagcccctcagcccccccattctccctgtcccccatccagggcagattcctctggggctgaggctactgcagcctgtggcgggagagctctgggcaccctgtgggagaggcctccgtgctgagggctgtgggctggtgacttagacagtcggcccagctgccaagaggtgtccagtcgcccagcgccccaagcctggcctgtgacagctcatagaggctgggccgttctgccgcaccatgggagcctggagagagacctggggtgggtgtggcagggcggggacagttctaggagagagttgtggcaatgcaggtgagtggaggtgaggcggccagtccataactgaaaagagagcggtgttgccaggggctgggtgagaaaatatcctggaattgacagctacacaactccgaatctactgaaaccactgaattggacgctttgaatgggtgaatggtgtggcatgtgaattacctctcaataaagctattaaaaaatactaataatcagcatgaggtcaac

SEQ ID NO: 16020 - DNA, 1052 bp, Artificial sequence
  DNA replication origin
tgcccccaagggcagctcagggagagaggtcctgctggggccccgtggtgccgctctccaccacaaccttgcccagctgggtaggtttcatggtgccccgaactcatctccttcaggcgtcctccagcgacggctctggggcagggtggatgtactgctgtggctctctttgacagtgctgtgcccagccgctttgcctgtgtgactagttcattcgggccaggggagacactcctgcacccttggggaggcctggagcgggcagcctgttgctcatgctctacatggccggccctgccttagagggagcacccggaggggtgctggggtatagggcagggaagcagccgcccacctgggctccagccctcctggcaagccccaggacagagctgtttctgagctgaccactctgttcaaagtgcgggaactgtgcaggatcgtttcctcctggagttcttcatctggtcaggttgctgggctgcctggggtgccccagcctgttctgggcattgtgctgaggctttcctggccccagggctgtctttcctctacctcctggggtgggaactacttctgattcatccaggggtgagccagacagatccctggaggttgctgggaccctctgtcagggtcctccctcccaagcgcagctcctctggaggccaggattggtgttgggcacactcgcagtcttggcccattgtctgccttctgggcttggtggtggaggctggtgagggggcaggggggccggggggcttgcctgaagtggagttgtcacgtgatggtgcagctgcccgcatgtgtgtggcactggcctgagagtggctaaacagcaaggcaggtgctgaggctccgtgagcacaccaggtaccccaagtctccttagctcctggcttgagacaaggggacgggaggggctgggctggtacctgtgtctgggagccacggaccaaggctgaggagggcctgcaggaggtcagaggtggcccctgtgccctacacctttccaggcctgacctctgtgagccccttggacctgctag

SEQ ID NO: 16021 - DNA, 1624 bp, Artificial sequence
  DNA replication origin
agttcagtgtctaggttaagaaggtggtgggtgggtcggcgtgcagagtccactcctgaacaggcagagatgtgacccctcctgctccccttccaggaggccatgtcgggtgaggacgctgaggtccgggcagtctctgaagatgtctccaatggaagcagtggctcgcccagccctggggacacactgccctggaaccttgggaaaacgcagcggagccggcgcagcgggggtggcgctgggagcaacgggagtgtcctggacccagctgagcgggcggtcattcgcatcgcaggtaactgcgcagggccttgcctgtgcacctccttggcacgcgaggttgactgagttcccgctgcgtgctaggcgctggagcggggactgggtgggggaggcctagggggatctgcgggtcacggagggcctcgcgcgtcccaggtgagtgcaggcggcacagcgccacctgccggccgcgcccaggcggttcatgaggcctggggttgggcttcttgccgcggcgtccatccttgattttaacacggtccagtgcccagatgcaacaaggataattttttgggttccccaccaggccctcggtcttggctgccacaatggcggccaggtgggaatgtacaggagcagtgtatagggagggggtacctggttgtctggagccccagcctcttcctgagccaggatctggccttgctttccagtagctccccatccagggagaacgatgggaagcatccagcgagatgcttggggaagggggagggcaggagggaagtgggtgacctagagctgtgctaggagagggaggagcagtagctctctaggctttggcttgagagtcctgacctgttccagccggagggcagggaggcccctgcgggaggccaggagagggctgcaaggccaggtgctgagccctggggggatgttgcagacgacgggaagcggggctggtaggagcaggaaagagggaaggagagggtcactgctgtgcacccagctccagccccagggtctggttccatctgcatgaccttcagggcttttcacagcacacacggactttaaagaaagaagtcactttcttcccacttgaaagggaatcacttgtgtcgttcccacgcctgggctttcttcagcatcacctttacagttgtggaggagtgtggggggtcccgaggccccggctgaccgtggttgccttcggtactcactgcaaaggctttgcccccagccagcaccttccgcgccggggctctgcgtcctctgacggtttccttaggaccgattcctggaagcgggacttgcagttacaggacatatggcattaagcttggagaaaacacggccaggggcatcccagacagggtggccgacattggtgaaggcggggagagcgggggctttgccaatctgatgggtggaaagagttgttttaattatcaccaagcattttttccttctgtgaatgggctattccagtcctcgtatgtgtacttaatttttcttgtgtgtagtgttttaagggttctttataccgactcagtcgtctccaatgttgcaatgggaaagttctcagctgcacgcaggaagcaaggtggggggcggg

SEQ ID NO: 16022 - DNA, 1275 bp, Artificial sequence
  DNA replication origin
cgagaggacagcacctccctgcacgcccgagactgcggaactggacgggcggtgcccggggtgtgggcaggaaaggccgctggggaggcgcggctgaccgcagggctccgggcggggggctgcaaccggggcggcccgtggagaagccagtgggggcggggcgcggcggccccctcctcggtgtccgctgcctcctccttagcccttggcctgagggcggaggcacagagcccacattgtgcccccgcgccagcccaccccctccgagacagagccccattcacctcccgcacgccagtgctcttggggacgggggctggggagtgtgcgcgcgtgggtatgcgtgcgtcctggttgcgtccgcggtgccggtgtacgcgcccccactgtgggccgctggagctgcggcccgggctccctcccggcctcgctgcagcagagctcccgcggcccacgccgctgcggctgcagctatttataggccttcgctgcggagatcgaggtgggactgcgggctgaggtggggtggcgtgatggggagtcctagaggtcgagagagcttggaggtggactgccggtgtccaggggaagggcttgggtgtccttccctgatgacccggtgagtggagggggcggtggtcagctttccttgatggcctcgcctgcctgcgattagagggttagaggcgggtccagtttgggatggaggcagtggaggccggcatctgagtgaaggtagtcaccccttccccttccatttgacagagtggaaggtggtctgtcgtgtgccggttgagcccctgggtgacagagtaggtgggtggggtgtgggtgactaagagaggagagtggcagtcagtgtgtgggagtgggggtggccagggtggtcagtgtcctggtgatggactggagggtaaggccagtggctggggggtcactgtgtaggtatctgaggagtgcgcgggagggggcaaggcagtcatggatggagagagggtaagtcagtgcctggggccagagcatgggggtcaatatgtgggtacagcagagtgcaggaggggtgtgggtgccagtgtccaggcgagaggctgggtggggagagttcagtgtctaggttaagaaggtggtgggtgggtcggcgtgcagagtccactcctgaacaggcagagatgtgacccctcctgctccccttccaggaggccatgtcgggtgaggacgctgaggtccgggcagtctctgaagatgtctccaatggaagcagtggctcgcccagcc

SEQ ID NO: 16023 - DNA, 1021 bp, Artificial sequence
  DNA replication origin
ggcgggcgattcggccagggcagcggcgcacacctgagcccccggcgcacggggcgggccggtagtcaaggagacgctgtctgcgccggcgtgcgcgacacgggaacgtcgtgcgctcgccccggtgagctccgggccccgccccgcaccccgacgcctcctcggaagcagcagatcccgcccctgggccgcggagatccccactccccaaacagaggtcgcagtcagagttcccgggtcccttccgcctgggttcacgttcacgtttattcaaacaacagagccgactcgggcgaggtctgggagcggcgggcgggcggtgtcgcctcctgggctctgctgacccctggtggtggggtcggcccaggctgggacctagcccggcccccctcggccgctgctgaccgccatcccccacaccgccttctggagcccgcagagggaggcaggggcgtccccggggacagctcaggcggccacagttgggggcggggagcatcagcctgtgcggagctgggagcctgggaagcaggaggccagagggtggccccttcggttaagtgtctggggagcggcccgggagcccagaggggtcgtcgggggaagcgcggggcacgtgctcgcaggtgatgaggtgggtgggcagcgcctgggtgtcgtggaagatgacgaagatgctgggctggcagatgcagtccacggcgctgtcgtagcgcaggagcacgtggccaggaccccgcagagggggcgcccgcagaccgcggcggccctgcccgtagtcgccagtcagcacccgtgccacgaacaccgccttatggccatcggcgttggggggcgagtagcggtcctgcaccgacagggaggcgcgcctggcgaaatacacgcccttcccgtagaccgtggctgcagggcgagacggggcaaggtcagggtggtcggggtgcgcagagcccccgcccctgcccggctcaggcctcaccgttgcggccgcagaagctgcggttgaagccgtgggcgcaga

SEQ ID NO: 16024 - DNA, 1557 bp, Artificial sequence
  DNA replication origin
aagtcaaatatgtttagcacccactcaaggagatactcccactaaacaaaagagtctgtgccaaaaggtgacaagcggggtactgagtaacccggtggtcaagaatggcctggaaaaaatgaagaaagtcaaaaaaagaaaagccattagccttgaatcctagaacatcttttttacagaacagaattttaataactaggatttcacttctctttctatggctcagtggtaaatgttttttcattattatagtatgtctaccaacctatggcccacgcatggaggctttgtgatagttacagaaacctttacgacataataaaaataatgtaactgaccaaattgagatggaagatgagggaggaggcaaaagagagagaagcgaggcccattctcctcatcttccatgcgggaaggcaagaaacaatctctaaagctgtcaagtgaaaaaaaaaaattcaagcataccatttaaagtcatcaaggtgctcactaaattcaagcataccatttaaagtcatcaaggtgctcaccggaagaaccaagtacgtataattaacaaaaccaccaggatatgaggtcagtgcgtctgggtggtggtgatcctggtggcggtgagcggtgacggtgtgttggtgaagctgacggtgacagtggtgatgctaatggtggtgatgatggtggccacggtggtggtggtagtggtggtggtgatggtggtgacgacagtgagtggtgaaggtgatggtgatgatggtggtgacgacagtgagtggtgaaggtgatggtgatgatggtggtgacgacagtgagtggtgaaggtggtggtgatgatggtggtgacgacagtgagtggtgaaggtggtggtgatgatggtggtgacgacagtgagtggtgaaggtggtggtgatggtggtgacgacagtgagtggtgaaggtgatggtgatgatggtggtgacgacagtgagtggtgaaggtggtggtgatgatggtggtgacgacagtgagtggtgaaggtgatggtgatgatggtggtgacgacagtgagtggtgaaggtggtggtgatgatggtggtgacgacagtgagtggtgaaggtggtggtgatgatggtggtgacgacagtgagtggtgaaggtgatggtgatgatggtggtgacgacagtgagtggtgaaggtggtggtgatgatggtggtgacgacagtgagtggtgaaggtggtggtgatgatggtggtgacgacagtgagtggtgaaggtggtggtgatgatggtggtgacgacagtgagtggtgaaggtggtggtgatgatggtgatggtgatggtggtggtgatgacagtgagtggtgagggtcatggtgatggtgtgatggtggtggtgatggtgatggggtgatggtgatgatggtggtgatgatggtggtgagggtcatggtgatggtgtgatggtggtgatgatggtggtgaggtctggggacagccagaggttctttttgcatttctgaccagctcctggtggagggtgatgctgctggccccacgcacaactttgggca

SEQ ID NO: 16025 - DNA, 1124 bp, Artificial sequence
  DNA replication origin
tggagccctctgagcatcagggtgtgcagggggcatggggccagagaagggactgaggtctggtcaggtgcagctgggcagggggcaggtcctcaaaaggactttgggtttttgttttttttttagacagagtctcactctatcaccttggttggagtgcagtggcacgatctcagctcactgcaacctccacctcccaggttcaagctattctcctgactcagcctcctgagtagctgagattataggcacctgccaccatgcccggctaatttttatatttttagtagagacagggttttaccatgttggccaggctgatctcaaactcctgacctcgtgatccacctgcctcagtctcccaaagtgctgggattacaggcatgagccactgcgcccggcccccaggactttggtttctactgttgctgatgctgggagctgtagcagctgctggtgtcattttacaaggctcaccctgacacctctgttgaggacccaccatgggagtggcagacagagactagttaagaggttagcctagctacctagcgagagatgctggaggctgggaccagggtcggggcagcagaggtgtggcatgtgcagggctaggagtgcaggctggccagggtcctcagctccctggagggaggaacagcaggggtggggctgggttttggtgggctgaggggtgagtgggaagtaggagatggagagtggtagtggccacagctctttgaaaggctggaagcaaacggagcttgggtgatgtgggagatctgtggcgagtgggagtgtggactctgaaggcaccgcccaggtttgaggcctggtgctgctatgggcctgtctgcacctccgtttccctttctgtggtgaggattagcggcagcaaggaatgcagtggagccattaccttgtcaccttctgaggttacttgtgacgatgccaatgatggtgtgagatggggaggtgcaggcaggacagaaagctgcaggaatgggcaggcaagacctgaggcgggaggaaggctgtgctgcaatgcacattcttggagaccaagggtggggaaccgcccatgctcagcacctggcaggtgtgagggaccaggagcagggttg

SEQ ID NO: 16026 - DNA, 1062 bp, Artificial sequence
  DNA replication origin
gtcgccgcagcgcgccgccccctccctccggctccaggccgccgcggctccccgcccccaccaccgccgccacctctggccgcgagctgccgcgcgccccggccggaccaacttactgacccgaggcggccacgctcggatgcgcaagatccgcgtgggggcgggggcgggggcggcaggccgcgcggcgcagcgggtcagaggcgctcctgggctcgggccggggactcaccggtggccgggcgccgcaggccggtacgcacggtgtccgctgcgcggccgcgcggtgatggccgatgcgcccgcacccgcacccgctcggcggccgctcagctgggcctgcgcctgcggctcggaagacgcagcggggccttgtgacggggcggggcagggggcggggccgggcgagcttcggggtgggaggggcaggtgggcggggcttccgcggacccctcccgctgcgccgccttgcgtgttcctcttcgctccggccagaggcccgcctctcactgtctgccgaggggtggggtcgggcggtgggcgctgaagacccctggaggcagaagtctggtctggccaatttgactggccgttcggtagttaagaaatttattcctaaatgcgggatttgctgaagctgcccgggactgaccgtccgttctcggccttaaaacccgacgttcacttcttttcatccagatctctcccaaatcaagaagcctaatcctttagttcccaaatcgaggcctcgtggtttaattgccccatttgctctgtcagcccaaactctgccaggcctgctactagagacccttttttatttttttaattcttgtggatacatagtaggtgtatatttacgggctacatgggatgttttgatacaggcatgccatggataataatcacatcaaggtaaatggggtatccatcagctcaggcattttgtccttcgtgttacaaacaatccagttatactcttggagttgttttaaaatgtacaattattcttgaccacagtcaccctttgtactaacaaatacgatgtcttgttttcacact

SEQ ID NO: 16027 - DNA, 780 bp, Artificial sequence
  DNA replication origin
aggaacacctggggaaggagccgctcagagtcatccgctgggagccacagcccccaccgccttggagatgcccctacccaccttgcggatgaaggcctgtcggatgctcttgtcatcccagttggtggcagggaagtcctggttgtcatagtaggatgggggaccctcctcctggtagtttccatgctggggtgctgagaagcagacaggctgggtcagcgccactcacaagcacctccccctgccctcccggccaccccacccctcccttcctgagactcacagtcagggtcttgtcctgggaagacctgtggctgtccataggggttgggggggaaggggctctggggatatggcccctgggggtagcccccttgggggtaggggccctgtgggtagccctcttgtgggtaggggccctgtgggtagcccccttgggggtagggaccctgtgggtagcccccttgggggtaggggctggggccatgggggtaccctggctgaccgtagggggagggctggaaagggggctgtgggtaaggggccccagggtagggaggctgagcataggggggcatgggtggctggggcccccccggatatccagggttggggggaggatagttgtccccagacaccaaaaaactcttttcatgggacatggcctcgggttccgcggtccgcccctagagaagacagacaaggaacagtggaacagttggcttgacgacagcgtcgggacccagccctgcgcaactccacctgcttctgggaacccag

SEQ ID NO: 16028 - DNA, 936 bp, Artificial sequence
  DNA replication origin
cagtggtgttgagggacaagcctgcctgcccagcatcccgcccccggccaaggtcacccctcactcacgcaggtgaagagcagagcgcccagtgaggcgtacacgatctccaggatgcggttccggatgaagatgcagagaatggcgaagatgaagagcaccaccatgctcaccaggagcacgcccatgcatgaggtgaagtcgtagcgggtctgcaggtgggagaggaacgggccatggggctgggcctgggaaagctgctcagcccctgcggccacagcccagccacgggaggcccctcacctgcatggagaagatgacgacggtgaagcagacggctgtggtgatgcccacggccatgatgactgcctcggtgttgtagaagctggcgatcatccccaccatgtacgacaggctggcggtcaggaccgactgcagttgggagacacaggctgaccttgggtgtgtgcccccatgccacccctgccggcccctgcctcatgagcacaaggagaaccacggtgaccaggcccggaagagtgggcgtgtgggactgcatggccggacccaggcacagaggctcaggtttgggggttaccagtgcaacaaggttccaggggtgctttcgccggaagtccccacaacagctgaggacgatgagagagatgaagaagacagcataggagacatagtaggtccagacattctcccggacaaagcccttcacctccgcaacaaaagtgaacacagacaccgtggacagggtcaccgacagctgcaaggtcagcactaggaacacctggggaaggagccgctcagagtcatccgctgggagccacagcccccaccgccttggagatgcccctacccaccttgcggatgaaggcctgtcggatgctcttgtcatcccagttggtggcagggaagtcctggttg

SEQ ID NO: 16029 - DNA, 1073 bp, Artificial sequence
  DNA replication origin
caggataggcccaagccctcctgtgttcagccctggccttctctctggcagtgggggtctttgctgtggaccctccaccccctggccctgtcccacacctctggagcttgccgttcccagggagcctcactaaagcctctccctctcagccaagagtttgtgtccgtctcaaactcctcaagaaaacaatgtcctggcacatttcacttggcagttactcccgagaccacccctgcccccgccctgacgttctcgttagccacataaacactttattctcctctttcgtataaaatcctgaggggtctgggagctagagctaggcaggttctttctcctcctcagcatgctggagcacaggcgggcacccagaggaggaactgcacctgctcaggaaatagccggaaggggaggtgggggaagggggagccgtgtggcccactcgctgctcagcatgtgattagccgctgcagagggcaaggtggactccaggaggtgccctcgtggctgggaaggcagtgtgtgtccccacactggcagagggactgtctgtgaacaatgacagcactgcagcagggagcccactcgtgactcaggttgtgcagggtcagggcccccggctgagaggcaaaaggacaacaggagggcagctggagccaccagtgggcagatggcagggcccgcgtaccaggctaaggagcgtggacttcatcctgagggcaccaccgagggttttaggcaggcgggtagtgcaacggatgtgattgatgtttcagaaacacaccgctagggtcctggtggagggcggggcaggcgaggaggccaggtgaggcaggggaggttgggagggagagggaagcggggcagcccctgctctggcctggagataatgcaggagcaggtttcaggaaggatgagcttggctctgggcaccccacaactgcggtgcccgcggacatcagggtggtgctggcttcgtacacagaggtgctaaggggactgactgggcagtggggaggggccttgagagatcctcaggccacgctgcatgcagagcctcgaggctgcagtgg

SEQ ID NO: 16030 - DNA, 801 bp, Artificial sequence
  DNA replication origin
tcagggaagagggtcctgagggaaggtagtcctcgggggaaagggttctgaggggagagagtcctgagagggaaggtcctgaggggagaagtttccaagggaagagggtcctgaggcgagaggttcttcagcggagagggtcttcagggaagagtgtcctgagagaacagcctcctgaggggagatggtcctgagggaagagggtcctgagcggggagggtccttagaggggagggatgtgtcctgagtagggagggacagatcttgagcgggaacgtgtttcttgtggggtagagtcttgtggggtattgacgggtcctgaggggccggatgcatctgtggggttcgcaggtcctgaattcaaggcaggttctcgtgtgagggaaactgtgacatgggggcgggcgttcgtgcgggaaggccctccggaactgagggaagactgccccctgccggaggagacctgccgcagcccccgggggaggcagtgggagagcaggacgaggcggccctgaggggagaggatcctcaggtaggtgtgtgggctcgggtgagggaggggtggtgagggctgggatgaggaggatgctggtggctagagcaggccctcagtcctcctttcttgactgcctgttccgtgctgacggctgtcccacctgtcacctgagctctgtgtggaggagccaggtctgaccggtgggggcaggagccagttttcagtgcagttactgttttagtgtcttgagcccccatcttggccctcatttcttgtctccccagctactccaacagccctatctc

SEQ ID NO: 16031 - DNA, 2218 bp, Artificial sequence
  DNA replication origin
tcttgaggggaaaggctcctcagggaagaggttcctcaagaaagagggtcctgaggggagagggtcctgagggggaagggttttcagggaaaaggttcctgagggaaggcagtcctgaggagagagggtcgtgagaggagaaggtcctgaggggagagagacctgaagtgggagggtcttgaggggaaaggctcctcagggaagaggttcctcaagaaagagggtcctgagggaagagggtcctgagggggaagggttttcagggaagaggttcctgagataagagcttcctgagggggagagtttcctcagggaagatagtcccgagggcaaggcagtcctgaggagagagggtcgtgagaggagaagctcctgaggggagagagacctgaagtgggagggtcttgaggggaaaggctcctcagggaagaggttcctcaagaaagagggtcctgagggaagaggctcctgagggggaagggttttcagggaagaggttcctgagagaagagcttcctgaggggggaggatcttgagggggaaggtcctggggtgtgaggttcttctggacagagggtcctgaggtgagagggttctgaggtaagagggtccttagaagaaaagttctgagggaagagagttttgagggcagagggccctgaggggagagggatctgagggaaggaggtcctgagggaaggcagtcctgaggggagagggtcctgagagaaggcagtcttgaggggagagggttctaaggtgggagggtactgatggggaaggtcccgaggagagaggatactgaaggaagagagtcctgagggagagaattctcaggggagaaactgggtcatgagggcagagggtcatgagggaagagggtcctgaggggagagggacctgagggaagggggtcctgaaggaagagagtcctgaggggagagggtcctgagggaaggcggtcttgaggggagggggttctaaggggagagggtcctgatgggaaaggtcttgaggggagaggatactgaaggaagagggtcctgagggagagaatcctcatgggagaaagtgggttatgaggggatggggtcctgggggcatcaggtcctcaggggagaagatcttgagggaatgagagtcctgatgggggaaggttttcagggaaggaggttgtcagggaagaggttcctgaggggagagggtcttgagggggaaagtactgagggtagaggtacttaaggtgagggggtcctgaggggagaaggtcctgagggaagagggtcctgagggaagaggggtctgagggaagagagttttgaggggagagggtctttagggaagagggtcctgagagaagagagttctgaggggagagggttttgatgggagagggccctaagggaagagcttggtcctaagggcatcaggtcctgagggaagaggctcctgagggaagaggctcctgagggaagaggatcctgagggaagaggggtgcgaggggagagggtcctggcggggagggtcctgaagggagagtatactcagggaggagggtcctgaaggaagagggttctgaggggagagggttctgaggggagaaggtcctgaggggagaggatactgaaggaagagggtcctgagggaagagggttctgaggggagagggtcctgatgtgaggggttcctcagagaagagagtcctgagggaagagtgtcctgcgggaaggtggtcctgagagaagagcgttctgaggggagagggcactgaggggagagggttatcagggaagagggtcctgagggaaggtagtcctcgggggaaagggttctgaggggagagagtcctgagagggaaggtcctgaggggagaagtttccaagggaagagggtcctgaggcgagaggttcttcagcggagagggtcttcagggaagagtgtcctgagagaacagcctcctgaggggagatggtcctgagggaagagggtcctgagcggggagggtccttagaggggagggatgtgtcctgagtagggagggacagatcttgagcgggaacgtgtttcttgtggggtagagtcttgtggggtattgacgggtcctgaggggccggatgcatctgtggggttcgcaggtcctgaattcaaggcaggttctcgtgtgagggaaactgtgacatgggggcgggcgttcgtgcgggaaggccctccggaact

SEQ ID NO: 16032 - DNA, 1740 bp, Artificial sequence
  DNA replication origin
gagggagagggcctggaggggagagcatcctgagggtagagggtcctgagggaagagagtcctgaagggagagggtcctaacgggagagggtcctggggaaagatggtctagaagtaggatggtcctgtgaagagagggtccggaggggagaggctcctaagggtacagggtcctcagagaagagggtcctgagggaaggtggtcccgaggggagaggagagggttctgaggggagagggtccttagggtagagggtcctgaggggagagggtccttaaggtagaaggtcctgagggaagagggtcctgaggggggaaggtttttagggaacagggtcctcagggaagagggttctgagagaagagctttctgaggggagagggtcttgaagagagagtgtcctcagggcgaaggtcctaaggggaggtcctgaggggacagggacagggttctagagggttctgagggaagagggaccttagggaaagggttctgaaggaagagagttttgaggggagagggtcctgagggaagggggtcttgaggggagaggatcccaaggggggtcctgaggggagtttcaaggggagagggtcctgagggaagaagttcctcagggaagagggtcctgagggaagagcgttttcagggaagtgtgtcctgagggaataggaaaggtcgtgaggggaaagggtcctgcatagagagtgtccttagagaagagggccacgaggggagacagtcacgagagaggagggtactgaggcgatatggtcctgaggagagagggtcctcagggaagaaggtccttagaaaagagggtcctgaggggggagggttttcagagaagagggtcctcagggaagagggtccttagggaaagggttctgagggaagagggtcctgaggggagaggatcctgaggggagaggttcctcagggggagggtctcaggagagaggtcctgaggtgggatggtctgaggggagaagttctcagggaagaggtcctgagggaagagggtaggtcctgaggggagagggtcctcaggggagagggtaggtcctgaggaaagagggtcctgagagaaaggggtcctgagggaagagggtcctggggggagagggtcctgagggaaaggagtcctgagagaagagggtcctgaggagagagggtccttaggggagagggacctgaggtgggagggtcctgagggacgaggttcctcagggaagagggtcttgagggaagagggttttcagggaagagggtcctgagggaatagggtaggtcatgaggggaaagggtcctgcatagagagtgtccttagagaagagggccatggcgggggatggtcacaagagaggagggtactgaggcgatatggtcctgaggagagagggtcctcagggaagaaggtcgttagaaaagagggtcctgacgggggagggttttcagagaagtgggtcctcagggaagagggcccttagggaaagggttctaagggaagagggtcctgaggggagagtttcctcagggaagatagtcctgagggaaggcagtcctgaggagagagggtcgtgagaggagaaggtcctgaggggagagagacctgaagtgggagggtcttgaggggaaaggctcctcagggaagaggttcctcaagaaagagggtcctgagggaagagggtcctgagggggaagggttttcagggaagaggttcctgagagaagagctt

SEQ ID NO: 16033 - DNA, 1720 bp, Artificial sequence
  DNA replication origin
atttagatttgtgagttgaaaatcttaggctccagtacaagtaccttgaaaagaacttgaagagaacattgaagaggacttcagattcactgcgtttatatgattatttaattatttaggtctctcagcaaggtttggtacatcaaacaattgaagttaaaaagaaaagtaaaagctagacacctggcctcacgactggaatcccagcacgttgagaggctaagatgggaggatcacttaaaccaaggggaggattgtgaggggagaaagtatgagggaagaaggtcctgtgggaagagagtcctgaagggagagggtgctaaggggagagggccctgaggagaaagggtcctgaggtgaaatgatcctgagaggagagggtcctcagggaaaagaatcctcaaagaagagggtcctgagggaagagtttccttaggggagaaggtaggtcctgaggggagatggtcctagggggagagggtcctgaggtgagatggtcctgagaggagagggtcctcaagaaaaagggtcctgaggggggaggctgctgaggctggagggtcctgagggaagaggatcttgaaggaagagggtcctgaggggagagggtccttagggagagggacctgaggtgggagggtcctgaaaggaaaggttcctcagggaagagattcctcaggaaagagggtcctgagggaagagggtcctcagggaagagggtgctgaggggagagggtaggtcttgaggggagagggtcctgagggaaggagggttttcagggaagagggtcgtcagggaagagggccttcagggaaaagggtcctgagagaaaagtttcctgaggagagagggtcttgagagaagagggtcatgaaggggaaggtcctgaggggacaggttcttcaggagagagggttctgagggaagagggaccttagggaaagggttctgaaggaagagagttttgaggggagagggtcctgagggaagggggtcttgaggggagaggatcccaaggggggtcctgaggggagtttcaaggggagagggtcctgagggaagaggatccagagggaagaggatcctaagggaatagggtcctgaaggaagggggtcctgagggaagggggtcctgagggaagggggtcctttggggagagggtcctgaaagaagaggggtctgaaagaaggcggtcctgggggaggaagtttatgagggaagagggtcttgagggagagggtcctcaggggagtgagtaggtcatgagggagagggcctggaggggagagcatcctgagggtagagggtcctgagggaagagagtcctgaagggagagggtcctaacgggagagggtcctggggaaagatggtctagaagtaggatggtcctgtgaagagagggtccggaggggagaggctcctaagggtacagggtcctcagagaagagggtcctgagggaaggtggtcccgaggggagaggagagggttctgaggggagagggtccttagggtagagggtcctgaggggagagggtccttaaggtagaaggtcctgagggaagagggtcctgaggggggaaggtttttagggaacagggtcctcagggaagagggttctgagagaagagctttctgaggggagagggtcttgaagagagagtgtcctcagggcgaaggtcctaaggggaggtcctgaggggacagggacagggttct

SEQ ID NO: 16034 - DNA, 1154 bp, Artificial sequence
  DNA replication origin
gaaggagaaggccgtcttgggagcaggtgtgcccatggctccgataggggtggaggtctggaggggtgctcctgcaaacgccatgctgagaggctctgggtcctgggtcgactgggggggctcagtggagagtgggactagtgatgtggagggaacagaaataaaaaaagggggattagagtgaggtgggagggctctgcccccccccactctgccacccaccacccaccacacctgttacctttggtggtggcagtgggtaccacgcaagctggggactggggcccagtggggcctccgcggagtggctcagccagccgcagccttggggcctctggcaggaccaggttgctcatggggttggccagcaggttctgagagacccctggtggggtggcagtggagctgaggagggggctgctcagagagacagccaccgtgcccatcacaggggctatcagggggctgctctgggacatggccacagggcctgccacgaggctgctgggagtcagggtgccagtggagggcaggcccagggaactggccagtgtgcctgttaggggtcccgcaatgggactggtcaggaagctggtgagggggctgctctgtgacgtgggtgctgggccagacagcagcgtgctgagggtgcctgtcagggggctcatgagtgagcccggtgtggcgctgggctgcaagctggttagcatctcggccaggggtgccaaggccatgatccccacttcttcgaggactcgttcgtttgccactgctggggacgggggcaggaagacacctgggaacacagagaaagcactgagaccccaggggagcccctccagaccacggcgagggtggtcacaggctctgtcactgtggtagggcctggccatagtgcccatctgtccccgatgagctgactggtccgacctggtctctgagcctcacttcttaggcaggccagggtggtggcgtctctgcctctgtggggagtctgtgtctgctcagaggagcctgggagtggctccccaaggcctcatctccagccctgatttttgggtcagttctcccaggctcacttctctgaccacttgcccactgcccccagccatggggacgtcccgctgccctttcctcaaccgtgcccacccctt

SEQ ID NO: 16035 - DNA, 1146 bp, Artificial sequence
  DNA replication origin
gggggagagccgcccgaccatgctgaaaacccccacctcgccttcctctgaggagaccgtgggctcccactgccagatgccccaacacctgcaggccgttggcactgagcagtcagcttcctctatcccagggactcctcaggtcctggcaagtttggcctggccagagtgcagggtccccacggcccctcatgggccaacctgccccctgtccctgcaggacccctggccgcacacctggatgatcttctctgggatgttggagacagtgaagccgtagagccgtacgcgctctgggaagatgctggacaggatcctgcggtccagctggaaggcaatctcacccaccagcctctcccaggccagctgcttcgactctggggacacagggtctcgtcagcccaggtgagagggtgagaggagctgggctcagcagcccaggcaggcggcagggagagggcctgggggcccgacccgcgtggagcccgcagtgtcactgacctcgggggttctcggggaacttgctggtcttgcggtgggccagcttccgttccacctccatcatgctcttcgtcgacggttctgtggtgcgtggacctcgagagtcattgactgaagccggggaggatgaggtacgaggtggggagtgggcgttgtgtggaggacagtgggggacaggcaggttctgggttggggaattatgcattcgggaagggggatggggggcaccctgggcgatgtgggtggtgcttgagggtgtgtagctggtggcaacctggggggcaagggcgggggcagaggcaaggacggtgaccgtgggggaggtggtgggggaggtggggacagatgcagggaccacttgttcctgggcggcactgggctgggcctgtgtgtccgaagtgttgaaggagaaggccgtcttgggagcaggtgtgcccatggctccgataggggtggaggtctggaggggtgctcctgcaaacgccatgctgagaggctctgggtcctgggtcgactgggggggctcagtggagagtgggactagtgatgtggagggaacagaaataaaaaaagggggattagagtgaggtgggagggctctgcccccccccactctgccacccaccacccaccacacctgttacc

SEQ ID NO: 16036 - DNA, 1101 bp, Artificial sequence
  DNA replication origin
caccgcaagaccagcaagttccccgagaacccccgaggtcagtgacactgcgggctccacgcgggtcgggcccccaggccctctccctgccgcctgcctgggctgctgagcccagctcctctcaccctctcacctgggctgacgagaccctgtgtccccagagtcgaagcagctggcctgggagaggctggtgggtgagattgccttccagctggaccgcaggatcctgtccagcatcttcccagagcgcgtacggctctacggcttcactgtctccaacatcccagagaagatcatccaggtgtgcggccaggggtcctgcagggacagggggcaggttggcccatgaggggccgtggggaccctgcactctggccaggccaaacttgccaggacctgaggagtccctgggatagaggaagctgactgctcagtgccaacggcctgcaggtgttggggcatctggcagtgggagcccacggtctcctcagaggaaggcgaggtgggggttttcagcatggtcgggcggctctccccctttgccaccaggatggcctcctctgtggacgcacttggaggatgatgctttgccagcatgccggagtgtgcgtctgtgccatgcgtgtggcaggctgtagaaggcacggggaagctcggttgggggtgtgcggctgctgggcagggagggcggctgcatccctacttaccacttgggcttctcttgagaaaacagcccagctgcattcccggctgctttttctctccagctgtgtttatctgtggattgcaggcctgtgtgtagcctaagcgggagctactgtgagctgcgtgggtccaggttggagctttgcctctggttaaagcatccttgggttagttttgtgtgtgtgggattttgtttgtttgttttcagatggactctcgctctgtcacctgcccagggtgagctgagattgagccattacactccagcctgggcaacaaaccaagactccacctgaaaaagaaaaagagtacacaacagtgtatgtacccagctcactgcaacctctgcctctcaattcaaacgattctgctgccccagcctctttttttgacaca

SEQ ID NO: 16037 - DNA, 1479 bp, Artificial sequence
  DNA replication origin
ccagctggggagagacaggcgcatcccaggcacgtcccaggcaacaggggtgctgagcgcaggctctgggagcacttagcagaggttgacgtcacattaaccgggcccggtcctgagtccagccccaagactggtaccctgcgcctggagccttccccgaggggtggtgcctgaacagcttgtgtgggcaaggagtagggaagagtattccctgcaggttggggaccaccacgtcagccatctgggacacagcaggacatagctggaagaggggtgcagggacagatggggggacactggagggtggccctcccccaagtgttggagcagcggaaactgcaggaggagcttgggcaggggatagcccacccaactccactttagacccgtggctctgtgggcctgtgcagagagcgggcagggccaagcctggaggcaggggcagctgcacctgtgacaggctgcaagactggcagggcccagtgcaaaatgaaaataattcaaaacttagaacttcaggatggtgccaacagcgcattgagctgggcactgggcttcccacaactgcccaggtcacacatccagggggcagcggcaggctgagtgggaggggctgccttcatgattacatgccttagggcgggagccagtcactgcctggctggtgggaggacacagggcatgaggaagtgagtggaaactgacccagatgtgctggttcccaggccctggccctggccccaggcccaggaggacgcagatggagacaggcccctcagcgctggggccaacacttgcctggggttgtcagttcagtgatgggggaggaaagggagtcccctagggggtgtgcaggctagagggtgctgaggatggaggccagggtaaggaagggggtggccttcagacgctgaaagggagcagagcacggagccaggaggaggcctgggaaagaccccagactcctgggtcaggggaccctgtgcacctccagatgcctagccacgccccctgccctcagtccctggaggcctcagcccagttgcactccctggtggtgcgtggagcagacgacagggttggggcatcctcttccaccctgtggctgaggccctactggggagctttgagagccacctgccctgcccggatcaggccttggagacctgtcaggctctgcccactgggttcccctgtcctagattcttgaggtctgtcgcagaacctccccaccgcacacccctcggatcctggccatctcacagcctcacctgcccctcggtcttccccttacctgcctgtgtgtggaggtgtggcaagggagggtccctgatggccgctgtccccacaggcttccctgaaccccagtgaccacaagctggatgagaagctgtgccagaggctcacacagcgctatgtgagcgtcatgaacaggctgcagagtctgggctacaacgggcgggtgcaccctgcgctgac

SEQ ID NO: 16038 - DNA, 2505 bp, Artificial sequence
  DNA replication origin
acaagctggatgagaagctgtgccagaggctcacacagcgctatgtgagcgtcatgaacaggctgcagagtctgggctacaacgggcgggtgcaccctgcgctgaccgagcagctggtgaacgcttatggcatcctgcgagagcgcccggagctggcggcgtctgagggcggcccctacaccgtggacttcctgcagcgtgtggtggtggagaccgtgcaccccggcatgctcgccgacgcgctgctgctgctctcctgcctcagccagctggcgcacgatgacggcaagcccatgttcatctggtgacgctggagctgggaggtccaggctcgctcagccccacagccctgtgcacggccattaaagcttcccacagacactggtcgctgggcctgtgccagcgctcctgggtggtgctgcctcctctggggtggctcaccgggccccggcaccgtgccccttcagccctgtctgccctggaggtcaatgcccataccggaccctcttcaagagcccgagaggccaaggctcagcagtggtctgcgaggggttggtctgaaggcccccaggcttccctcccacggcactaagagcagtgggagctcctgggactgggatggggaagggtaggaaccaggaaggggtggagcagggaggaaagggccgtggctctgtgcctgccgcagtggtgaggggcacggagttggcagaggtgggaggagacaaggatgtaggtgtgtgatccctgcccccatactaggccggggctgggtgaggggcggggagggggggcggtcttccaggccttgaggacaagaggacattcaaggcagaagagccgggagaaagcagtctcaccccaacctgggcatggggcagcccagcgaagtgctggccccttcccaagacacccaaggccatcccacacgtcctggagactttgagagggattgagagctggcaagggcagaccccacctgctgcaggagctgaggagcacaagcaggatttgggggcaggccaggggcctcccacagtgcactgagggcagatggggtgctgggaagggcttgtggagagtgcaggaagctgagggggccggccaggataggaagtccctggggaggaagacatgggaagagagaagtgcagtgtgggaaagcccagaggggctgtggccacagggtgagacaggagcaagcctgcatgcaggaaggcaacgaggccggctgtgatgggagggggattagaaccccaactgaggagggtcctggagcaccagtgcttgccagccagagaggatggcagaaggcaacagtggacccacagggtctgagttccaatgggaatctttcagcaaccagcaaggagtccggggctggagagggtatgcaaagtgtccggccctccggggatgcctgggctgctgagcttcctgcctctgccctccccattcccagacctccagggaatccagccagacaccagcctcttagtccctgggaagggcagggaagagctcctgccagaagcccctccacctccctgccagccagcaggaagggcagccctgacccaaactcccagagctatttaagagacgcttgcacccagctgacggcgggagtgtgtggtagttcacaggcccaattagaaagatgggaggcgagcagagcctgggagctaccggccgccctgtcctgggagctcctgaggggatgccagagggctccacgaatggggaaacgcttctgtcgcgtgccccggcagagctgcgcgcagggcagaaccaaaggtccctccccctagattggaagctccatggggtagggccacaaggccgtcaccactgcgggctggccttttgggggactttgcggggcgctgggcgggagtccatccctcctcaggtgtcaggtctttgaactcaggcgcccgacaccgcggggccgcagagccacagagagacgcctagggggtggggtggattctgccgcccgggcagctggagtgcgcggcctattccatgctgacctgcgtgggggcgggtacaggggagccggaggcagcgcacactgttcgctcctcaccagcgctgcgccgcccgcactcaaggcaggtcgtcctccacgtgccgctggctgcatcccgatcccgcttgcgtcgggcggggctcagaggttcccggtgcgaccttcgcgggtggatggggcgggacgaggaggatccagggtggggatttgagatcaggtccctttcgggttttctttttgaagcgcccctctgcctccgcccgcgcctccgccaggctcgctgcgtcagcacctcaccggctttgcacacaggctgtgccacgcggccttcacccctgtgactccccgcagctcgcgcggatgcaccgacgagtcagcttgtcctctggaagccaatgagtctccccggcgccccgtggccgaagagctaggtgtaccatgcaatccccgcccgactggtccccggcgac

SEQ ID NO: 16039 - DNA, 1182 bp, Artificial sequence
  DNA replication origin
gccgccccttctgctaccgctcccctccgctgtgctgggcgccgcccgcgctctggcgcccgcctgccgaacccgggcgctgcttcgtcttcctcaccgccaatctgtgcctgctccccgacgggcaagcgcgcttcggcaacctaccgcacagccagcgaccggccgaggccattggcgccgcgcggcccgcgctctacagggctacggactgcagccagccgtggtccagggcgccgcgcgggacgctggtggcctcgctgcccgtgggtctggactttgtgtgcctgcaggaggtattcgatctgcgcagggctcgtcgcttggtgaatcgcctggcgcccaacctgggcccgttgctgtacgacgtgggcacgctcggcctacagcccgggcggcacctcaagctgctggacagcgggctgctgctggcctcgcgctacccgctgctgcgcgccaccttccgttgcttcccccacgcacgtggcgaggacgcgctggcctccaagggactaccgtccgcacaggtactggcctatccggtgcagcccgcagagggggcgggggttcggccgagaaggcggagaaagctggagccgtccgtggtgttgcaggcgaggctgggcagcctggacgggcgccgcatcgtgggattcctgcactgcacgcatttgcaagcactggctggtgagccctgcggatgggtcctcggaacaggtcccgcctctccatagcggctgctgatccctacattcgcctgcaccccgccccccacctcccaccctttgttcactgcccccggcaccggaattcctgagaagtgcctgtcggggctcacagatcaggaactgcggagacgggagctgactgcccaggatgcgggtccgaatctggagccaagcccaccccacccccccctcccccacgcagaagacgggcccttgcgcagcaaacagctgacgccgctgctggactgggccgagaagtttggggccgagaagtttgaggccgacagagaacaaagtggagaggtcgtggctttcagcgtgctcctgggcgacctaaacttcgataactgctggaaaggtccagcaggagaggagggcgaggaggggcggagccaggaggcccggccccgcccaccgcgcgcccgcctctctctgcagaccaccggctagagca

SEQ ID NO: 16040 - DNA, 2298 bp, Artificial sequence
  DNA replication origin
ctgggtgccatgcaggagacggtgcagttccaggtggcccttcccccgcctcacccttccatccccctccctcaccctccaccccccccccaccccgctctggcccctgctcccctgtgcccactctgcacccatctcctggtttcagattcagcacctgggggccgatctccaccctggcgacgtgctactgagcaaccatcccagtgccgggggcagccacctgccagacctgactgttatcacaccggtgaggggtgctgcccgcctgcctctgctggggcagtggtggccgatgcagctgaccgtggctctccacccgctaggtgttttggccgggtcagacgcggcctgtgttctatgtggccagccgagggcaccacgcagacatcgggggcatcacaccaggctccatgcccccccactccaccatgctgcaacaggagggtgccgtctttctgtccttcaaacttgtccaggggggcgtcttccaggaggagggtgagtgggagtggggtggggcaggccttctgtaggctgggacacatggccactgctggcaagcaggcctggctggaccgtgggatgcagcccataggcccaggcctgccttgaggctgggaggagataggtggttaccccaaagggcagctgcagatcggatcccgggagctgagatgaattcagcctgggcccaggaaggcctcccgaggggtggttttgcgggtggagagttagccaagacgtggagggtcagggtgctggagagagaagcctgtttcaaggtgggtggctgcttgtggtgtgtgcagtcatactgggtggggtccgcagagaaacagcagggcaggggcagggcccaaaggcccctgtagagttttctgggcctaggtctgagtcactgggtggtgggtggccgtgaagggctttcagctgggcctgcgctgagctcccactgtgcccacgtgcagagaggattcggggtcttgagagtggcctggaggctggggggcaaggtggggggaagctgcagttgccctggatgatgctgatgtcttgggctgagtggagagcgagggcggggggtgggggacagttttagaggtggaggtgggtatttggagggatttgggagagggggccaggggtcaagtttgggcagctggaggtggagggcctggcactgagcagctgcagggaaggggggatggaggctgcaggggtgcctgtggtgggggtgggggtaggagagacagggaaaaacagccctggtctgaggctgcaggtctgggagcccaggggaagtggcgtggccagggtggagggtggtggcagagggtgggtgtaatggaaccacaggctgttctgggtgttgaggacacagatagggtggcccattgctggctgctcccttggtcaatgtgagctggggcaggggttgtggaccacagagggacatgcacaggcacactgcagagggccttgtggctgcctcagaggggaccctgagccaggctcaaggagaggggctttcctgaggtgctgagcagtcccaggccaggcctcggtgctttctaggggccagagaccttgtctggatctgggaaacctgggttgggggtgcagacagggttggccaggggctcagtgatgacactgtccatccagcggtgacggaggccctgcgggcgccaggcaaggtccccaactgcagcggaaccagaaacctgcacgacaacctgtcggacctccgtgcccaggtggcagccaaccagaagggcatccagctggtgggggagctcattgggcagtacggcctggacgtggtgcaggcctacatgggccatattcaggtgggcctgggcacaggagtgtgggcggcagggccatcctgcaggtgacctggccaccactgatcctgctccctgccaggcaaacgctgagctggccgtgcgagacatgttgcgtgcctttggaacctcccggcaggcccggggcctgcccctggaggtgtcctcggaagaccacatggacgacggttcccccatccgcctccgtgtgcagatcagcctgagtcaggtgggccgtggggagagtgcctctaggcggcaggggcacggtgcggccgctgacagcctctcccttccctcggggcgcgcagggcagcgccgtgtttgacttcagcggcactgggccggaggtgtttggtaatctcaacgcaccgcgggccgtaaccctgtccgccctcatctactgcctgcgctgtctggtgggccgcgacatcccactcaaccaggt

SEQ ID NO: 16041 - DNA, 1223 bp, Artificial sequence
  DNA replication origin
ggccatgtgtcccagcctacagaaggcctgccccaccccactcccactcaccctcctcctggaagacgcccccctggacaagtttgaaggacagaaagacggcaccctcctgttgcagcatggtggagtgggggggcatggagcctggtgtgatgcccccgatgtctgcgtggtgccctcggctggccacatagaacacaggccgcgtctgacccggccaaaacacctagcgggtggagagccacggtcagctgcatcggccaccactgccccagcagaggcaggcgggcagcacccctcaccggtgtgataacagtcaggtctggcaggtggctgcccccggcactgggatggttgctcagtagcacgtcgccagggtggagatcggcccccaggtgctgaatctgaaaccaggagatgggtgcagagtgggcacaggggagcaggggccagagcggggtggggggggggtggagggtgagggagggggatggaagggtgaggcgggggaagggccacctggaactgcaccgtctcctgcatggcacccaggtgcacagggatgtggggggcattggacaccagccccccatcgggcccaaagagggcacaggagaagtccagacgctccttgatgttggtggagatggctgtgcgctgcaggatgcggcccatctgctctaggagcacaaagtgaccaggcccgctggccccacccacccacagcctggccccaggaaagggaggaacaggacccaccaggactcaaacccaggacccaggaaaaacccagcagctttttcctggggaagaccaagttgacggtgtgcccacttggccacgtcttagcctatgtaaaggacaccaccttccccagccctgcctggagcccccagcaagaacccagtgccacccctcgaccctcccaccctgcctggcacagcaagaacctggttcctaggctcttgacctctgggctcccagcaagccgctggcctgaccctgcacagatgggttccctgtgctgtcctcagtatcccttccttagctaggagggcactctctggatcacatggctgcaggtaaggggggaaggtgtcctccctgcccaaggtttgttctcatggccaactgcaccacaccagtgctgcggccacactgcccgccccgtcgccagggggtcctgcttctgcctctccctttgggcacagccctgccagcta

SEQ ID NO: 16042 - DNA, 1517 bp, Artificial sequence
  DNA replication origin
tgctgatctgggacctgcagcaggtggttgggggcactcacaccaaaccccctgccctgaccccaccccacccagcgcccggcaaggacacctgttctgcttctcgcacaccccgggaccacctgggaagtcatcaggaggaacacccaccaagggcgtggtgaggacaacgtaagccctctgtccagggcaccctgggagcccacctggggaagccctgggcctgcagagcatccacacactgctcctccaggcggctcagcctctggtccagctgcacgaaggtctcaggcgcgtagagcagggagcagggttcctgtgcctcatgcaccacgtcagccagggccagccccagggccgacagcagcccactgtgcctgcagggatgggcagcatggcaatgggaggtcacctcccaagcccggcgcagatcacaccacctccgtgcacccacacccaggcccacctgtggatgtgcaccgtgtccatgcccagggcccgggcgatggcacatgcatgctgcccaccagctcccccaaagcaggccagcacatgggctgaggggtcatggcctcttgcctagggagacagaaggggtcagtgggctctcctactctaccccatccagcccccagcctgagcaggaggcctggggcagggagcagggctgggggcaggacaggcgggagagcagaggtggacgtacctgcgtgagtgcacggatgggccggcacatggcctcgttggccacgcgcacgaaccccatggccacctcctccaggctcagcggggaggccgggcagggcccgttggtcaggaagctgttgacctcagtggccacagcctccagggctttgcgggaggcctcaggggaaagtggttggttctctcccggcccaaaaatgcaggggaaggaggcaggcagcaggcgacccaggaccagattagcatccgtcactgtcacagggccccctgggaggtggacagggtgtggggcttgggggctggaggcaggggagcaggagtaggcagcagggatagggctgacaggaggggctgggcctgcggcggcaagcggagggcaaggccaggccggccagatcctgactcttacctttgcggtagcaggcgggtcctgggtgggctcctgctgactcgggcccaaccacaaagaggccagacctaggggaaggaagggctggggttggagttggacacgaggagggagacagggctggggtcccagcctgggaagcaggagagctgacctgaagaagaggcgggaaccccctcccgctgccacggtgttgatgtccagctgcggggcctggagggtgacgccagctgtgctggcctcgaagacgtgctcgaattccccagcatagcggctcacatccgtggacgtgcctggcaggggtggggtgctggtgggtcacttgaagacccaggggcccagcagctgagcctccccgagaccccagccctcggccctcatacctcccatgtcaaagccgatg

SEQ ID NO: 16043 - DNA, 2113 bp, Artificial sequence
  DNA replication origin
gccaggtggggcctgcgccgggcggcctcccctccgcggcccttccccgctgcctcccgggcttcccctccgcggccccttccccgctgcctcccgggccgctcctcacgcgtccccgcctcgggtcgccccgtcggtgctcaggctccgtcctgtcccggggcccgccaggcttgggtcgaaggtcgagcaaagcgggaagtggggtcccccggccagctcgccccaaaccccctccccgcactcccgtgcctctttcgtgctgagggaccccgcccgagggctccagggtccagcggcgtccccacctcccgtgcctgctccgctgcctgggtttcggcccagtccagggcccggagaagcgcgatgctgggcatgggggcatcaggccgctgaccgccggccaggctctcgctcgggcccaggctgccctcggagctgggcctgcggctctggctcttcccagagtcgtgcccgtgggtctctccctcaggaaccccccgcatgcgcagggctggggagcctctagtcccactcgcaggtgagcccgggctgaccccgcctccgtccagtttttccagggctaccagctgaagagctcctgtgggactccagccccaccaccatgggcagccccgagggccgcttccactttgccatcgaccgtgggggtaccttcacagacgtctttgcccagtgcccaggggggcacgtgcgggtcttaaaactgctctcagaggaccctgccaactatgcggacgcgccaaccgaaggcatccgccgcatcctggagcaggtgggccagggcggagcgggtggacagggaccccacggccagaagccccacactgaccacgtggtccccaggaggccggcatgctcctgccccgggaccagccgctggactccagtcatatcgccagcatccgcatgggcaccacagtggccaccaacgcactgctggagcggaagggggagcgggtggcgctgctggtgacacgtggcttccgagacctgctgcacattggcacccaagcccgtggggacctctttgacctggtgagctccatgttggctggggaccaggctgtgtggtgtacaccccccagggatgccttgaccctgtggggagagcagttgttggattagtgatggctcatgggcaccagccgacaaagaggaagctcccgaattcccagtgggaccccaagttctcctagccctcggagtgggcacaggatgccctgttcctgcctgccgccatgcccaccctggatgctggtgtggggccacccaagctaccctgttcaggcagaggaggggtggaaccccgcacctactgctgcgtttccggaagaagctgccttcgtgggggtggagcagttggctgcactcagctgcctagggggtggagagctgcccccttggtgagccttgctggggctgccaggtatgactctcctgggcctgccgaccggcctgttgggacacagccactcacctgtaccacccactcacacaggaccccggcctggaccctcaggcctgggcctcttctgagtctctgcccgcccccaggccgtgcccatgcctgaggtgctgtatgaagaggtgctggaggtggacgaacgcgtggtgctgcaccgtggagaggcgggcaccgggacgcctgtgaaaggtgtgtgtgccgccgctgctgtgggatttggggccggagggtcctgctggcctttaacggggcctcctgggcttttctggaaggccgcacgggggacctgctggaagtgcagcagcctgtggacctgggggccctgcgtgggaagctggaggggctgctatctcgaggcatccgcagcctggctgtggtgctcatgcactcgtacacgtgagtgaggtggggctgtgggctgcgggagcaggtgccgggcctggtgggagacgaggtgccactgggtttttgtcataggtgggcccagcatgagcagcaggtgggtgtgctggcccgggagctgggcttcacgcacgtgtcactgtcctcggaggccatgcccatggtgcgcatcgtccctcgggggcacacggcctgtgccgacgcctacctcacgcccgccat

SEQ ID NO: 16044 - DNA, 1448 bp, Artificial sequence
  DNA replication origin
gggggaccccacttcccgctttgctcgaccttcgacccaagcctggcgggccccgggacaggacggagcctgagcaccgacggggcgacccgaggcggggacgcgtgaggagcggcccgggaggcagcggggaaggggccgcggaggggaagcccgggaggcagcggggaagggccgcggaggggaggccgcccggcgcaggccccacctggcgctcggctccggctcggtcgctcgcggtcggctctgcctgcgctcccggcggccctgcccgcaccagcctcgcctcggggaggagcctacagggcccgccccccgcgccactggtcccggcactcgcggttacatcaggccgggcccgccccccgcgcctccgtcctcgccctgcgcttccccgggccacgggcgcaggatcaagggcaccttggctctgcggccctcgggtctccggcgccgggcctgggctcgcctagcgtgggcgccccaggatcccacctccaggtgtcctgggcaaggggagctggcagcccaggccacaacagggcttcccactggcggacgtccttccccgtggagggggcgttgaaggacagagaggagaggggaggccctgcggccttctctaccagccccagctcccggccccgtgggcctctcctgtgcggtatctctggccttcttcaccgggtctccctcatctccagccctccttgtgccagaggcgtgtgaaccagagcaactccatcttgaataggagctggctaaaaagaggccgaaacctactgggctgcactcccggacgattaatgcattctaagtcacaggatgagataggaggtcagcacaacacacaggtcataaaaacctgtatctcccagcccggccaacacggttgaaaccccctcgctactaaaaatacaaaaattagtcaggcatgtggcacgcgcctgtaatctcagctaccgggaggctgaggcaggagaatcgctggaacccgggaggcggaggctgcagtgagcagagatcgtgtcactgcactccagcccaggcgacagagcgagactccgtctcaaaaaaaagaaaaaaaaaaaccctgtatctgataaaacaggttgcagtaaagaagttggccaaacctaccaaaaccatcgtcctacactccccgcagcgccatggcggtttaccagggccacagcaacggcacgaagttaccctatatggtctagaaaggggaggcattaataatccacccctcgtttagcatatcatcagaaataaccataaaaatgggcaaccggcctggcacggtggctcacgcctgtaatcccagcactttgggagaccgaggcgtgtggatcatgaggtcaagagatcaagaccatcctggccaacatggtaaaatctgtctctactaaaaatacaaaaattagctgggcgtggtggcacgc

SEQ ID NO: 16045 - DNA, 1882 bp, Artificial sequence
  DNA replication origin
tgctgacctcacaatagcagggtctgctgtccctggccggcctgctggcccccgccagctgccgccgctggctgccaggcatgtccctcctcagcagctatgagggcctgcggcaggagatccagcggctggcacaggagaacgaagagctgcggcggctggtgcagctcatccaggagaaccaggagctgaagctggtgctcaggaaccgcggcagcagcctgggcttctgcagctccgggttcctggctgaggtggctgccagtccctggctacccaggcggagaacgatcaaattcaagaatgctgagagaggtgagccgtaccggggccccaagactctgtggagttgggcaaacccgctgggtgctgcggtgcctctggagcaaagccagggccctggggctcttccaggatgtgcggcggggagaaggtgccaggtctgggaaagtgacctctgagcagagcctgagcgggcgagggagctgccaggctggggcgcggctttccaggcccagggaacagcctgtgccaggccctgaggtgggtgcaagttgtctgtgcctgaagctgtcagagtcactgcaacggcagactctgtcctcccagccctgcgctctctggtggtggggacagccatatccctgggggaacgtgatggaagcctggccggggtggaggtgtgagaagtagcagctctgtgttctgaaggtgaaagtaacaggacttctggcagattgcgtgtggggatgagaatggggctggggcagctcgctgggtgggggagccgctgctggagtgggccactggtaggtggcctggggcttggttttgggacgtgtctggccatgcagtcagaggcgccactagagagtaggggccgggccatcccgcaggcctggagctgcctctggttgctgtggaggggctgcgtggcattgccaaggggaagctgggacccagcaacatggagggacagagataaaggcccagtggggtaggaggcaggtggggcagccaagggaggcctgagcctgggtgggtgggggttggcttttgttggtctgcccccgagacgcgcagtggagtggggtcaggagagcccaggaggcaggcggaggtgggggaggtggacacctggaggtgcacggcagtgggatgccgctagggagcgtggggacaggcccttagaggtttcgtctgtgagtggatagcacaggcccctggagtgaacagagaggcgagggggtggctggggatggtggagggcagtgagagagtttggggtctacagcacaggcctggcgggcagcctgagtgcgtacagggcagcagatggtgggggtgtgggtgggtggggtgtgggaatctctcctgatagatcctgggctgacaggcaggaccaagaggctgtgctggggatgggtggaaaccagaaggcagggcagtcccgcaggagtgtgggctggccaggcagaggctgtatggctggtggggaaggtcctcggctgaagtggggttgctgaccagagctgcttcccacggactgctcagagcaggcaggtggggctcctgcatgtgggcgtggcatgatcatctggggcctcagctgggcctcaggatgggaaggcactaggaggtccatgggcatggggtctgggggtggcatcacagcaggcacgtgccacttacagggcagtcatctggacatgagcagcagcccatccatggggaggggttcctaagtgcctgatcctgggccccatccctgtctatggggagctggagtccactgcccttggcacaaatgttacaggaaaggggtcccaatccagaccccaagagagggttcttggatttcttgaaagaaagaattcagggc

SEQ ID NO: 16046 - DNA, 1351 bp, Artificial sequence
  DNA replication origin
cagcgttgatgtttgtaaacttgggttggcagggaatggggcaaggatggacacaaggaagccaattaaaaggtgccagagggcgacacatgcaagacagagagcgcaaaacagggggctttgttttggaggtaacgcagttgccccttgctgaggcattgaaagtggagggagaggcagacccacagaggacagtggagtgtgagctggaaggagtgggcctggctcatgtgtctgtcctcttccagatccggggctcccgggctcgagccctgccggacagggccctagtgaactgtcaatatagttcagcgaccttcagcacaggtgagcgcaagcgacggccacatggggaccgtaagtcctgtgagatgggcctgcagctccgccagactttcgaagcagccatcctcacacagctgcacccacgctcccagattgatatctatgtgcaggtgagccagctgcagccgtcaatccagggagggaagggtgtgatggggttggggagggagtctgatagactgacaccctgggttccctgcaggtgctacaggcagatggtgggacctatgcagcttgtgtgaatgcagccacgctggcagtgctggatgccgggatacccatgagagactttgtgtgtgcgtgctcagctggcttcgtggacggcacagccctggcggacctcagccatgtggaggaagcagctggtggcccccagctggccctggccctgctgccagcctcaggacagattgcgctgcttgagatggatgcccggctgcacgaggaccacctggagcgggtgttggaggctgctgcccaggctgcccgagatgtgcacaccctcttagatcgagtggtccggcagcatgtgcgtgaggcctctatcttgctgggggactgaccacccagccacccatgtccagaataaaaccctcctctgcccacacacccctcactgtacgttatcacctaacagcacttcagagccatgtgaaggctggcagagcctggtctggtgctggctcctggggatgattagggaccctcgcccacacatgaacggcctatctctgtgtagcctgattcaaaccctgaagagaacagtggattagggggtttctgtaggggaggccctgggtggaaaaagcagcatgtcccagtaaggactcaaggcagctgagcaggaggcagggcctggcaagatgagccaggccattagactgaggaatctgttacccttattccagcacatcgggggccctgagcaaagggctgaggaagaactcagctggctctgggtacccaccctagggatgtgggggccatgtcccacaacctctggact

SEQ ID NO: 16047 - DNA, 1293 bp, Artificial sequence
  DNA replication origin
gcgagcccagggccctcgggtccccgcctccccgggccctgtcctcaccacaacggcgcgttgaggcgcagcactaggcgggcgagcgcgcgccggcgaaccgggtccgacaggaggcccatggcggggcagggcggcgcggctacggaccctctcccgcctccaactaccgccgcggtgcccacaggctgctcctgtcagacccggggacccgcgctcgcccgcacttccggtcccagagacgctcgcgacggcgcgcatgtccagagcagagggcgcgcccctaacactgtgtgctgccggcgcgcaagcgcagagccgcggccggctggagggtgggcggtgccggtgaggccggcaggacctgagcgggtttgggagtccgctaggcgctgcccccactagagtcggactcgcagtgcaccccccgggagggaggcaggtagccctacagccggaggacagcagagatgcccgacagcaggccgagctggtcgggggctgcgagatagcgccggctggaaggcccgcaggagtcagaggtgatgagccgggcaggtgggtggaaagccggcggcggtcagagaatggatgccaagcgagactgccaatgactcaggacgtcccagtggagtcacagcgtgagcccagcaccgaggttttcagagtcagatgactgcagagaagatgctgatggcactactggccaaaacgggcttcactggagctggggtgtgtgcattataaagtgggggatcatactgtcactgtccgggccaggagatccgtggaatattaggggagaagcagtcccagggtccagactgcagggactggtagtcggggctcggtgggccagaggtgaatgaagggggagtttgctcaagagggtgcactttgggaaggtgaggtgggtggatcctttgagatcagcctggacaacgaaatgagacccagtctgtacacacaaaaaaattccttttaaattagccaggtgagtggggcatgcctgtagtctcagctcaggaggctaaagtgggaggatcacttgagcctgggagatccagactgcagtgagccgtgatcacaccactgcactccagcctgagcacagagcaagaccatgtctcaacaaacaaaatagtggtgggcagagagaagggtcaaagctgaagactccatgtgagaacaagtttttttttgttttttttttgagacagagtcttgctctgtcacccaggctggagtgcagtggtgtaatcttggctcactgcaaccttcaactcctggttc

SEQ ID NO: 16048 - DNA, 3071 bp, Artificial sequence
  DNA replication origin
cgccgttgtggtgaggacagggcccggggaggcggggacccgagggccctgggctcgcgccggcggccccatgcgcggtccccatcgagggccggggccgctccagctgctcgcgcccctccggctgctcgcgcccttccgctcctgccctctggaagcactgagggtatcaggcccaggcttagggctcgggtccggcgtcccgatgcaggactccgggtttaggtctcccagacccgcgcgatcgaccccgggtgcggaggttgtggcctcgggtcggcgtctgaggacccgctgacgctccggtgcccctccgtcctctctcacagcgtgctgagctacgtggcgggcatcgcctggttcttggcgctggttttcccgccgctgacccagcgcacttacatgtcggagaacgccatgggctccaccatggtggaggagcagtttgcgggcggagaccgtgcccgggcttttgcccgggacttcgccgcccaccgcaagaagtcggggtgagcggcagagcagggcgtatggggcgagcagtggtggctaaggccggggagctctgctcagaggctcccttcgtgtctgcagggctctgccagtggcctggcttgaacggacgatgcggtcagtagggctggaggtctacacgcagagtttctcccggaaactgcccttcccagatgagacccacgagcgctatgtactgggggagtggggtgtgcctgggcccagaaagcaccttggagggaggggtctgggctgggtatcaccttgcgggggtgtcatggggccaggaagctcagtgggagggaaatccctggtgggcactggagggctaggaaagttgtggggggcccttcagccccctaccacaaagttacactgaggctccccccaccgatgctgcatacagatggtgtcgggcaccaacgtgtacggcatcctgcgggccccgcgtgctgccagcaccgagtcgcttgtgctcaccgtgccctgtggctctgactctaccaacagccaggctgtggggctgctgctggcactggctgcccacttccggggtgagtctcagggctgctggccgtggaggggtttggtcagtgccccagaccctgctgatcctgcttctggcctccagggcagatttattgggccaaagatatcgtcttcctggtaacagaacatgaccttctgggcactgaggcttggcttgaagcctaccacgatgtcaatgtcactggtaggttctcttgtcctgcctgccctggtccccctctcagggtcactgtcctcaccacgtcctccattagcactcattcacttgctcctacaggcatgcagtcgtctcccctgcagggccgagctggggccattcaggcagccgtggccctggagctgagcagtgatgtggtcaccagcctcgatgtggccgtggaggggcttaacgggcagctgcccaaccttgacctgctcaatctcttccagaccttctgccagaaagggggcctgttgtgcacgcttcagggcaaggtggggctgcctgcctgcctgagggctgaagggcacagggtctgtgggaggggctgtctcatcctgtcctgcacctctaaagctgcagcccgaggactggacatcattggatggaccgctgcagggcctgcagacactgctgctcatggttctgcggcaggcctccggccgcccccacggctcccatggcctcttcctgcgctaccgtgtggaggccctaaccctgcgtggcatcaatagcttccgccagtacaagtatgacctggtggcagtgggcaagtaagtagtctctggtcccccctttccatgcccaggatggggtctagctggagcggagtgggggatggcctggtggctctggccagccgtgaacctgccccacacctgacagggctttggagggcatgttccgcaagctcaaccacctcctggagcgcctgcaccagtccttcttcctctacttgctccccggcctctcccgcttcgtctccatcggcctctacatgcccgctgtcggcttcttgctcctggtccttggtctcaagatatcctctgccccttgccatctacctgtgaccagcctccagtctcctcaactctaggctggggagagtcttccatcctgatggggggtggggtacgggggtgagccctgggtccccctctgggcagatcccgttacacctcttgttggggtccttgattgggctacgctctggaactgtggatgcagctgcatgaggctggaatgggccttgaggagcccgggggtgcccctggccccagtgtaccccttcccccatcacaggtgatggcacccccttctgttgttggaatgggcttctggggtctgactggtgtttagtgttgcaacttagcctcagctggtgggatggtggtggtctttggggatcccctggccccagggtccatctccaagagcctgtgtgccctgcagggtgtggggctggcctcgctcgtggcacctctgctgatctcacaggccatgggactggccctctatgtcctgccagtgctgggccaacacgttgccacccagcacttcccagtggcagaggctgaggctgtggtgctgacactgctggcgatttatgcagctggcctggccctgccccacaatacccaccggtaagaggctgggctggttgttgggggcaggggtagaggtcccctggacatgcagacagcttgtgggttgcctctgagtcctttgtcttacagggtggtaagcacacaggccccagacaggggctggatggcactgaagctggtagccctgatctacctagcactgcagctgggctgcatcgccctcaccaacttctcactgggcttcctgctggccaccaccatggtgcccactgctgcgcttgccaagcctcatgggccccggtatgtatggatcagccccacttcccccaatgcctgtgccctcatcacagaccgcaccctcattcagtagccctttcccccaacctggtgcccatgcccccaccatggagcctaccttgatg

SEQ ID NO: 16049 - DNA, 2463 bp, Artificial sequence
  DNA replication origin
gccccaccgccagtttccacgacaacccgaagagcgtggggaggcaggcggtgccccggcccctgactgacgcgaccgggaccagcgcgcttcgtccccgcccacccgacaggccccgcccccgagcccggccccgccccgcgctccccggctttcgcgaggttttgactctcgtggcgccccaggggccgacgggagtggcggccgcgcggaggaggccaagatggcggcagctgcggcttcgcttcgcggggtagtgttgggcccgcggggcgcggggctcccgggcgcgcgtgcccggggtctgctgtgcagcgcgcgtcccgggcagctcccgctacggacacctcaggtgagcgctgggccgggccccggcctccgcgcggccccgcatctccgtgaaggtcacggcggggaggctgcgggcgcgggcctgggcagcgcggaagcggtaccggccacccagcgtccccggtcccagctgcctgccgaccttgagcgtgtgggatcagggctgggcgcccacctctccgaacggcagagagcccgtccccagcgtgggggttggcgggacgggctagctgccgtggcggggctggggctttcccgaatggcgcgcccaggacggctcttgcggctggctgtccaaactgggcccgcgtcctgaagtgaccccagcctgatctcggccagctgcttgtgaccttggcctgtcccagcacccttggtcacttcggtctgatccccggctcaggatccaggaacaccctctcctgagagcgaatcacggtctaggggtcagcggcggagagggatggggtgggtagtgggacagggtgtgcgtctggtgccctgcaggaggaggccattgctgggtggagaggtgggcgctgagagtcagatccccaggtagggctgggtggtgtcctggcaggcgctgagcggagatcttgcaggcagtggccttgtcgtcgaagtctggcctttcccgaggccggaaagtgatgctgtcagcgctgggcatgctggcggcagggggtgcggggctggccatggctctgcattcggctgtgagtgccagtgacctggagctgcacccccccagctatccgtggtctcaccgtggcctcctctcttccttggaccacaccaggtgtgcagctggctggctggctggcagcgggaggttctgggtggagctggtaaggtggaatcttcagctttcctaaccctttccctccctccagcatccggaggggtttccaggtatataagcaggtgtgcgcctcctgccacagcatggacttcgtggcctaccgccacctggtgggcgtgtgctacacggaggatgaagctaaggagctggctgcggaggtgtggggtctggggatgcctgggacccagggctcagggctcccactgttgagatggcagggttgtgatgaggctctcggtggcaggtggaggttcaagacggccccaatgaagatggggagatgttcatgcggccagggaagctgttcgactatttcccaaaaccataccccaacagtgaggctgctcgagctgccaacaacggagcattgccccctgacctcagctacatcgtgcgagctaggtacacgggctgcccatggggtggtgctggagagatgggggaagggctgacttgtgcttggaactaaggagccatggatctggtcctaggcatggtggtgaggactacgtcttctccctgctcacgggctactgcgagccacccaccggggtgtcactgcgggaaggtctctacttcaacccctactttcctggccaggccattgccatggcccctcccatctacacagatgtcttagagtttgacgatggtaagaggcctccagtctggcagtgggcatgtggaatacttctccactacccccagggatgctttccctgtgttcctgggtccaggaggtcctgcccacttcttgtctggggcgtcttctgtgcatgtctcaggaggcttttgggctccttcagttttgcgtatgtccggtggagggtactgcccctttgatgccttgggtaggggcagtgtctgcttcacagagggggggcatgatcccaggttggacatgagcctgagaatagccctcactgcttgtcgttggccaggcaccccagctaccatgtcccagatagccaaggatgtgtgcaccttcctgcgctgggcatctgagccagagcacgaccatcgaaaacgcatggggctcaaggtaaaagggttgggaggccatggtgggtatcagagaagggctgggagctgggcagggctcctccccactcccttctctgagccttccttgtctgcagatgttgatgatgatggctctgctggtgcccctggtctacaccataaagcggcacaagtggtcagtcctgaagagtcggaagctggcatatcggccgcccaagtgaccc

SEQ ID NO: 16050 - DNA, 2640 bp, Artificial sequence
  DNA replication origin
tgggtatcagagaagggctgggagctgggcagggctcctccccactcccttctctgagccttccttgtctgcagatgttgatgatgatggctctgctggtgcccctggtctacaccataaagcggcacaagtggtcagtcctgaagagtcggaagctggcatatcggccgcccaagtgaccctgtccagtgtctgcttgccatcctgccagaacaggccctcaagcccaagagccatcccaggcctgttcaggcctcagctaagcctctcttcatctggaagaagaggcaagggggcaggagaccaggctctagctctgggccctccttcagcccccatcatgggaataaattaattttctcaatgtacatatttgagttattatatggaaagagtgcacgtttgcaaggaactctgataccaagacccttgccttcacaaggctcccaggatgtcccatgcagtgtggccagcaatgccctgcactgactggtagctgggagtccagacagtgggtgtgggacagaaagcggagaactgcatgttagaggaagtcagcatttggtggggtggggtgtgtctgagcacagagctgaaaagggcctagccaggcaggatgtggcccagggacctgttggaatgaacagccaagtgttaaggtgttgaaccacttggcccccattctgatggcagcagggaaccttggctgcattttaacaggggaaaggcctggtctagggcaggggctatttattgctgggctgggctgaggaaggggatggctcccagccaggtgaaggagtcaagtagacagacaggatgtgtgtcatggagtggcccctcctagcagtccacagggtagctaggtggtgggtcctggccagaagctggcagtagctgggttcccacaggagcatgctgctgagggagggagacagtggatgctatctaggagggtcacagagacatgacccagcaccggcccagtgacctggtgcaggactcagctcctgagcttccctcgtccctaggaagggaaggaaaacacccattttcattgctggtgtcctagctgcaagagctgaggggagtggtggccatagtccaaggaaggcaagagctgaatgggagaaaggtggtaccaataggcctgcaggcaagagaggtgcaggcctgggggaccagggtggacagtaggagacaaggtcagtggtgggggctgcagctcagtatgtggcacaccccagcagcctcagcccagtggtgagcagctgggtggggggctctgtaggcctctggggtctgggaagagatccccatgccatgctttcctgaccactgaggctcagggtccgggcccattcttcagtaacaccggggtctggctggggagccccgcctgctgatgagggcctgtctccctgtatcgctggctaggatggggcaggtctgcagagacaccatgaaagggatgcttgctggctcttaagggtctttaatggtttcattttgtggcccttccccccaaccctggtgactgtcccagcaagcagtcagtagaggtccccggagttcagtgggggcctggagatgtcggacttgtgagggaagggccactctccccttgtaacctgtgggggaggagctgggtcattcctgtggattctgccctgccccccacctcccctgcctgtgccacctctggtacctctggtggctgctaggtggaagctgcagcaagggggtcccaagtgcagggcctctgggtgctacacatctcacagccagggcggtctggggcattgatgaaggtgcaggaaggacaggaccagctgggctgggggaagagagacagttgttgcttccctgctctttccaatgcccatggctgtcctggccctccctgcccagtcccgtgcccacctggagtggactgggcaggctggaggcagctggctgggggcctgggggtagccccaatgatgggggaaacaagcgtccaagttccccgtccatcttctgggggtgctgagggctaggtcctgtggctgagggggtggagctcaggactgtggggctgcaccccacctcccacaccccacccccatcgaggactgacctggggcttctcgaggagctgacagcaagtagaggaaagcagggtccccatcctgccgaaccccgtaagaggcaaggctgcgctcaggcacacacaggcaccgtccgatgacccagcgttgcacggctggcgggaaaccgagctctgagaacacctgtggccagagcatcagggcaggtgatgtcacctaggctcctctgcccctggcagggctccccagaccctgtgcccacctgctcctggagagctgcaacagtgcagtgggggtggacctgcagggcaacgtgtgcagaggacgcggcggatgcggcagaggcagcgtcttcaagtgtgacctgcagcctgtgccagaatgtgggttcagggatggatgggggacctgggatggtcacgaggacaaggtgaagaagcagccccaggcctcacctgatggggccaggtgggaagcaggcctcctgaagctgaacactcagggccacacgatgctgggccaggacggctgccacttgggctgccccctt

SEQ ID NO: 16051 - DNA, 840 bp, Artificial sequence
  DNA replication origin
tgaaccatgtgaccaaggaagcagcaaacaaaccctgaggtgagcatgtataagtgatccttgaggttcagtgggggccggggccggggccggggccaggaacagcgctgggtgcgtggaaggccctgcttatcctagtagggagatggtagaatatagtgggcctgagaccacgggagctgtgtcagcactggatggggacccccccattgcagtgggctgggcctcacagggcgggtaagaaggtgagtcagcagggtgctcagctctgaagacgcccagggcagtggcttgtctggagtgctggcagcccaggtgtgggtcagggagcccggagaggggaggtccccaagggctccaagaggccaccctgactgcagggccactgagggcctgctttggttctgctgtgaggcatccctggctggcagaaagagccaagagaggtggcctagccaggcacaaaagggtttgaaaaggctctaattcccaaatatgaactaagtgcagctccagcactaacagaagtctggcaggggcctctgagggtcttgccagagccaaggctgggagaaggtgtggctagaagtgtggcctgaggcagggccctggcatggactgaggtgagggagaaggcaaaggtcctggaaaaccaagggcctagaggcctggacagaggccacagcacagcacacccatatcttacctctaggcagcaagagcaactcaccaccagccttgggcccagaagcatgccctgtctccctgcccagtcccccggaagcctccacactcaagggccctccacctgaggcagatcttcctaggagccctggaaac

SEQ ID NO: 16052 - DNA, 960 bp, Artificial sequence
  DNA replication origin
atgtttctttgcttctgttttctcgtccgtgaaatgggggtgacgctcggacctactgggacctacctggacctactttacagggctattgtgaggatttgatgataggcgtacagggcttaggaccgtgtaaatggtctataaatgttaccttgtatttctttgctcctcgtgcgatgtagggcggggggacgccctgagcctggactctccctcttctcaggttaatttggagtggcccctggagtcagtttcctacaccatccgaggccccacccagcacgagctacagcctccaccaggagggcctggaaccctcagcctgcacttcctcaaccctcaggaagctcagcggtgggcagtcctagtccgaggtgccaccgtggaaggacagaatggtcagtgccctgtaatggatacaattacaatttggaatagccttggccccccagtcctggttggggaagttggatccaccttccccactgctggatgtctgggaaggcttccaggagggagtaggtggagcctggagtagcttggagtacttggagtggctgctggagtcagtctcctacaccatctgaggccccagccagcacaagttgcagcctccaccaggaagccctggaacctcagcctgcacttccttaaccctcaggaaggatgagaggcaagcatgaagaggcagagcaggcagggtcaggacctgtgtgagaagacatcatcccaagagcagcaggagagtgacaggagtgggagagtgacagactcagatacctcctgcttaagacagagttctgcagtggcaagggttggtgcagatagggttggggagaaggatgtttctagagatgcttagaagatggaattagtggccgggtggggtggctcacgcctgtaattccagcactttgggaggccgaggtgggtgatcacctgatgtcaggagtttgagac

SEQ ID NO: 16053 - DNA, 996 bp, Artificial sequence
  DNA replication origin
tcgcccccaaagaccagctctaacgtgagcgcctcggccgccctgccccagcctcgtacacgccgccagcctcgcccagccggtgtccggagaccctcgggccgtgtccatttgtgggcaaagccagcggggcaggcttggccagagtgcaccactcggcgccgtcccaggcccgacgctctgggcgcgcccggaaccccaggttcgcggcccgtgtttccgaccggcggagggggctcagcggcccgatcccacggaagcgcgctcggaggggtgggacccggccggaccggagatggcgccgccagcgggcggggcggcggcggcggcctcggacttgggctccgccgcagtgctcttggctgtgcacgccgcggtgaggccgctgggcgccgggccagacgccgaggcacagctgcggaggctgcagctgagcgcggaccctgagcggcctgggcgcttccggctggagctgctgggcgcgggacctggggcggtgagtgggggcggagggcgcgcggtcagtcctcttggcccgggcagggcacggagcccaaagttaggcccctccgcttgccacctgggtgcccttaagcagttatgtttctttgcttctgttttctcgtccgtgaaatgggggtgacgctcggacctactgggacctacctggacctactttacagggctattgtgaggatttgatgataggcgtacagggcttaggaccgtgtaaatggtctataaatgttaccttgtatttctttgctcctcgtgcgatgtagggcggggggacgccctgagcctggactctccctcttctcaggttaatttggagtggcccctggagtcagtttcctacaccatccgaggccccacccagcacgagctacagcctccaccaggagggcctggaaccctcagcctgcacttcctcaaccctcaggaagctcagcggtgggcagtcctagtccgaggtgccaccgtggaaggacagaa

SEQ ID NO: 16054 - DNA, 1003 bp, Artificial sequence
  DNA replication origin
gcaagcggaggggcctaactttgggctccgtgccctgcccgggccaagaggactgaccgcgcgccctccgcccccactcaccgccccaggtcccgcgcccagcagctccagccggaagcgcccaggccgctcagggtccgcgctcagctgcagcctccgcagctgtgcctcggcgtctggcccggcgcccagcggcctcaccgcggcgtgcacagccaagagcactgcggcggagcccaagtccgaggccgccgccgccgccccgcccgctggcggcgccatctccggtccggccgggtcccacccctccgagcgcgcttccgtgggatcgggccgctgagccccctccgccggtcggaaacacgggccgcgaacctggggttccgggcgcgcccagagcgtcgggcctgggacggcgccgagtggtgcactctggccaagcctgccccgctggctttgcccacaaatggacacggcccgagggtctccggacaccggctgggcgaggctggcggcgtgtacgaggctggggcagggcggccgaggcgctcacgttagagctggtctttgggggcgaagggtcagggggcgaagcaccggccacaactgaaggcggacgcggcctcttcgccccaggggctcggcggacgtagatgcatccagcgtgcgactatcccagcgcctaacggcagctggacttcgctcccgggacctccaatgggctgccaccttcgcccgcagaccccagcccccgccacgcccacacgtcgcactaggttggcccgcgcctcactggttacggggtcgacccccctagggggcggagctagagaggccacggccaatgaacgccgggggtaagcgggttagtacgacgagaagagtgacagacaggctccataaccagtagacgtagaaggcagaactgagtggcgggtacggcacccgatggctattcgagctctcgatctcggagactggagcgggccattcagaggcgcgg

SEQ ID NO: 16055 - DNA, 3584 bp, Artificial sequence
  DNA replication origin
cgccggagcgctctgtggcggtcggcggcaggtcggtcgcgagagcgggctctgtggaagggggcgaggctatgtcgcggtggcagcccggatgggccggcagggccgggagtaacgggacgtcgccgcggagcttcttcccccggatacagtgcggcccgagcggaggccgcggcgccgccctccgatcttgaagagcccgcgctgcgcggagcccgcccccgcctgcgcaccggcaccgacgcggagcgacccagcccagccagacccggcccggcgcggcctgatctaacccagccaggcaggtgggtgtccgccctgcgtcccgcgccgtctgcgtacccggaaccacagcccccagcaggcctcgcgcggcgcgctgcctcctgggatttgtagttccaccgcggcttggctggtgcccgacgtggcccaggcgggcgctgcctggtgactgcagcgccccagcggggccgagggaccgccctcctaggcgtctggagaaactaggcaatttttccgggtagagtggaggaacctgtagttttcctctccccgggccagaaagtagccaaaacgaaagagcgcccgcccaggtgaccgcagggcccggagtcccaggtgtcctggttcctaaccgggatgcagcctcttaccttggctgaggagcccagccagcctgagggagactgcaggagtcacgtcccgttgcggactcaagagttacccccatggtggctggagctcttttggagtgggcgtggagatggggaatgggaatgttgagcaacaatctcagccagcagccccagggtgagcagggtccccggtggtctagtctagtcccagaactcgcgtgttctgcagggggtatggctgacctggagcctggacttaccaccctcaggtaaaacaggatctctgtcacctctcctggccgggcagagaggggagctcctgatgtgcagcctggacagaggccagactcagcttgttcctagcggctccacttagtgggtaggagggctgaaggcagggccccaaggggccagatagatacccatggtctggtctctcactccccaggcaatactagcccctctggagcacggagctccttccccaaagacatgaagctattggagaactcgagctttgaagccatcaactcacagctgactgtggagactggagatgcccacatcattggcaggtgaggcaggctgggggggctggcatctcggaggtcacactgccgcgcccttcagtggaacctgggggaagcatgcttcatggttctctctgcatcctataggattgagagctactcatgtaagatggcaggagacgacaaacacatgttcaagcagttctgccaggagggccagccccacgtgctggaggcactttctccaccccagacttcaggactgagccccagcaggtgagccatggtggggcctacctggggctgggggttgaggggaggtgatgggcccagctgatggttctgtctgtgcagactcagcaaaagccaaggcggtgaggaggagggccccctcagtgacaagtgcagccgcaagaccctcttctacctgattgccacgctcaatgagtccttcaggcctgactatgacttcagcacagcccgcagccatgagttcagccgggagcccagccttagctgggtgagggtcaggtggagggaagggacccacagccaccccactgtccttccccactttgggtagccctgggctcctgtcaccctgactgtgacctgccctaggtggtgaatgcagtcaactgcagtctgttctcagctgtgcgggaggacttcaaggatctgaaaccacagctgtggaacgcggtggacgaggagatctgcctggctgaatgtgacatctacaggtgggccggcatccctgcagatggcctccaggcctccaggtttgtggggcacttggcgcctcacaccacctgtcaccctatactccccagctataacccagacttggactcagatcccttcggggaggatggtagcctctggtccttcaactacttcttctacaacaagcggctcaagcgaatcgtcttctttagctgccgttccatcaggtgggcaccccccgcctcctcccccacctccctgttgggccgatacaacttccccagctgtgccatctccacccagctttgccctccctgaacatcctccctggggccagcagcaggcctgggtaggggtcctgaaactggtttccctgcctcccctcagtggctccacctacacaccctcagaggcaggcaacgagctggacatggagctgggggaggaggaggtggaggaagaaagcagaagcgggggcagtggggccgaggagaccagcaccatggaggaggacaggtgtgtgatgggggccatgacccgggtccttgaagcctggagtgggtacaacagggtgggggcctcctctacttggtctaagtggtggctcctgaaggcccactgtgtgccaacctccgcccagggtcccagtgatctgtatttgatgaggaggagccgaggccccagcttcatccagcttcaaccaatgcctggacctgtccacctgagaggcccctggggcctccccagctgctggccagaccctggcgctgccacagtcctggcactgcccaaggccatacctgcctagccctttggctccatcctgtggatgcccactcacccctcagactcctgctgcccatgctgtggccggacttgtcagcagggggcctggtgggaggagcgactgccctgcccaaatgaactgccacagcagggacagctggaccgcagagtttatttttgtatttctactgggcctgcacactccagcccaaagggtctgtggccggaggccccacgagcaggccccagcagtcaccggctctggtcttgggccggccccggtgcccacctgtacccccacctcgcccatttggccgcgtgcactgagtgtcactttgctgcagctcgtttctttccaataaaagtttctgtgacttagtgtggacctgatgcggtgtgggggtggggcctgcggtgtgggagtggccggcggcatctggtatcctagcaactgccgctgcgggccgtgaccgctaagtcctgggagctgttgggctctgggaccgcagttgctgaaatggaggcagaggtgtgggaggcagaaggctacaacctagttctggactcggacctgtatgatgcggatggctatgatgtcccagaccctgggctgctcaccgaaaagaatggtgagggggcctggcctcgccctccgggcatcccgctaggaagtgggtctcattcgggcttgggttccgtcccctggaacaaaactcccctgggcagtccctggtagggcagggcccctggaggagggctccccataaccgtcagggtcgaggacctgaggctgtaggtggcagaacttccagttcctgcccgcagagttgactttcacggagccgtcgcaggtcctgccctttttgaccagcagccaacagtggcaaagcctgaccccgcgcgc

SEQ ID NO: 16056 - DNA, 1038 bp, Artificial sequence
  DNA replication origin
gcagcgcgccgcgttggcgcggaccaggtgcccagccctggtcagcagccacagcgcctcgcgcggcaggcagtaggccacggctgccgcgcagtcctccggctccagcagcagtgagctcactatgcgcccggtggccgccgacaggaggtagaccgagccgtcggcgcacgcgcacacgaggcgcgtaggcagcgactggtgcgcaggcgcgggcaacgcgggcgccacctgcacgtggagcaccttggcgggcagttgcgccaacggcgagtagagctcgcgtacgcgccacagctgcatgctgctcgcgcacagggacagcaccggccagcccgggcgcaccggcgccagcagacggcccacgcgccgggacagcttgtcctggccccagaagcccagcgctacctcgcccacctgcgccgccgcctgcaggtcccaggtgcgtagcgtcccgtcctgcgaggccgacaacaccagggtcgtgttcgggagcacagtcatagccgtcaccgggcctgtgggaggggtgcaggtcactcggccgactgaaggcaggggagccttcagcctgtgttgcagtcagcgcagcaaggcctggccggagctgcggagatgctggacagcctagagcggctggaggcaaagggccgaggctcggggtgcagagaactcagagcacctgtgtggcccacgaacaccatccggatctgccagtcagcctcccacaccttcacggtgctgtcccgggaagctgtcaccattgcctctacttcctcgcagtaagccaggtccgagatggtgctacaggtggggaatgggagaatcccaatggacttaacatcgccttgtgtgtgagggccgtgtgcccctacatgcctggccctccctagggggatccccctcacgttttgtgcaaatcccggcgcacatctacgagagtccaggcatgcagatcgaaggtgagcacggccgagccataggccgcgaagcagcgcaggacgtggtggggaggaaccggcgccacagccagacgca

SEQ ID NO: 16057 - DNA, 1920 bp, Artificial sequence
  DNA replication origin
ggcagcttggggtacagcacacacatcccgggtctctctctccactctgagggtcccggcactccactgctgggacccccttccagactgcatgccctgggaggtagcaggagcagacagaccatcagagaccaggtgggaggggtgggtggagaagaggggccagggtcagggctgggctgggggaggccctacacctaccagcaggccagagccgtagatcagacggaggtaattgtcaaagccttcctggcgctgctgccaggagggtgggggctgggctgctgggaccactagccccagcctcaactgctgaaggtctcggtcccgggccactatggcgtccaagtcctgagtcagggttcagggatcagcctgctcttccttgagccttgctatgtgctgcccgggcaaccatggggatcccaggcctgccccagggctgacggctggggcctgagccggggcagggcgggctaaggaggacccaccccacctccttcggcaccaggtgctgagatgttgccctccgacgatggatgagagacaaggcctcgctgcaaacagggacaggcacaggtgggatgctgggtggcatgccagtgggctggggcagaggctgggacaaggaccaaccccaaacgggtgtgccagggctcaggcaggcttgtatcaactccagagggccccacaccgccaggcccccacccagagtgggaaaggagggcctccaggagggctgagcaggcctgcatgggacctgaggctggctgccccatggaggttggtgagcctctgcagttgggcggaagtcagtgactcctggctcatcagtggcagcggagggtcgtccaccacgtctggggccttccggcacatcttctgaataggggaaggagcctgtatccctggctgggggaacctgggtctgccccccaaggtgagcaaggggggcccaccttgctcactctgtcctcaccacacaccttaactaggtaggatgtaggcaggtagagcctgtgggacaccaggcagaggcgggatcccagcgccagcaccaggtctccactgttgctgcagaaagccagggcctgaggggcaccattcagctgcaggagcctggagaggcacccagggcagccgaggctcagcagggacaaggccttctccactcagtccagccagtgggctctggtgaggagcagaggtaggagaccccagccctccccacctcctagcctaccgcaggaggcggttctcagcagtccagatgcgaacggtgcagtccaggctggagcaggcatacagtttgagcgtggggcagcagcacaggcctggcggcagggttcagggtcaggaaccggagctgggcggtggctgggcttcacccatgctgccccctcaccagtgatgtggtccgtggggtcgtcctggggccggtggtctaatcgcggactgtcgcccaggccaaactgcaccaggccgtaggtagcgctgtctgggtcctcaaagcccgcggtgacgcgtctgcctagcgcacagagcgccacggccgggtagcagcaggagaaggtgcgcagcaggctcaggctctcttcggcataggggaagacgcgccacatcttcaccgtcaggtccccacctgtgggcagcggaatctggctgggccttgtcggaggggagggggctctgtggcggcctggcctttggcaggggagctactgacccgaagacacaatgctgttccaggtggatgcgatggcgacaaccgggcccgggctgtgcgcctccgtttggaagacagtcttcgacgagagccactccagcaccgacagcgtgccgtccgtgtgccccaccactggcaggtacctgcgagtgggaagagcctgttggcgcggaccctgccgctccttccgcccg

SEQ ID NO: 16058 - DNA, 4399 bp, Artificial sequence
  DNA replication origin
ccactcacccctcagtctcatcgcggacctcgcggacctctgcggcttggcctcctgcagccggaggatggggtggtacctggaggcaaagaggagggttcagctggcccagccccacgcttggctgccccacgcaggccccgccggcgcaggccccgcgcaccagtgctcccgcggaggtggcaccaccatgtcgggcaccggcgccaccgtgtagggctctggcgggtgtgggtgcgcagccttctcctggagcgaactccgctgctgcgcccgcagctgctcacagaagaagttgagcgcgtcgatggggcccaagtccagcagctgcgagtgcgaccagtcggtctcctccagcggcggcggctctccgggcagctgagcaggcccggcagggtgcaggcgggcctcgggctccaggcagaagctcttcagcgtctcggagagcactctgagacggagctgaggggtcccccagctgcgcttgggtgccagcatccgctgggcctggagctccggggctaaagagtgcggctccgcaggtgagaccaccatcaaaggcacctctgagacctgcgagagcctcccgaagatgccggaggccgaccaggaggtgcccgagggtatcacggaggcgcgtgtgggtgccccagagaccactgacgtctgcgatggggtctccttgggaggagaggaaagtgctaaggtcttagagaccttgggcagcaccaccagcaacttggctgcagacagtggctgcgagctttccatctgtcaggaggtgacccatggccaagcaccctggctcctcgagcatccacatggccactgaaactcccttctgcccgatgctcagcccaaggcaggggctgccactcccctgacaaggaggtcccagggctgtccctggttcgggccagacaccccctgctgacttccagctgcacagggaaatccctagagatgctcagggcagggaggctggaggcccaggactgggcaaggcaaggaaggagcctgtggcctcagctggctttgaccccaggacttgcagaaagccagagaaggcaacagggttcccaaggcccccccggcccctgccggcccaacctgaagctcctggatcatgtcctccagtttctggtggcagcaagtgcgcaggccggccttggagtccaggtctgggccctggacccaggtcatcatctccttgaataggaagccctctgggtcctgaaggcccagcccgtgcagcagcttcttgagctctggcctgggacaggtgcatgtggcttgtccagaggccttcccagtggcagggagggctgggcaggagcgcaactcaccggcagtgcacgggagagtagaggaagtaggacatgagctccagcaccacatcccgggactccagggagcaggccaggagcagctgcagcgccagtatcacgaacttcttctgtgtctggtcctgaggcaggcggtggggatgtggttgctgagggccggtgggcggggaggaaaactgggggcaggacaaggggcacacctggaggctggggggctggtccaggttgagcaagtgtacgagcaggccctgcagctggccttggagatcactgctcatgttgggcagcagtctcagtagcacctgcaggatgtgcacacggtcgacccacgtggtcttctccagcagggccaccaacagcgaggccaggccctcgatcgtgcccgcctccgggtatgcctgcagggtagcatgctgaggccctgctcccatgtcacacccaagccagcccctaccttctcccctgtccctcaccctaacccatgcttctcatgcatccccagttccctccaacctgcaggctgaagatggggaacaactttttgaaccaggtctggtagatgaagaaatgcagaaacttgggcagatgcccgtaatgctcatccaagagcaaactcccatgacggtgccagggatgagggtgggtcctggcaaccttgcagctgcgccgccggggctcctgggtccagtccacagcactctaggggagcagcagtggctgcaggtcccacctgtctgggtctcagtgtaagcccacctcccgtggtggcctggggcctctgcctgagcctctacctgatcctccagttcccaggaatccagctgctggttggagtgcgggctcagggaagccaaggcccagtccagctcctcgtcttccttctcctcctcctcttccttcttgtcttcctccccctcctccccaggcttctcccccatccattggagcagcttcctctgccactgggtttgggatggcctggggcgccacaaccacagggcatcctggcttgcccctggctgcagaggggcaagagatggtgcctgatgggttgcaaggacagcagagccctcccctgccggcaaaacccccagccctgccccttgcctcgagctttctctgggaggcgagctgagtcggggatccgaggctgctgacctccgcatttagccacatctgctgtagcaccgcggagttgggcacatagccggggaagcagatgggcctcaggcagtgctggaggtgggcacagcagggaatgctgaggacctggattccccagcctggacaccacccttggtcacctgtataacctctcagagcccctcagccgccagtccagctctgcctgccaggcctccgagagctggctgagctagcaacccctactctcaacacagatggcaggagaaccctgagataccaggggcgaggccctcagtgagcatcagctctgacaaacgagaagggaaacctggagaagtgctggcttctaggggccctgacaccctgcaagctccttacaggacttggccccagccctgggacaagaaagtctaaaagaagcacaggggccagggaggaaggaaggagcttggagaaagggcaatgaagagcatgatggtggcacccaggcccaaagagtcaattacccacctgggcaggtgacagtgccaggaatatgctgggggaggggctgaggcctgcctgggcacctggtgtacgtgagggtgggaagacagtggattctaaagggccaggttcccttgactttgctcctctaaagggcagggattctgatcttccaggaaaagtccctaggggacctgccctcccagcgcctccacgggggaaaggggtgtgtggcataaccggctggggggactggctttgcctgatgtcagctcccagagcagcaaggagcctgtggccacaaacacagctgtactggaacagggctagacagagggtgaagggtgaggggtgaggggtgcgtgggaggctacagcctggccctctggttgtaggtgggcatggcccttgggtcagatttggacacaaagatttgtagcaaaggggagatggcaggcacaagagtgatgcctggagaggagtggctctccaggagctgggagggggtctcaccttgtggggctgcacggtggcaggaaagaagcccctgaggctagagagaggttccttgtcccatctctttggcagcagtgggatctgggggatggaatgggggctcagaacaacacagcccctagcaccccggcagctctgcccctcagtaggtggtaccccacctgcctgggtccctcaccctgcactgcaagtgggaggatggcaggtccagggccatggtcgtcctccctcggagctgctccaactgcagctgcagatccagactgatgcccaggtagtggctcagtgaggagcgggccagaagctggggcataggaggagtcacagggtggcagaggggtcatgggggcccagcaggcatgtgggagggtgggaagcctcacctgggatgccttgctgtgcaccctacggtgggtgggtgggatcggcactgtgactcggggagactgggagaagtgctggcccagggctcccaggtcctgtggggacagggctgttggcactgtttgggctgcagtgctgacctcagcccgggcaagacagtgggcagcttggggtacagcacacacatcccgggtctctctctccactctgagggtcccggcactccactgctgggacccccttccagactgcatgccctgggaggtagcaggagcagacagaccatcagagaccaggtgggaggggtgggtggagaagaggggccagggtcagggctgggctgggggaggccctacacctaccagcaggccagagccgtagatcagacggaggtaattgtcaaagccttcctggcgctgctgccaggagggtgggggctgggctgctgggaccactagccccagcctcaactgctgaaggtctcggtcccgggccactatggcgtccaagtcctgagtcag

SEQ ID NO: 16059 - DNA, 1307 bp, Artificial sequence
  DNA replication origin
gatgagactgaggggtgagtggagccaggggtggagactggaccccacccaccccagcccccgggcctcataagcctccgcccgcccccaggccccatgcggtcccggctctgtgcgggccgcaccctggacggccccatccggacgctgaagctgccgttgccgcgtgtggagccgcagcctttccccctggactggcctatgcccccgcgcccgctgcccccgcggctcctgcagccggccctgcagcgctactttctgccagcggacgcggaccctgacacctacagctgaccggactggtggcctcagcccgcctggctctggggcctgtcattggtatttggccaaggcctgcatcgggaataaagtccagagaatttctttctgcaggatgccgcctgctttggagggccccggggtgcgcacggcgtgtgggcgtgcggcctgaacccacagtggcggcggaaggcaggagccggaggcctggcggaggtggccatcgtgggcaccagcgttcccggaggggtggccggcctagggcagaggagacccatagcggggtaccatccgctgggcactgagcaaacgttttctgctcaagtactaggtgttgagatgcgggctgaccttagagaacgtgtcctgggccagcccacagcctggtgtggaggggagtccgggagggcctgggcggtcccaggatgagccttccgggtcgatgcaggtgagaccaggagtttgcagaccttgctttcgttacttttattctggcaaagagaagaattgacaaaggcaccaggagcttttttctgagcggcaacgcagagcatcctctgacccctttagcctgaaagtccctaggggaggggcttggtccggaagggctcggcctctgggccgggcccctctgccctgtgtggcctggcagggcgcaagacctgtgcacagagttcttggggcagctctggggggaatccccggcttttacacctgtcttttgtgttgtctgagcagtgatttccctcctgtatctgtagcctctgactttactagtttcttcttgatggctctggttagaatcgcttctccacaccttccctgtcaccccaaactgtgcggtggctcttgttatggggccaccaaatggctgctctttcccaggccggtgcttgacacagtggtgccaccatcccaagagcatgggtgcgcaggaccgtgcgggacagccaagttgctgggcccagctgaacctgcctcttcacctccaggcactaccgcatcctcccactgcagaaggccaaggt

SEQ ID NO: 16060 - DNA, 1585 bp, Artificial sequence
  DNA replication origin
ccatgtcgagcgacactctgctgccacccgaccggtgccagcggtccgcttaggggtccgctgtgtggcccgcaaccccgcccaccagaggagcgaaagccgccctggccaatccgaggctgcgcactgggctcaaggggcgggaccggcgtgcggaggggaggggccaggccgcgcgcggggagttatgggtctcggcgtctggccggaagctgcggaggttggagactgagcgctgtgatgtcccgagccatggggaccgaggcccggcgcgatttggccgcctgccgcgtccacactcgctggaagcgtccatgtagtctcggctaggtcggccagtgcttcccactgggcgctggccacgccgaacctggtcagccggccctggcttctcgtgggccctgagggtctgaggcccgcgccccggctcctcgactaggctgtcgggtcagagaagggctgaatgggggagtggccacgggcctctcggaaggaaggcctgctcttgtccaggctggcacggccaccgagaagctcaggccgtccagggacaggacaacacagggccccagtggggacctgaggaggcagctttggagaggcctctgggcatctctgagctggtagctttggggcatttgtcaggacgtcttcagtcgcaagtgacaaacccaactcaaactgacttgcacgaagagaaaatttgtaaatggaggtttggagggagccagcttccggcactgctttatccaggagctctctggagccttgtactgtctaccctaccattgctctccctctctgctgccctgctgctctgtggctccatatcatttccacctgccactggccgattttctcagagcagttgggaaagaaagacactgggacctcccagttccatggtcgtggcagaagagtttctctgtcccagtattggagtctgccccagaaaaggactccagttcttcacgtgtcctccactgtgggcggagcagcaaccttctagagacacacagactgggaggaagggagggcaaaagaagggcattccctcactccagcattttttgggcaccagccatctgccaagctggtagctcaggacacggaaccaaacaactttggtggccattctggcctcagggtctttgcacttgctgtctcttctgcctggaatgctcttttctcagctgtacacaaggctggcaacttctaattatttgtcagagctatcttccctgggcaacttacagagactcagcccacccgccacccatgactgcttggtttctgtctgcctccttcaagatagcagtacttaggccaggtgtggtagctcatgcctataatcccagcgttttgggaggccaaggcaggtagatcacctgaggtcagcagtttgagaccagcctggccaacatggtgaaacccctctctactaaaaaaaatacaaaaggtaaccgggggtggtggcacactcctctagtcccgcctactcgagaggctgaagcaggagaattgcttgaacctgggaggaagaagttgcattgagccaagatagcgccactgcaccccagcctgg

SEQ ID NO: 16061 - DNA, 1641 bp, Artificial sequence
  DNA replication origin
gctggcgctgactggctgcggacccggccgcgcgctgttggcggggcaggcggcgctgctgcaggcgctgatggagctggcgccggcctctgccccggcccgggacgccgcccgcgcgctcgtgaacttggccgccgaccccggcctgcacgagacattgctggcggccgaccccgggctgccagcgcgcctgatgggccgcgcgttggacccgcagtggccctgggccgaggaggcggccgccgcgctagccaacctcagtcgcgagccggcgccgtgtgcagcgctcatggcggcgctggcggccgcggagccggcagactcgggcctggagcggctggtgcgcgcgctgtgcacgcccggctacaacgcccgcgcgcccctgcactacctagcgccgctgctctccaacctcagccaacgccctgcggcgcgggccttcctactggaccccgacaggtgaagcccagggcgcccgcgcgggcggggaggggacggaagttaggggggacggccctaagtgacacctcccaacaggtgcgtggtccagcggctgctgccccttacccagtaccccgactcctctgtacgcaggggcggggtggtggggacgctgcggaattgctgcttcgagcaccgtgagtggtgggtgtggcgggggtgcgttgccaggtgtggggactggactccggggctgctctggaccagtttccattcccgtctccccaccctcaccatccctcaggacatcacgagtggttgcttggacctgaggtggacattctcccctttttgctcctgcccttggctgggcctgaggatttctccgaggaagagatggaacgtgagtggctagtgtggagcctcagagttggccggagaggagggaggccagtggagggagagagaggtgtccaggccacaggctcctgaaactttgcagcagtgagttgctgagcacaggtgggacttacacaggcagagcctggctcagctgcccagcccagggacacagtggctcccacacactcacccctagggctgcctgtcgacttgcagtacctgccaccagacaagcagcgagaacctgatgcagacatccgcaagatgcttgttgaagccatcatgctggtgagcaggagccctgctgcaataagcaccaccccaacacacacacatgagcatgctgacatctgggtaacctcttccacctcctcagctgacagccacagcaccaggtcggcagcaggtgcgggaccagggagcctacctgatccttcgagagctgcacagctgggagccggagcccgacgtgcggacggcttgtgagaagctcatccaggttggtgcagggttggagaggctggggaaggggtgtctgtagctggccagctgctcacctgcttcccgtctggcaggtgcttattggggacgagcctgaacgtggcatggaaaacctgctggaggtgcaggtgcctgaggatgtggagcagcagctgcagcagctggattgcagggagcaggagcagttggagcgggagctggccccagagccatgggtggagagggccacacccacctgaggcccctgcagccggacaccagctccagggtcccctttgccaggctttctcagaccag

SEQ ID NO: 16062 - DNA, 1553 bp, Artificial sequence
  DNA replication origin
tcgggggctgctgcagctgcacccaaacgcatgcctgggcctgcagcaggtggctgcacactgctggatgctgcctgcagcgaacacgctcttcctcagtgctgtgccaggtgtagtgtggccctgtgggtgagcaactgagcagcacgtggtccctctgcactccacctgaccccactgtggccccttgcagagaagcaggtgcagtcccaactccgagcatccgtggatgacctggagcctggcacagacttagagcgccaacagccagtcctgcagctgcactgccccagcagcagggcatccccaaggagaatacgggccctgagctcaggcctccagaagcgcaccccagaagaggggtgggttctgcccagctggtcctctagagctcgtagcagccagcctgggagtgagcgcctccaggaggcgctccagtaaactgagggtgggtgggtggggcaaggccagataaagcatttattctgtgaagacagtgctgatgtctgagtgctaagagggcaactggcctccagtggcaggtgggggctctggccaggggaaaacatggtccacacatgcctgcatgagtggcagagctttaatgggggcaggtgagaggagatcctggaggcgggagacgcccggcacccaagccacagcaggagaccataggggacgctccagttttagggtgtggagtgaggcattgtgaattgccaagaagacaagctaagctccttcaccagggcttgacgggcctgggagggcccatcagtgagcaggggccagccctcaggatcccaatgcaagaggtggcagtgaggtcaggtcagctcaggaagggaagtgtggcaagagccaccatgacagcctgtggggcttggcagccacataactggcaggtgagggatgcacataggtccaggggagaagcacgtaaggcgcctgggcctatagtgggctctaccacaggggcagagggtggctgggggagaagcttgggcagggactaggctgcaggcacatctggaggctcttggcagaggtaagaaggccagggaggagtggcccaggctcaaggaagctgaccagggagacggcctagctagagaggccaatgagagcacccactcaatctgagactgggaaacaggaagacttagggagctgacaagggttgagggcagggtcctggagcataggtcaagcagggaggcacagtcctagaaagaccccaggatctacgtatggctgggtcagccctttgaggccaggtctcagggaacagggagctgagagctgcagggagtgaggctgacaaagcagcacttgtacctatgcgcccacctctgcccagactctgcagtgccctggggattgggaggcttcagctggctccttggggcttgcagtggttttctgtccagtccccacgccgtgcccaggaagagtcttctcatggctccctggccatccgcctgccacctccaccttctgcacaggcagccgagtcacggtgcctacctcacagtactgctctgcacaacctt

SEQ ID NO: 16063 - DNA, 1017 bp, Artificial sequence
  DNA replication origin
gagtcaggtcctccagcagcccagcttccccagcacttgtcaccgccttgcgtggaccaaacgcttcccagcctaagcggggaggatgccaggttcagtctcttccaccacgcgggactaccctcctgggagtccaggtctccctcactgttgctctctaggcctgagctaggtgtgggagtgtcatggggtggtgctcacctgggaacagacctggccagaaggtgggaccgcggtgcatgaggtgcagcatgcagtggggctggcgctccttgaagggcagcttcccactcaccatggcatagaagatgagacctctgggggcaggagttcctaagggtgtggcccctccccagccctcccgtgggccctggccacagggtcggggtgccctgggggcactcagactccacaggtcggcccattgcctggggtcagggctctcagactccacaggtcggcccactccccgctatacttgctgctcatgaggatctctgtgtaggctggggagccgccgaaagtgctgagcggtgagttcctgggccccatgcagcctgtgaagccaaagtctgtacgaggtgtgtggggagggtggcactatgcgtgaggggcaggggtgcagggagagggacttgaggacgccactctgcagggatggctgtggaggtttgcggggttgcatgcagtgtgtggccgacagcaagagtgtgggtgtggatgaggtgggcctggtctgggggcacacggggttaggccagtgacctcagggccgagggtaagggtggcctgcaggccttctgggagggctgaaagcaggggcctggctgggacaagtgtggggtgtgggcccctgcaggtggaggcattcaaccccagggtggggctgtgggctcaccggtcagcttgagaaggccatggagaagaacatccagcaggatgttctcgcacttcaggtccctgcatgggagaggggaggcgggaggtggggctgacctgggctcaagtgggcctctg

SEQ ID NO: 16064 - DNA, 1773 bp, Artificial sequence
  DNA replication origin
tggggctgtgggctcaccggtcagcttgagaaggccatggagaagaacatccagcaggatgttctcgcacttcaggtccctgcatgggagaggggaggcgggaggtggggctgacctgggctcaagtgggcctctgtgcatgtgggcagacgatcggcccaggtgccgccctcactggtgcacgatgcccacgctgtggcagtgtgccatggcactaactagctgccagaagagtccaggggcttccttctccagccctgggcggcagaggtgatccactgcagcctggatgtgctccagcaggtcgccccagggcaccagctccagcacgagccggctgctctgataggtctcatacagctgcacctgcagcccacacacctgccatcacccggaggcagggccaagggtatgctggaactgtcaagggtaccagatccaggttccaggatggggttgggctccagccctggggcgaaagggaggtccaaggtgggagggggcgataggcctggggcaggcagctggctggggaggcggagggtggggacaggctgtgtccaggcttctgcccacatggtcaggtgcttgtaggtagcgttgagtgacagatctcatggggtaggagcttgcgggagaactccaccggggcctcggttgtagagacgatcttgatagctatctgtagggtgaagggcgcttgctgtgtgagatttggcccttgaggggctggctgtggtagggcaggcccctgtcctttatacactttgctggaatcctcaggggggatgctgggtgagcagtgcccttggagggcagtgatgacctccctgctccctcctgtgccaagtactttgtgttcaaggggtttgggaacaggggatggtcagcctgcaggagccccggggaggcctctggggaggaaatgggactggggagagtatcaggcggaggaagctggagcagctggatggtgcctgagtgggtttgggacacggaggggcctgctggggggcactggagccctttggggagggaggaaagcctgtcttaccatggtgtggcgcttgccctgcaggtgggaggacagcttggggttgtggtgcatgcactcgtgggtggcatcggccaagtacaccttggagaaggccccagaactgatcttcttggaggagagcaggtagccattgtccttgcactcacgcacctgctccgtgaaggttctctgatccagcttctgcctgctgctgcccttcatggagggcagtgcatggaagggggtgtggtggtccagtttcaccagtcttggggggcacagctgagacctgacttgtgtcagagggcaggggccagggtggtagggggtgctgggtgggaactgcgtccctcttgaggcagcagccacacttctgaagacttgctgggactgcggcagaggcagggagtgatggggctgcaagctcagggcgggggctggcacagctctggactgggcagggggagggccagctctgggagacgaggtgcaggttctagagtggagaattgagctgtacctgcattgtgccctcaaagggtgcgtcttcttgttttgaggacctgcccactctgaggacatcttgtgggaccagtcctgcccacatggggcccactctctgtgaggtgaaaacccatttcaagggctgcagccagggtgaggcctctgtggacccctatggacgtggctggccacagaaagctgttaaagaaatgagggtggggatttctggggca

SEQ ID NO: 16065 - DNA, 1351 bp, Artificial sequence
  DNA replication origin
cgtgtccccgtcggacgcatacagccctgacgacctccgctcccagacgccggggacgcgggctcggcgcggcgttgcggccgctcgcaagcacacgcccgccctggactcgcgcggcccgcccgccctctgtctgccccggaagcgccagctggaggccgcggcacccggaggggggcaggactcgcagggccctgcgctcgttgggaaagaggcgaccagcggggtcccgggaactcgggacgcgataagagcgatgtgaggaaggaaagcgcccgccgcgcgtccaggctgggcgtcggcagaggcggaggcggcgggagcagcgcgggcaggatgtccactcctggccggagggactgggctcccgctgtggggacggcgcccgggagagcgcagtaccctttgcggatgcgggcgcggcccctgcggcggcttcccacgcgcctgtggccttgtcccctcccggtctcggtgccgcccccgcctcacgcacaccagctgccgcgcgcagcacagccccactttcactccgatcacaaacgaacgccagcccctccgccaggggcaggcctgagtctgtattttgctcccgagggctgcttacaaagccccgcacgggacggctgcccaatgaagccccgggaatggactcaggtgcaggcaacgacgcggataatcgagactgcaaagggagggtggacagagccaatggccgttctgatcctgcagtcatcacttggcttgacactcgcgggcttccagctgtgtcctgccactggtgggagcggaggtgtgccgcaggggccgcaggctcccaggctccgcagcagagcccagaggctcagccaccctgggtcgggaccacctggctccggttctagagtggccgcttcttgcagcccccaccttcgacgaactccaccctgcccccgtgcctctcaagcccttctgacacttaagcaaccaatcccacctgcttaaattgcctggcgcagtttctatttttttcctaatgaaggggtggcctgcccctccacacctgtgggtatttctagtcgggtgggacgagagactgagaaaagaaataagacacagagacaaagtatagagaaacaacagtgggcccaggggaccagcactcagcacaccaaggacctgcaccagcaccggcctctgagttccctcagtttttattattattttcattatttcagcaaaaaggaatgttgtaggagagcagggtgatgagaaggtcagcaaaaaacgtgagcaaaagcatctatgtcataattaagttcaagggaaggtactatgactggacgtgcacttaagccagatttatgtttct

SEQ ID NO: 16066 - DNA, 1043 bp, Artificial sequence
  DNA replication origin
agggtcctgggtgtcgcggggacctcggctcaggtgtgcgccgcgccacagcccggaagagaggccggagctgtgcggctgtgctcctcctctgcgccgctaagtcgtctcggccgcgcgaccacccctcttcggggagcttggtggtccccggtgcccgcccctccgcgggagcccggtggtccccggtgcccgcccctcctgtgagcccggtggtccccagtgcccggccctccccgggagcgcggtggtccccggcccttctccccccaggcggggccaccgggggtcctctctccgggaagccaagcatacgcccggagcctgcaaagccggcgtgccccgggcctccgtatgccttccgtattctctgacgatcgcgagcaggaaggtgatttgtccctagtcacgaggatgactggtcatagcgtgccgggcatagcgctggcagggccgccgggagccagccctcactcagccaaggtgagacttagggggtcggattttcgggcagcgtcagtgcagctgcagtgtgagggtcagaggaaaccactctgcgggcgctggtggctcggtcctacacactctggggaggggctcctttgcctgctcagttggggaagggacagactcataaactcaagtgcagtgaggtaagcagaaaaggggtacgggggtgtggccgaacttagggatgtgagcagagttgggtcggggacagccctgtaggcagggaccactttggaaggggatggtggtgaacgcacacgatgcggtaagaggcaggcagggtagggccggtgataagtcaggtgagggtggtgagttgagtttagagctgttgggtctcagtgcgatgaccatggatggagatgtcccgaagacctcgggtcccggcgaggcgagggctggagatgcgtgtgggaatcgttgtttgcggcatgtttcataggtggtacgtgtttgtgacgtggctgcatggacagtctgggcaccctagggtgctgccgtcagcaggatcttcagtgctcagtctcaggctc

SEQ ID NO: 16067 - DNA, 805 bp, Artificial sequence
  DNA replication origin
ctggggaggggctcctttgcctgctcagttggggaagggacagactcataaactcaagtgcagtgaggtaagcagaaaaggggtacgggggtgtggccgaacttagggatgtgagcagagttgggtcggggacagccctgtaggcagggaccactttggaaggggatggtggtgaacgcacacgatgcggtaagaggcaggcagggtagggccggtgataagtcaggtgagggtggtgagttgagtttagagctgttgggtctcagtgcgatgaccatggatggagatgtcccgaagacctcgggtcccggcgaggcgagggctggagatgcgtgtgggaatcgttgtttgcggcatgtttcataggtggtacgtgtttgtgacgtggctgcatggacagtctgggcaccctagggtgctgccgtcagcaggatcttcagtgctcagtctcaggctctcagggtccccgtgaacaggtgtctctggtctctctttgatgtcagagtggaatgacctgaggctaaggtgtttttgttaacttgaaactgacgtgcaggccgctgtggcttgtggagacctgcacctcgtcatttcccactggctggggttgattgctgactgctgagggacaccagggggtcagaggtggaggctgtggggcatgtgcttgcctgagttcgtggctgtctcctgtgtcaggaaacaggtgctggtgcttagttttctttcccagggtccacagaggcccaggagagaagcctggttgctgccctctgtctcgtagcccccctttcacagagctggg

SEQ ID NO: 16068 - DNA, 891 bp, Artificial sequence
  DNA replication origin
gcatggacagtctgggcaccctagggtgctgccgtcagcaggatcttcagtgctcagtctcaggctctcagggtccccgtgaacaggtgtctctggtctctctttgatgtcagagtggaatgacctgaggctaaggtgtttttgttaacttgaaactgacgtgcaggccgctgtggcttgtggagacctgcacctcgtcatttcccactggctggggttgattgctgactgctgagggacaccagggggtcagaggtggaggctgtggggcatgtgcttgcctgagttcgtggctgtctcctgtgtcaggaaacaggtgctggtgcttagttttctttcccagggtccacagaggcccaggagagaagcctggttgctgccctctgtctcgtagcccccctttcacagagctgggttatttggggtagagatcctctgtctgtgccggtccacccagcttggtttctttggggtaggagcaccaggaaaggctcccgtggctcttgggagctcctagccagtgtgcagagaacatggactgctgcccatcatgagaaatgtgctttcttcactgagcttgaggggccacctggttttgggggtttgcatgagcaccagtgacacagcttggtgtggcctgtattgaggaaccatgttctcggtggactgtgagcagtgggctgtgggattgcatttcccagggtcatcagccttattggtgactttggaagttgattctgtggctgctgtgctgggagagaaggttccttggacctgacgcgtgggtggggcattctgtgacctcccagtctccctgcacacacccagccctgcaggctggctcaccactgcttctgggctattgattcctgtggcctgcacagcctcgca

SEQ ID NO: 16069 - DNA, 1568 bp, Artificial sequence
  DNA replication origin
attacaggcgtgagccactgcgcccgaccccatcaagcatttttataaggctctgatcccatccatgaaggtgcagcccaaaggccccactcttaatgccatcacattgggggttaagttccaacatatggattttggagggacgtggcgtggaagttgtagcagcattgccggtgtagtagagagcacagatttgcccagaggctcagttcagcctgctcggagcgggaggctccctgggtggccgagcctctgcacctgagcacgcaggccccggttcagctctggggtccgctcgggctgcccccgcgtccccagctgaggctgtggctcccttaaggctgactgtgtgcggggccaggatgggtgaagctctgcccacttgtccctgctccctagagctctgtccaagggatgagccacacctcagggctctataagtgccactgttgggtgccatgtcttgagcttgagggacaccgagaggcccggaatggcactggggtgttgatgggtggaggtggggtggtgagaagcgtctgtgagtacaagtggggctggggcgccgcccagccagggcactgcaaagcagtgaggaggtggggtcgagggaggggggactagcctcactgccctcagagggcaggctcccagagcacgtgagacctggtgcttccacacgtgaacggccacagccggaaaagcagatgcagacccagttcagtacgggccgggtttgctttactggctgaatgtggccttaggtacagtcagatctcattgatttggatcagcctgtttgtctaactactggactttggaaatggagggctgttaaaagtccagcttcctgctcaggaaggaatatcttcccagagggagactgagtcacgcactgatgcctgtgtgttcctctgccccagcaggtgcctcctgggatgtcctcgttggcagcctgggtgtggtgctgctggagcaaaagagaggggacatccacaaaccagcctggagggtcttgttggggtggagtggccggttgttggggtggagtggccagatgtggggtggagtggccggttgtggggtggagtggccggttgttggggtggagtggccggttgttgggtggagtggccggttggggtggagtggccggttgttgggtagagtggccggttgttggggtggagtggccggttgtggggtggagtggccagatgtggggtggagtggccggttgtggggtggagtggccggttgttggggtggagtggccggttgttgggtggagtggccggttgttgtggtggagtggccagttggggtggagtggccggttgttgggtagagtggccggttgttggggtggagtggccggttgtggggtggagtggccagttgttgggtggagtgactggttgttggggtggagtggctggttgtcggggtggagcggccagttggcacaagtccctgggatgcttggcctgccctttcccatgtacagggaaccacctggccttgcctgtagagcactacatttattcaatgattttcttgattcagct

SEQ ID NO: 16070 - DNA, 1349 bp, Artificial sequence
  DNA replication origin
caagcgattcttctgcctcagcctcccgagtagctgggactacaggtgtgcgccaccacacacggctaatttttgtatttttagtagagacggggtttcaccatattggccaggctggtctcgaacccctgacatcaggtgatccgcccgcctcagcctccctaagtgttgagattacaggcgtgagccaccacgcacggcctgtacttttttttttttagtagagacagggtttcaccatgttggccaggctggtcttgaacccctgacatcaggtgatccgcccgcctcggcctccctaagtgttgagattacaggcgtgagccaccgcgcctgttcgggtttttgcaggtcacctctttatagccatgtgagaatggacgacagagcctgtgggcctctgggccgccctgtgccggccatgttgcctggtgcaggctgctctcagggtggtggagggaggggccatggtgggtgcatcattggggaggggctgtcaacacagggtggctgggtgccccaggttcctttcctgggttgggcagtagcctactctgctgtgtgcccccgcgggtcccagctttcagtcccagtccttggtgtgtccccagttgaggcaaggacagtgtgtgctctttggatttacagtggaggtggtggtcgacaggagagctgcttagggggaggatgaaggcaggtggttggactctgcggagggttaacctgggaggtggaggtggcttgggggcgtggcagaaggtggtgtggtgggtggcgtttttccttagcagccttggggaggggccgttggatacaagcactagcctagcggcagagactgaggccatgaccactgagctggggacaggagtgtgctcctcctctgacaggggagggcagggcaaggaggtggaagggtcctgggagtgtcatgtgactgggagaccctactgactacccctggaggagagaagccccccgcctcgccctctgcatgttggttgtctggcgcaggataacgctccacccttctggagatgggccgtgagtgtgaggcttgcaggccggcttttagggcgtgaggagtgatcaggtgtacccctcccctcctgcacttgaggcagagagatttgtgcggtttcatcttgtagagacagtgacaggcactcagagtgtctgggtgtggggctcacctgggaccgacctggacggtgtctctccgcagctggcacacccataccgagcagcggtcctgagggccatggagagggtcctgagcagtcgcgccagtgagctggacaaggacacagccagcaccatcatcctcctggcctccagcgagatgacca

SEQ ID NO: 16071 - DNA, 1022 bp, Artificial sequence
  DNA replication origin
actttttgttttcctccccactccaggctagaaaagtgtccgctctctgggcatcccaggacccaggggatgggggcacattcattcacccccaccctctgccaggagccccattcctggcagcactgcccacagccctctgtgtgcctggcaggggactgcgggcatgtcatgggcctggaccttggtttcccctgccactgacagtgggggagtggttggtgggattggagggcatttctgttagaagggggtgtggagattagagatcctgagctacccttagtgccctcacagcccacggcctcgtgctcccggtgtcccatgtcaggaagacggccagccctggtagctggccgggaggagaacaggaccctcgtgcccaggggaccagccctcgtaaagagccagccctctggggccgggggccgttagttccaggcagcaggtgtgggaggacccagtgatgggggaggggcccggtgatgggggaggggccggtgatgggggaggggcctggtggggcccgggcagggcatgttttcgaagcatggagggagtggttacagggctgggctgggctctgtagactgcagggttggtttggagcatttggacccacctgctctgctcctggtgactttgggttcagatcacagggctcctgccaccctctcctcagcccttgcgctccgtctctcctggccctgctctttgataaatgccttcatctttggggcactccttcacaggctctttctcacctgtggatgagggcagggccccttgggtagaagggatagtaactccatgtgacccagttttggctaaaaatgggattggtgacaggatgggggcagctgcatactgagccaggtgtgaaggagcagagagtggaagtgggtgtgggtgtggactcagctaaggtgcctggggcgcaggacgtgccatccaggctgcagggcggagacagaacggggccgctggggcgcctgtctctgtgctgcacgcacatcgcccct

SEQ ID NO: 16072 - DNA, 954 bp, Artificial sequence
  DNA replication origin
tttgagatggagtctcgctctgttgcccaggctggagtgcagtggcgcgatctcggctcactgcaagctctgcctcccaggttcacgccattcgcctgcctcagcctctccgagtagctgggactacaggcgcccaccaccacgcctggctaattttttgtatttttagtggagacggggtttcaccatgttagccaggatggtctggatctcctgacctcgtgatccgcccgcctcggcctcccaaagtgctgggattacaggcatggaccaccgcgcctggccagacaaggcctttctttgcactgggtcagagcccacctgtaccagacccttcaaggcccctcctcagcaaaaagtgactgatgaggaaccttccactgtgcaccctgggaggtagtctgttttcttttagaatttcttttaaatcctctctcctgagaatttgtaaccatggtctgtcctgatgtagttgtagggttcaaagttgttctttgtgttggactgggaagcccttaagctgagacgttagccgtgtaaatgggccgggctgaagtgtcctgggtggggtgaccagtgtcctactgaatgtttgcgtcccagtcaggctgcatggcagtggctctggccggggggtgtggccgtgggaagcagcgcttccctggagcgcagggtctcggctctggtgtggggccagcagctctccacggacccaggaccagcaatatcagttacagtcacaaagcacacacgtcagcacacaaaaaaaggagcattagagcagaaagtcacataatttggattgatgagatacaggataaaaatagcaaggtaaagaggcgaaagggagaaaggacagggtcctacaaggacagagccagtgtgaaaagagaaccaaatacagtctagaaacaaaactgtaaccatttccattaaagagtaaggaggtgggtg

SEQ ID NO: 16073 - DNA, 1389 bp, Artificial sequence
  DNA replication origin
cgtcccagtcaggctgcatggcagtggctctggccggggggtgtggccgtgggaagcagcgcttccctggagcgcagggtctcggctctggtgtggggccagcagctctccacggacccaggaccagcaatatcagttacagtcacaaagcacacacgtcagcacacaaaaaaaggagcattagagcagaaagtcacataatttggattgatgagatacaggataaaaatagcaaggtaaagaggcgaaagggagaaaggacagggtcctacaaggacagagccagtgtgaaaagagaaccaaatacagtctagaaacaaaactgtaaccatttccattaaagagtaaggaggtgggtgtggcagccggttgcagacactgaagagagtgcaccagctggacaggggtctggggacaacccggagggcagccctgagctggcagagagaagggggtgcggggcaggcgtcaggtgagctggccgagcacccccagctacagagcacgagtccagaagaggtgagaagaggcccaggctcaccggcatcatcaaagggagatgctgtggaggggccgccaggagctgctgactttcacagccagtgccagacctgttccctggagccctgtcacctccacccagggcagaaggacgctatggggctggggcagagcaggagtccccaccccctgcactggagagggtgtggaggccctgggtgctgctggtgagtgacaggtgtgcaggggatccccgcgccagcaagaaaggagctgaggaggagggggaggcaggcagcctcttgcccttttctctgtcggggagggaagtgtcttgtagctttagggaaaccactgcagtgttgcagtcccaggatttctgtgcagtgtgtcgctcctgcaggcagcctgccggttccactggaatcctcgtgctgtgccgcctgaccctccctggcctctgtggtttctgcagggtgggaagtgggagctgagccctcccatctcactgtatgtgtcaggccgttgcaagttttgtcgttactgtggtctcacctacccagacctgagcaaggcagaaaacacagaaactaatgctttagaaaataagcagttggcaaaacgttatgttttatacctagttctttgaaataagtgaattaaatacttaagctgctgcctcatcaagagaaaagagagaaacaagccaagtggtaaacaggaggtgaatagatgtgaggacagcgaggggtggcgcggggaccgcggggagatgtgaggggtggcatggggaccgtgagaggggcggtgaggggcggcgcaggggccttgaggggatgtgagaggcagtgcggggaccgcggggggcggtgagggccgggggggggg

SEQ ID NO: 16074 - DNA, 1167 bp, Artificial sequence
  DNA replication origin
ccaatgtctgtggaggggcagggaaggaagcgcgggctctctgtggaggggctgggagaggagcgcccgctctctgtagaggggcggggaggggagcgcccgctgtctgtggaggggcggggggggggagcgcccgctgtctgtggaggggcgggggggggagcgcccgctgtctgtggaggggcgggggggggagcgcccgctgtctgtggagggggggcggggggggggagcgcccgctgtctgtggaggggcgggggaggggagcgcccgctgtctgtggaggggcgggggggggggagcgcccgctgtctgtggaggggcgggggggggagcgcccgctgtctgtggaggggcgggggggggagcgcccgctgtctgtggaggggcggggggggggagcgcccgctgtctgtggaggggctgggaaggaagcgcgggctctctgtggaggggctgggaggggagcgccggctctctgtggaggggcggggaggggagcgctcgctctgtgtggagtactctgtagagggtcctggagaggagcgtcagctctctgtggaggggttgggaggggagcgccccctctggaggggaagggagggaagcgcaggctatctgttgaggggttgggaggggagtgcctgctctctgtggagtggcccggagaggagcgcccgctctctggaggggaagagagagaagcgcaggctctctgtggagggcctgagaggagagcgcctgcagcttccacacagaggggctgctctggtcagtggtccttggggaagggagcctcagaggcatggggcgtgtggcagccccacagaaagtaaagcatctgcgtcagcagcatgcactcagcctctggtggtagaagtaacccttgaggcaggtgctcttctccccatttacctgatgaggttggcatctgaagtggaattcttagtgcccatgctcttgttagagatgggtttttccattcagaagttcaacatttcatgggattaaccatgctcaacttccctttgttaattcatcaatcacatttatgcttttcagcgttcactttgttttccccatatttcattttccttgaagttctttctctgtgcatttacgtatgtacaaatgcatgtacgcaaggaaatattttaaccaaatgac

SEQ ID NO: 16075 - DNA, 1585 bp, Artificial sequence
  DNA replication origin
tctgtctcaaaaacaaacaacaacaacaacaaaaaaaaacacaaaaattagctaagggtagtagtgcacacctatagtcccagctacttgggaagccgaggcacaagaatcgcttgagcccaggaggcggaggttgcagtgagctgagatcacaccaccacactctagcctgagcgacagagcaagatcctgtcaaaacaggggaggggaagggaggaggggaggggaggggaggaggggaggtgagggggggaggggagaggggaggggagagcagaggggagggaaaaggggaagcgagaggggaggggagggaagaggggaggggaggggggacaggaggggagaggggaggagagaggggaggggagaggggacgggaggggagaggaggggaggatggtaaaggaccactgaagttcagtgaagttcagaatttctgttaatcaaaatagtatgaattgagctggaaggacagccactgtggtggacacagcaaagggtgcagggaattccaacaagttgatgagaacaagactcatcaacagaaagacgaaagatgtgaaaaaaaatctcaagggccaacacccacgcaacgccactgggcttccccgctggccagagagacacaggatgacggcctgactggaataggtgcaggagtccggtgcaaaacctcatgggagtaaggatgctggaacaggtagaatgcttggaggctgctggagaaactggcatggggactttggaaaacacctcggcatcatctaaaaggcagaggatacacacacctgagacccagcaagtccatctcgggtaatgttcctgcaccagaggagctctgacatatgcagggcggcctgtttatgacagcaaactgccaagagcccaagcacacaccacactaggataggggctgacggggcgctggcttccaagccatggggcaagacacagcaatggaattgagtagacgggcactaacacagccacccagaaggatcctgggccactaacgcagccacccagagggatcctgggccactaacgcagccacccagagggatcctgggccgctaacgcagccacccagagggatcctgggctgctaacgcagccacccagagggatcccgggcctctaacgcagccacccgagggatactgggccactaacacagccacccagagggatcctgacaatgccctactggataaagaggtagggactcacacaatagcagcaaaactaaaacaataaggtctggtctcacaaaaattaggcaggtgtggtcacgcacacttgtcatcccagctcctcgggaggctgaggtgcaagaatcgcttgaagccgggaggcagaggctgtagtgagccgagatcgtgccactgcactccagcctgggtgacagagtgagaccctgtctcaaaagaaaagaaaagaaaaaacaacaacaaccaacaataaggtttggtccctgtgagagtcagtgactgccgtggaggggctgatgggccatgtgttctgagaactttcagcctggatagattgagcattcccttatctgaaatgattgcgacccgat

SEQ ID NO: 16076 - DNA, 835 bp, Artificial sequence
  DNA replication origin
ctaaaggtggctgcatgtgtcctcactgaagtccagcatgggccccaaatgcaggctgaggtctgggtctggctgggctgctgggcgcccgagtcatcatgaccattgttcctgggcacagccggcgttgacttgtatttcctccgtgattaccgcctggctcatcaatcactgttttcgttttccgtggaggcgtggctcacacaaagggcaagcacggagtcactgggtcctgcaggactttccaggtcaaggcagaggaggtgtccggtccccagcaggctcctgtgtgcccctcagtcccctagagggtcacggccacctgaccgccaccactagaggttttggcgattgtgctgtgtggtgggtcttcccggcctctgcttagcacagcagtgctgctgcccatccttcctccttgccaggtagtgccgggtgctgctgcccatccttcctctgccgggcagtgccgggtgctgctgcccatcctttctccttgccgggtagtgccgggtgctgctgcccatcctttctccttgccggacagtgctgggtgccgtgtgggctgcactgtgtgtgtgtttctaggtgatggacattcagattgttttttggtttggggctgctggggatggcgatgctttgaatgttcctgggagtgtctgttggtgggtagagcatgcatttctctttcgtgtgtatataggagtggaatcaaggccgggcactgtggctcatacctgtaatcccagcagtgtgggaggctgaggcaggaggattacctgaggtcagaagtttgcgaccagcctggccaacatggcaaaaccccgtctct

SEQ ID NO: 16077 - DNA, 1430 bp, Artificial sequence
  DNA replication origin
gcctgcggctgcgcatctgccacgggaaggtacgtggggcgccttgggggtgaggctgcagcgggaggggcccggctcagccactcagccagccttgctctcctgcagccagtgacgcaggtgacctggcacgggcgtggggactacctggccgtggtgctggccacccaaggccacacccaggtgctgattcaccagctgagccgtcgccgcagccagagtccgttccgccgcagccacggacaggtgcagcgagtggccttccaccctgcccggcccttcctgttggtggcgtcccagcgcagcgtccgcctctaccacctgctgcgccaggagctcaccaagaagctgatgcccaactgcaagtgggtgtccagcctggcggtgcaccctgcaggtgaggggtgggggcggtgcaccctgcaggtgaggggtgggggggggggcggtgtaccctgcaggtgaggggtgggggtaggggcagtgcaccctgcaggtgaggggtgtaggtgacgggcagggcagtgcaccctgcaggtgagagcgggaacacctgcatcacagcctttggccctaggtgacaacgtcatctgtgggagctacgatagcaagctggtgtggtttgacctggatctttccaccaagccatacaggatgctgaggtgaggaaagctgggggtggaggcggccagcagagcccctcccttcagcccgagcctgccttcaacctggttccctccccccagacaccacaagaaggctctgcgggctgtggccttccacccgcggtacccactctttgcgtcaggctcggacgacggcagtgtcatcgtctgccatggcatggtgtacaagtgagtgctgaccctgcctggccccctccccagggcagtggtgtctggccgtgccctgagccctcctcgtccccacagtgaccttctgcagaaccccttgctggtgcccgtcaaggtgctgaagggacacgtgctgacccgagatctgggagtgctggacgtcatcttccaccccacccagccgtgggtcttctcctcgggggcagacgggactgtccgcctcttcacctagctgttctgcctgcctggggctggggtggtcgtgctgaagtcaacagagcctttaccctgtgctgcctggtgctcccaccttcttgaattggggttgccaacaaagccgcccccaccacagcgccgagccttcccctcactcaattttgcaaaaacagtggggacaacacagccagtccagggcaccctctggcccatcccctaagaggctcagcatcgcaccctgtcagtcactcgctgggagcagatgagtttattgggcacatccctcactgaagggcttgggtttggtccccagcagtgcctgttctggggccaggcccctccagtcgtgtgcccaggctg

SEQ ID NO: 16078 - DNA, 2334 bp, Artificial sequence
  DNA replication origin
ccccaggctggaaggagcgagggtggcggctggcaggggctgcaaccaggaatgtacgtccaggaacgtggctgttctgcctggggaggggccgagggcagacggtggggggtcccccacagagaggtcttggcttctgcctctctgtggaatgggtcagttggggtcttccccgagtccccgtcttatagctgcccacttctgcctaaggcccctgccaggggagggagcccgtgggtgatgaggtcatccctgtctgtggctgcccagagccctggccaaggaatccagtgaggggggagctctggggttggcaccacttcagtggaaaatgtgaaggtgcagctccggcgcctccgagggcgggggtgggggcagcgtggccgccatgccacgtcagaccccagggctggggaacaggcgtaggtcagggccagtgacctcagggcacttgaggctgggcctgcactccccctgcaaccccctcacctgctcccctgggcggcccgaagcgggggtgggccttgtaggatcagatgccgacatggtggcccccggctgcaggacatccggaacacggtgggcaacgtgcccttggagtggtacgatgacttcccccacgtgggctacgacctggatggcaggcgcatctacaagcccctgcggacccgggatgagctggaccagttcctggacaagatggacgatcctgactactggtgagggctggtggggtggggccagcagccggggtgggcccgaggggtggggcagggctggcggggtctgactggcggtctccaggcgcaccgtgcaggacccgatgacagggcgggacctgagactgacggatgagcaggtggccctggtgcggcggctgcagagtggccagtttggggatgtgggcttcaacccctatgaggtaggtggcaggggctggcccctgggcggcgggggtcctggaggcaccagcagggcctcagccactctggcccacacgcccacatcttctcccccagccggctgtcgacttcttcagcggggacgtcatgatccacccggtgaccaaccgcccggccgacaagcgcagcttcatcccctccctggtggagaaggagaaggtggggcacacagcccctggggcttggcctgggctgaccgccccgcactgcccgtcctgacccggctgtctatgcaggtctctcgcatggtgcacgccatcaagatgggctggatccagcctcgccggccccgagaccccacccccagcttctatgacctgtgggcccaggaggaccccaacgccgtgctcgggcgccacaagatgcacgtacctgctcccaagctggccctgccaggccacgccgagtcgtacaacccaccccctgaatacctgctcagcgaggaggaggtgggcctgcatcctgggggccgggaccctgtccccatgcttccctgtgaccctccccacccctgtgtcttggtctccacagcgcttggcgtgggaacagcaggagccaggcgagaggaagctgagctttttgccacgcaagttcccgagcctgcgggccgtgcctgcctacggacgcttcatccaggaacgcttcgagcgctgccttgacctgtacctgtgcccacggcagcgcaagatgagggtgtgtgggggtggcacaccaggggggtggcacagggggcaaggctgacctggcgctctcctgccccaggtgaatgtagaccctgaggacctcatccccaagctgcctcggccgagggacctgcagcccttccccacgtgccaggccctggtaagtggagactagggggctggggttgcaccctcccagtctgactcctcactgccgccgcctcctcaggtctacaggggccacagtgaccttgtccggtgcctcagtgtctctcctgggggccagtggctggtttcaggtgggtccgagctgggggcagccttgagctggggggcaggtgggatggccaggtgttgagagctgtctctgccgcatccaggctctgacgacggctccctgcggctctgggaggtggccactgcccgctgtgtgaggactgttcccgtggggggcgtggtgaagagtgtggcctggaaccccagccccgctgtctgcctggtggctgcagccgtgtaagtggaggccctgggggctggggagccaggggtggcactgtgcttaggggccgtgtctgggcctggctcacagggaggactcggtgctgctgctgaacccagctctgggggaccggctggtggcgggcagcacagatcagctgttgagcgccttcgtcccgcctgaggagccc

SEQ ID NO: 16079 - DNA, 1038 bp, Artificial sequence
  DNA replication origin
gctcacggcctggccggccccctggccccccgcccccggcccgccggccccccgccctccgccgggcgccctggaggccgcagcgcgccgcgtgcacgcgacagggtttctcgtcggagcccgagctgtcgctgccgcggtcctcgtcctccgacagcgggctcacctcggggtacaggtagcggcccggcggcgccgggcgcagcgtggcgaaggacatggggccggcgggggcgcggcgtcagctctgtcgcgcgctgctcatgccgcctcctgcggccgccgcgggcctcgcgggccggccggggcgaggcgcggggtctcggctgcgccccgcggtggcagctgccgggcgtcgcgcgcacatgtgcgtcccgggccggagcggggccccgagctgcgcctttatagcggcgtcccggcccctcccccgcgcacgccccgcccctctcagcccggaggctcctcgagcagcgcccgccgcgtccctcggccttctgtggccacgctttggcgggggtggggggggcggggctggtctttgggggcatcgttccgtctctggggatgcggaggaactgggaggtcgcttctgggctgtagttactcagggccccaaaactgcagtgccccccgtccccgggagaggggaggaacccaccaccccgttttctcccgtggcacaactgagttaacccagccgccctggccctgctgcctgaccgcaccctgtctgtctttgcctcccatgtgcgccagcgcctgcctgtgccaggccgtgtgcagggggcgggcacaggcgagtatttaggggcctagagctcagtctctccgcctgtctgtcctgcacctgcctctccaggcttggcacagactgtgccttctgctagctggccatgtcccctgttcttgtgctgtgtggacctctcaccccgtcggtctccttgccccttcctccttcccccgttcctctccagggccaccaggcccctcaggaagcacacacatacccccattatccaatttggggatggcccc

SEQ ID NO: 16080 - DNA, 1442 bp, Artificial sequence
  DNA replication origin
gggccggccaggccgtgagccccggcagcggcacacggcgaacgcgcgcgagcgagaccgcaccaacagcgtgaacacggccttcacggcgctgcgcacgctgatccccaccgagcccgccgaccgcaagctctccaagattgagacgctgcgcctggcctccagctacatctcgcacctgggcaacgtgctgctggcgggcgaggcctgcggcgacggacagccctgccactccgggcccgccttcttccacgcggcgcgcgccggcagccccccgccgccgcccccgccgcctcccgcccgcgacggcgagaacacccagcccaaacagatctgcaccttctgcctcagcaaccagagaaagttggtgagcacgggccgtggggcgccgaggggggcctccaacgcgcccctcagcccacacctgccaggcagaggaggcgaggccacacgggcagggctccccaacagggcacaggcaggcacacctgtaacacaggcctgccgggggctggggccttctcctggggctcctctccagggcgtccctaggacactcggctcccagtggagtgtggagtcccctgcagggagctgcatgaggggtaagagctagggatggccaaaggggcccacccagggcggggaggctggggagctggaccaggccgctgcaagcttcccttttcagtaagttgaaaggcggagtgaaaacagctgagttcagaaagtaagaggctgcaaggcaagagaggaaggaccccgggttcttagcccctgcggcccagcactggcttaagccatcttgggcacctgctgtccgtcccccacctaggccgcacaccaagacaccaggtcctgtagggctgcccgagacgtgggccatgggacacgaaggcagaggctggcaggagatgtgggggctgggggtgagggcccctgcaggagacgctggccagctgtgatttacagctcctgctgtgcttggtggcaccggaaaagcagggtgagcagggagaaaatacggcacggcttttcccaatccccatttcctctccagacagcacgcgcgagctcctggggcctgaacatctgggaaatttaattttacaatttcggctgtgcagcagtatgctcccctccccaaaacgcttgagggaagctggggagagccgggaaggaggtgccttggcgctggccacctgagatggcacccagcagggaggccagagaggcgcagactggcgctgggctctgccggggcctgacactcctccctcccctctgcagagcaaggaccgcgacagaaagacagcgattcgcagttaggaggtggccggcagcagccaggaggcagacgctgctgggggaggtggacgcccggggtgactgcagacagcccccaccttggacctgagctgggcaaggcccaccgcaagcat

SEQ ID NO: 16081 - DNA, 2331 bp, Artificial sequence
  DNA replication origin
ggccggcagcagccaggaggcagacgctgctgggggaggtggacgcccggggtgactgcagacagcccccaccttggacctgagctgggcaaggcccaccgcaagcatgcccccaggccagccctggctgcgagcggggccgagggacagacggacgtacagacaggcgccggcagcgggactctgcgctggccccagcacctgcccgggcccactggaactttctgcgctggcttttcttccggccactgtgtgatggcatcttgtgtttttgatatgataatataaagtctgaaaattttgtataattaaaaacaaaacagtatcttccaaatatggaggccaactgtcctcatgaaaggttcagaatccacccccagcccccagcctgagcctccattcccacccttggtggtcccatcctccttgggccaagtaccccggctccctgggaagcccccactttccaggctcagggccacccctccctgggctgaggcggtgaggatgggcttagctcacccacagagcctcatatcgggaagctgtggggtggggacaagggagccacgccgggagagagggtgggggaggagctgcgtggcagaagatggggagggcgaggcacaaggcagggacgctgtaaggcagggacagggaggcagcggcagggacagaggcagcagcagggcaagggtgcccccgactcgggcctgtcgggcacccgggggccctgagggtgaggagggcgctgcaggtggccacaaggagtggagcgagctgtgctgcccagcggaggggggggctcccagccccagcgagggcagtgggtgtcctgcctccacgagccttgactggagagaggggcatctcctcatgcaccagtgccacttggcccctggaagcactgcccacgtgggaaggaggacccctggccatcctcctcccaccaccacggcccatccagccccctgaagaccccgcccaccacaggaggtgggtttagcccccacagtgctctgtgcacagctggctggccattaaaaccctgcaggtgacaattaccattgagtggtgtgagatcagtgggcacagagagaagaagggcggtgctgtgtggaccacctccccccaaccctgccaggccacagcctaacttccggctgggtggacaatggctgatggtgccaggtgcgggcgtcagggcggcggccggccccagttccccgctagcacaggcagggacgcaccctcggggggagaccaggtgctgtggcccacgtgggcatcggtgcagggctggcccaggactgcccctcctctgcaaagacaggctccagggaatggcggagcaggaagcagtggtgtaattttggaggaaattctcaaagccagagccattaagggctagaggggggctgagtccaatctgatagaaatataacaggataaaaagtcacaacggcaggtttcgttcagagagaaacccaaccccaaatttcctctccctaatcctgcaggagcccacagctggccagagggaggggaggagaggacaagctcagtcactgcagaagcctccgcccgccgggaagccagggcccgggggacacggacatgcagctaggggctgacgcagccccttcccttcttgggagctttcctcacacccccgccccgccaccctcccaggcaccaaggcgctggtgagtgaggagcagggtggacccaggagcatggccaggccgggcactctgcatagcaccctaaggcccacggcgcccacgccagccctccctccactgggcactgggtgtagttctgtagggagggtccatagcccacctacccctcacctccaggcctcccatttccagacctgggcctagtgggggttgcaaacctccacatgaacccccaacctcagtggccggtcaacgttggggacaaatgggatggaagatagtgaaagtctccagggcagggacatcaggggctgctggcctgagcgggcaggtgcggggcgtcggcggccggcaccaaggacagggcagagccagctcagagcgggaatgcaggaggccagacaggagcaggtgggaaggtgcgggccagcatggggaggtctgggcagggtcaagagggagtgcaggggaaagagacgtcagagcccccgtggactggggtcagagtttggggtgtctaacgaggctagaagaaagtgaacagggaacaacgacctggaggcctcggagctgaaaggatccccagggccctgctggttggggtgcagcactcacagccaagccctccgctgcgggcctgactccg

SEQ ID NO: 16082 - DNA, 2339 bp, Artificial sequence
  DNA replication origin
ggccggaggagccgccctctgctgtccctttcctgtgccccgtggtgctggcctggggccgtcccccacgaggcctccactggagtctggagtctggggctggggtgcagcctggcagctcctcggtgcccctgaccctgcctgggctgtgagtcaggttcccgcagggatgcagccgggcctgtctgcgtccagagcccgtggtcccctctgctctcgcgccaagcgccgttaatggcttctcccagctactgaaccggcagctgcctccagtgctggcggcctccgctcctccgggccgcccccgcccccgcgtcctggccccgcgcactcaggcttgcgtcgctgctggcggcgcggcctcggctcaggtttcccggcgagcgaacggccctccccacgctgcttgtggagggcgcccgggcctgcagaccgccccaatctccctggcggccatccacccccgcggccgcctgcatgcctgcctccgagggggctgctgactgggctggggctggccctcgggtctggtccctttccactgaggagggaaacgggcgcgccctgctacccaggctgtgggtgggtgtgtgtagcctgactgccgcgtgccccttggccggcttgaaggccctcctaggcctggcctgctgcactcagttgtccggtttgggagaggagagaccctggggtcagtgatgaggggcagggaagccagggccctcatgggggtaccctgggctctcggatgaagcagggctgggcagtggctggtaggtgggagtggcctcttcagagccgcgtcctcctgcttgtgggctgcaagggtggtgggggccctggcctgctgtgcccactcggggccagtgtccttggcagctggaacccgggtgggcagcggggggtgctctacagggctcttgagcggaggctttgccctggggctggcagagcagcctgtggagtggagccggggaaggcattggagggcaaggtctgttgggcaggtggtgacggctgcaggctctgggccctctggggaggccggctggggagagctgggtctgggtgtacgtcccaaggccggggctgttctgcaggggacgggagtcccaggtacgtgtgtgtgcacggatcaggactgggggaaaagtctccagaatgagattttggaggtgtccggagttgggggctgagcgggtgtggacctctagagccctgtccccaccccacctggaagttgtagctctgagttgtggggctcagagcaggccgaggaggggtgagcactggtgggtgtcggtggggggtgtttggggtgtcatgccccaagcctgtgccccacccctagcatcctggtttctgggagcccctgcttatgagatgccaggcgttggggtgctctgcctgggaacagctattgtccctgggtcagccccagcagagaccgaggcaggccaggtctggaggaacccctgggtcggtagtggcttctctccagcctgcagacccccaggaggtgacttgctgccctcccagctgtggaggtgcaaggacccctgggtcagtagtggcttctctccagtggtggaggtgccgggagaaggccgagctgtgtgcccagcctctagaagggcagatgcgtggttggcgggagccgggccggagctgagggcgtctgggctggtggctcctcctgcctggggccccaccttgggctgggggttcgctcagctggtttggactttgaggaggaggagactaagcaggacctggctttctcccctctggccccggcgccagggcccagcacccctgctggaaccttcagtagggtgagatgcagcaggtgagcctcccgccctggccttgccctgagcacttcaacagataaaaccctgaggaagaggaggcggcctcacgtcgcacaggaaggccgtgtggcgctccgagacaggcgggcgttttgtgcaggggagcggcgcgaacgctgaacactacccgcattgtaatcggagaggggctggggaagagagagacggagcgagggcggctgaccccacgctcccgggggacaggtgggagaggcggaacgaggagagagtgaaggattccagaggtgggccggcttcctctctcgcagacagacacgggaggaggcgggcagcgggccagccccatacctgcagttccaatctgtggtcctgacagctgcagccactttggggagggggagggaagggggctcatcgagagcggaaaaatcccagccgacacatcagccggttgcggcctgtgtccggtgcagtctgggctgggggcctgtccttggggctggg

SEQ ID NO: 16083 - DNA, 1320 bp, Artificial sequence
  DNA replication origin
cctgaaggagctcttcctgcctgcctgtcaggaactgtccccggggggcctgggggagacacgcgcccccctccccccaggttcttcccccatccttcggctctcttggctgtggctgcaggagccttggccgcccgcccgatccggtctctgctgcgcgttcagagaacagagacaaaacaaaataaattggtttcctggccggagcagcgggctcactcagagcgggggggccacgccgcgcactccctgcctgtctcccctccccctcccaggggctctggctgtcggcagccacatcctgtcggctacttttttatatttggtattttgagaaatcgatgatgattgtaaacggagcgcggaggccgggggaggggcctcggcggggcctgtgggaccctgctgcccctgggggtgctttgccaggcctgtccagtgccaccgccgcctgccgggtgggcagccccctgctgtgctgggaggaagccggccagggatgtgggggctgcttcctccagtgatgactatcccatatgttggtctgagtgacagcgagggagcccgggtgctgcccggtgctcctgccagcacagccggccagtggctcgagggggcggcagagctcagctttcaggagccaggccaggcccggacagatgcctcccgtccagagaagtgcgcatctgcctgggcctctgttcccttggagcaaagtggggtggccctaggggagtgatttggggccacaggtgggcaggaaagaggcttgggaggtgggagacagcctgcagctctcccatgagacagtggggtgaggagagcagggcccgtcaggcagccccgtgtccttggaggtggccgtggcaccaggaccatggtcctcctcggcactgggcagagctggctgagagagggccgacctcactgccggggcccttcagggctgtggagagggcccctggtagcagggcagggagggcgccgctggggcgtgtgctcctgcgagcggcgatctcagctggagcgcgtgggtggcagtggctgtgatgctgagaaggtctcgggccaagctcctgctggtgggaggtgcctccctgccaccccctgcccacctacctccccttctcctcaggccacttccctgcccttcctgggtctggatccagggcctggacctggatgacactggggcttcagggaccccctgctggacgctgacttttgaagacctgagcagcccctcacaggagagctgtactccagctcttggtgtcttattcccctcccccaggtgcgcaggcagcagcgagcaggcgg

SEQ ID NO: 16084 - DNA, 879 bp, Artificial sequence
  DNA replication origin
ggctctgggggctcctgtggcgtctgcagggtggctgtgggctccctgggcgtggcgtgcatggtctgggtgggggtcatggtcggggtgggggtcacgggcatgggtggtgcccctgtcgtgtgtgctgtggggtgggccacaggttggctgggggccaggcgggcagaacagggccagggccacctcctaatgtcctgatgttctgggcagtggtggcccttcccttcccctggggtccccctgccccccacccctggtggtggctgatgtgggctggggccgttgcctctggacctctgactgagtcccaggagcacatctcaggaggggcaggaggtcggctgtttctcataaggagcttgcaggcgaagggggatgcgtgctgctgggctgggctccaccagcgtggagaggctggcaccgggctgggctccgccagcgtggagaggctggcaccgggctgggctccgccagcgtggagaggctggcaccgggctgggttccgccggcgtggagaggctggcactgggctgtgtccaagagcagatttggctgcggggggctgccctcatttgggaggggctggaagctctgagaagctctgaagccagaggcagtgcctgcctataccctcctcagtgtggcctggccccagggtaggactgtggtcccagtggagcacctgggtgtgaggcagagtctcctttgggccctgggggctgtgggggaaggagaaggctttggtgtagggccttcctgaaggagctcttcctgcctgcctgtcaggaactgtccccggggggcctgggggagacacgcgcccccctccccccaggttcttcccccatccttcggctctcttggctgtggctgcag

SEQ ID NO: 16085 - DNA, 2393 bp, Artificial sequence
  DNA replication origin
atttttaagttaaaaaaaatacgttcaatgccccacagcatctgcctccaaaatctgaaggggccttctaggtcaggcagttcccagcagtggccgcccctgcccgcaccgcccctgcccgcaccgcccctgcccttcgggcgctgggcctggctgagcgccgtcgccccctggtggactctgtgccccacagctgtcccacggggatgctgcgcccctgggaacccagcaccttcgaaggccacctctgccccctgcccagagcctgcctgtgccgtggcctgtccacatccagcacaggggccacggggcacagagcgctgggtgacaagtcttttgtcacctgccaggaccctgggactgcggcccatgagcagcgaggctgggactccagcgtgcggtgcttcagccccggccactgtgaggggtcgggagcccagcccggtacccgtccgcagaggccaggcgggggcagccgaccgcagccgggtgtggaactgcccttgtgcgcgtctggggcttggggccggggtcacggatctgctgcggctgtgggggctcatgtgctccaggcaggggcaagagctccgtgtcactgagcgccccaggccactgtcagcagcagggggagacgtggaaactgaatccttccttgttcctggcctgggaaaaaacttagtctcccatctctctttatattgaaggaaaaaacaggcaggggaggagcccgggccggagagaagaggggctcggggtgggggcgggggcgtgcccgccttcgctctggggttcctgcgcccgagcactttactgcccccacgggtgagaggtgggcctgttttccccatcagccttggttccgccagtaaacccgatccggttggagccatcctcacctccgcagtcgagggcagaatctgttttccaggttgggatgtgaattctcagtggcgcccactctgtgacccggcgggatggggtcagcctgggctgtggacgtggtgggtgggagaacgctgggcaggccttctgagtgttcggggccctctctgggccctctgctggctggactgggcgggacgtggcccccgggatgggtggacaatgtgtgtcccccgccccttcaagagcattggccccagtgaccctgctgcgacggctgcgtctccttcttccccccgaccatgctgcccccgtcccaggcggggctcggcaggagcgccatgtggggcccctgggaggagtcctgtggctttgacatgaatgggggtacgggtggttggcggtgggtcttggtcctcagctggcggctttgctcctgactgccccagtggcttccgtgtctagcctgacacccgtgtcagcccagggacagaggccccgggaggctgcagtccagccctcacagaggacagggccgtgggcaggacctgcggcgccgggtgccagccacagcccccagaggcccccttagagctgggtgttctcggccttgtgctgaggcctgtgccaggctggagctgctcagagatttcggggtggtgggcttcctgggatccccccaaggtcaaagggtaccctgtatcccctgaagtgaccattttctctctctctctgcaggccagcactccttgcccgaggacagagatggcgagcgcccggattggggatgagtatgcggaggacagctctgatgaggaggtaggactggggctgcttcccactgggcagggtggggcggcttccatcacagcctagcaggtgctgggggttggggctggggttgccctgggggtgctgggacctgccgcaggtgggccgcactgttggagccgaggcccacgtgggcgtcctgcttccccatctgcaagagcaatttcggggtctgggacacaagactgcaatgtatgtgtgtcatcatggcttgtgaaggggaaggacctgggtgtggctccatgcccctgtgtctggcctgtggacgggctctgggggctcctgtggcgtctgcagggtggctgtgggctccctgggcgtggcgtgcatggtctgggtgggggtcatggtcggggtgggggtcacgggcatgggtggtgcccctgtcgtgtgtgctgtggggtgggccacaggttggctgggggccaggcgggcagaacagggccagggccacctcctaatgtcctgatgttctgggcagtggtggcccttcccttcccctggggtccccctgccccccacccctggtggtggctgatgtgggctggggccgttgcctctggacctctgactgagtcccaggagcacatctcaggaggggcaggaggtcggctgtttctcataaggagcttgcaggcgaagggggatgcgtgctgctgggctgggctccaccagcgtgg

SEQ ID NO: 16086 - DNA, 1414 bp, Artificial sequence
  DNA replication origin
cagtgacacggagctcttgcccctgcctggagcacatgagcccccacagccgcagcagatccgtgaccccggccccaagccccagacgcgcacaagggcagttccacacccggctgcggtcggctgcccccgcctggcctctgcggacgggtaccgggctgggctcccgacccctcacagtggccggggctgaagcaccgcacgctggagtcccagcctcgctgctcatgggccgcagtcccagggtcctggcaggtgacaaaagacttgtcacccagcgctctgtgccccgtggcccctgtgctggatgtggacaggccacggcacaggcaggctctgggcagggggcagaggtggccttcgaaggtgctgggttcccaggggcgcagcatccccgtgggacagctgtggggcacagagtccaccagggggcgacggcgctcagccaggcccagcgcccgaagggcaggggcggtgcgggcaggggcggtgcgggcaggggcggccactgctgggaactgcctgacctagaaggccccttcagattttggaggcagatgctgtggggcattgaacgtattttttttaacttaaaaattagaggaaaaggccaccaaaaccctaacgacacagacaacggaacatgagcccacgccacgctccggactcctggggacaggaccccctcccgccacgcccatgcctggagtcagcccggattctccagggtctccagcaccacccgcagtgtgcgtggcctgactgaggaggggtcgggcccgatggagcacgagagttgcgtgagggtgaagtaaaagctgagagagtgggcgggcgagcgccactgggcagaggcaggcgggtctgaaggaccgacgggtgggcagggagccgccgagggggagcgcaaggacgaggtgccagcaggatgcggggccgctggggccaaggaaaggctgctgtagtccctgaaccctgcgtggcctctgcccagccccagggctagaatgtcaccatgaggaccaaagggagaaacccacagtgggctcagccagacagaaacggtgtccaagcgcatgagccccctattgtgaccacaccagagcctcccctccccagcatcaggccagccaggccgtgccccactgccaccaaccaggcatgagacacgggctctgccctcacctcctgggagaggatggcgacagagctgcggtgtcccggttcggtgggaagagaactctgctcccagggctgcccacaagagggttctgctggagacgtggacagcaggagggaagcagtcctaacttgcccagagaccagagccagaacatcgctgtcggggtgccaaggacaccaagacaacccagcgctgcaccacagaccccacacccagcacctcagcacggcc

SEQ ID NO: 16087 - DNA, 1224 bp, Artificial sequence
  DNA replication origin
ggctgccccttctcttaagaaaccaccattcaaaaactctgtgcgagtttggatatgtctagaacatcctggaaagagacttcagcactggaaacagtagttgcctggatgcagcaacaggagccaggagggaagggtaggagactcgttccctggcacacccctcaggagcacctgagcatccaaaggtgccctagaacaccacgtgcagctgctcactgaatgccacgtaattctacacagtccttagaaaggaggcagggtcgtgtgcatgtcaatgctaaaggcctgagggcagaaagccagagggaagcctgtggcccggccctgcagccagaagcacgcccaccctgggtccacccaggcaggtccggagcccttggcaggtcgccaggtctccacaggggccgccagcagctgacccccagcagtcaccgggctccccgctacaagggcctcccactgtggggctctccgcaggacgccccgggccggtctgggttggtttggggcacacacttggaatcagatttatggaggaggctctctgaaggtgacccatcagccacatcgctgccaggatggcagagatgaacaaaagccgcagctccctcccatgccagtcacacagccccttcttcacagcaccatcggggccgggtatacccaccaagggctaggcggcctggggagtgaggccctcgccctgcctgacttcgtgtgtccctgaggtgtccgtgacatgacacatgcatgctgcctgatgcccagccccatcccgccactgttccagtctgatgtgatgctgtggctgggatgtccttcagatgcacgaggcagaggccacaggggccacgtcttgccaaccactgtggaggaaacagcgacaggagggagtggggggacaggcagaagcacgtggcagaagagaaattagcaaaaacatcatctcgtccttcaggggctgccaggcagacattaccctcacttaccaagtaacccaccgaggcccatgaaccatctgcaagaccacacgagtggccgtggccaggaccacagaatcccaggtgcgcccactgcagggcaaggacacttagcagcaggagaagctgctgtgtcactgtggtgtgaattcccagaaccaaggggcactgattctagaagccgctcaacggaagggttcttgggttgaggacccacaaccactggcaggggcatcggggg

SEQ ID NO: 16088 - DNA, 825 bp, Artificial sequence
  DNA replication origin
gggattacaggagtgagccactgtgcctggccttcaactgcttcctaagagtctaagttcttgttccaccctttaaggccagtgaaggacccgaacactgtgtgtgccggtgtcacgcagccagcagggctctgctcagaggcagctgtggtcctgctcagagagaggagtgggtgggttggtgcgtggttgcggttagagtctctatcattcctgtgactcttcagccaatcctttcaatttactgatcaatcgttggtcccaatctggttaaatgaggaggcgtctgcttcaggtggtaaaagccctttggggacccatttctcttccagcccccagccccttttctagtgacctcttggctctggggccttggatgccagggtgaggtgtggagagggctcaggcaggctgtctgagggacccagtggagtccagcccagcctgaccccacagggcctccggagtgtcagtgggtggtagagagcagtgttagttttgcgatgagagctgagctccaagaggaggaggttgtccttgaaaagccccttccctgtgaggtgctaggaattaaaatgtcgatggcaaaggcaagaggctgtcttgtcagtggaggtagaagatgaggaaggctcaggttgggtggatgcttttggtggaagtttgtgactggaggggtgtggtcctggaggccacatggagctgctggtgggtggctggaggggcgagaggcagctctccctgcagtgttcagtgccccatgcctggaggggcagttgtcaccaacccagtgtttccttgcagccccccctcctctgcacctct

SEQ ID NO: 16089 - DNA, 942 bp, Artificial sequence
  DNA replication origin
agccccggggcccagcatggccgccgccatcttgcaacgggcgcgctcccgccgccgccgctgccgccctcccgcgtcacccccggcgcgagcacgcaggccccgaccccgccctggtccccggcccagccgcgcgcctgcgcgtgttggtcccacccccttccctccacccgccaatcggggccgggctgggcggggcgcgtcctcctgcgcacgcggcccggtcgctgtcggaagcggctgtgcgggtggcggccggcgcgcggtggggcatggcgggttcgcggggtgcggggcgcacggcggcgccgagcgtgcggccggagaagcggcggtctgagcccgaactggagcctgagcccgagccggaggtgactgtggcgatgcggggcggcggggcgcgtccctagagggcccggcgggcacgtggccgcgctggggcgggtgggcccggcttctgtcacctgggcgcccgcgcccagtgaatcggtcttgggcgtgggtgcagctcctctatcggggggtctcaggcagagcggactgcggggtaaaggacggcgtccgggaagcaaagaaacgggggagcggggagtggggacggggcgccccttgcagcagcctctccagccgttccatttgtgcatcctgccaataaaagggctcggcttgcgctcccagtaaatgcttaacctacgtatacgctagttaattgcgtttttatgctcatgggatagacatgagaataagaaaacctgaatagaacccagtgtctgctgcatttgctgtattagaactcactgttgctctctgctagctcagccctgtcttggttgtggggatcatcaaattgggtggtggaggggatggacagccagcccctcacagccccctcggccgcggccgcgctgggttgttgaaactgccccattgctttgtgaagcg

SEQ ID NO: 16090 - DNA, 1558 bp, Artificial sequence
  DNA replication origin
accagggcggggtcggggcctgcgtgctcgcgccgggggtgacgcgggagggcggcagcggcggcggcgggagcgcgcccgttgcaagatggcggcggccatgctgggccccggggctgtgtgtgcgcagcgggcggcggcgcggcccggaaggctggcgcggcgacggcgttagcccggccctcggcccctctttgcggccgctccctccgcctattccctccttgctcgagatggatctgcccgtgggccccggcgcggcggggcccagcaacgtcccggccttcctgaccaagctgtggaccctcgtgagcgacccggacaccgacgcgctcatctgctggagcccggtgagggcagcgcgcgggcgcggggcccgtggggaccgggagggagcagggccgcggcggacggcgcgggagggctgcggggaggggccctgccgcacttcagcttacgcgcggtgagcctgccctgcccccgccagagaagggcggcgggtcccgagcctgctcagacccagagccttaagttgggaaagcggctacgagacccacactcggttcaacccctgccccagcgaagtttccctgggatggggagaatggggcgtctcttgtattgggcttctgctaactgttgggcggttgcggaagtgtccgcgcttagggcaagcacccggcttcgccagcggacgctatgccccagaggacatcggcgtccccaggggacagcctacggggtgctgggtcggcaactattaggagaaagtcaggacttggcacgtgaagtggagggcgttgctgtagtggaacaggaaaggcagtggaaacagtaagacgtcatgaagcttcaggttgatctcaagcccgtttccgaatcccaaatctgggtttcccaagaggagttttgtttttcattccttatggggcatctttattcgtgtttctgtcttcagttgcctggcagcaggcttgtttacatggtccgaccctgcaagaccggacagctccggtttgcagaagtaaatcagtgattgtctggagttggagatcagaatctgctgttcacatcccggctgtgacgtcgtgtccggtgaggggcagagccaccgcctgcggctggcaagtgatgacctgaagaagggccacactggccgagtggggtgactcttgcttgtaatcccagcactttgggaggcggaggcgggtggatcacttgaggccaggagttcgagaccagcccggacaatatggcaaaaccccagctctactaaaaatacaaaaaatttgccgggcgtggtggtgcttgcctgtggtcttagctacttgggaggctgagataggaggactccctggacctgggaggcagaggttgcactgaaccaagatcccgccactgcagcctggcaaagagtgagaccctgtctaagaaaaaaaagaaaaaaaagaaaggccactgatcattgggagcttttggaggcaccgtgaccggcagggtgccaccaagcatgtgtggcctcccaggagctaagaccccagagttcttcaggctctgc

SEQ ID NO: 16091 - DNA, 1012 bp, Artificial sequence
  DNA replication origin
agagggtgtccacggaagatgggcgcccgggactcgcctcctctacccgggggctctgaggcgggctggggggctcctccttgacacgcaccagggggctgctggataggggcctgcacacgaggggggccaggtgagctggcgtctcggccagccccacctcatccccaactctgccctgggcccacaggggctcgcctcattgggggacaggatggctggggtgatgcggcccccacctctcgtctatgctcccgccgggggaggccatggggctggcaggagccagctcggtgatgtcggagatgatgggtccagagctggccacagcatcaggggcgtagaggctggagctgctgtaggctggggagggggcctgcaatcaaaggcaggaggtccatgcagtgccggcaggggcaacccaccccactgccgcctgcatgcctgggcgggtgccctgtctccggcactcaccgagtaggggcccgagccgtggacgtgctccagggagaactgccggctatacttgggcatggaatgtgctgagccactgtcgttcagcatcagggggctgtggggaagggtgcaggtcagccaccaccccccacctcggggtacccggggcacagctgacagagaagggggacagccctgggccccgggtggtggatgcaggcatccccaaaacctcacatctttctcttcacccccaggatccggtttgactgcaccagtgagatcaggaactgaatgagctgtggagagagaggacacagttaccccggcccttgtggggcccccgccggccctctggccctgcccccaccttgttgacgactttctgttgctgggcatgcttctgccgaaggctggccacctcccgccacagagcctcattctcactgcaacagaccaggctgggtcagtggggcccaatcccatgagccccagggctgagggagccccacagaccctccctgtcccccatgcaggagcaggggtaagtgtgacc

SEQ ID NO: 16092 - DNA, 1203 bp, Artificial sequence
  DNA replication origin
agtgcaccagctgcttccctgcgggggtgggggtgtcaaggcggtggggggttgggggcagaggtggggccggtgggacttggctcacctgaatccgggctgctgttctctgcctcgggaggcctggggggctcctggggagacaggagctcttggatctgtggggtggagacggtattgtgagcactcccgctggtctcgttccccctcaccccccgcccgcctacgcacactggccaggctgctgtcaaggtcaggcaggctcatgtcgggcacggtcaccgaggggctgaacagctgcggaggagggagggaagtcagaacagcacccgggggcggggcggggaggcggggcggggaggcggggcggggaggcggggaggcggggcggggaggcggggaggcgcggggaggcggggcggggaggcggggcggcggcgcggggaggcggggaggcggggcggggaggcggggcggcgcggcggggaggcggggcggggaggcggggcggcggggctccactcacgtccagcagggcactggtgtccacgctgaagccgtggctgctcagcatggtctgcaggttatccaggttggagtccatagcatccaagtggtcactgagctcattcctggcccgggataaggcggtacctgaaccagtgccccaggccccacaccccaatgccctcctgtgggagaagggctccccttgactgtaccccccaggctgcacccccgtgtacgcctgcacaggctggagggggcagcgcattcgaggacggcctggaaggcagtggaggctctgtgccctgcaggggtgcggctgggcctatgctgggcatccctttgccatgagggcctgggggccttggtggcagtggacccaggagacaaggggcgtattcagctccagcacaaggatcagggatttcagtgttcagggttggtgaggtttcccgttgcactgggaaaacaggtggggctctgctcagtgtgtgggtggctcagtccctgccctggtgctgctgtggggatgagacccacggtctggtggctgtgaccaagaaagccctaggccacagggcacacctgggctatgggacggacagccaggctgggtcccagaggtgccctggagaccctgcctgacaggaagtgcagtcagcaccgcagtctggatcctgccaacaccagaggccg

SEQ ID NO: 16093 - DNA, 1020 bp, Artificial sequence
  DNA replication origin
cactgcagcccggcccttctgtgccctgggcccctcctcattgcagcaccacccaccgcaccaccctgggacagaggaaacacatggaggccatagcatagagcctgtctgtttatagatctctgcctgtcttgtccgtccatccactgtgtgtatatatctgtgtatctctgtggagcggggaacgggacagttgtgtaaaaatccaaaatacaattctgactatgaacaacctgcagggtcagtccaggtgtggctgtgaagccccaaccaaaccacaggacacggggttgggggaaggcagactggcaggccagggtgaccctcctgaccagaggtgctgcccagacccgagcccgtttgtcctactggggctatggcggccgacccaccagtgcccaagaccgcgaggctgccctgcctccccaagaccagccctgcactgggggtgggggtgggcggctggcccagctcctccggggcctctaggagacagtggggtccttggctttgggaggctccgagcctgtcagcagggagatggtggggtcctcggcgaagccgtccccttcggagaagtaggagccctctcccagctcaaacagcaccggcaggtcgttgctcccggtgtccacggagccggggtccagcaggaacagcggctgcgctgtgtagtgcaccagctgcttccctgcgggggtgggggtgtcaaggcggtggggggttgggggcagaggtggggccggtgggacttggctcacctgaatccgggctgctgttctctgcctcgggaggcctggggggctcctggggagacaggagctcttggatctgtggggtggagacggtattgtgagcactcccgctggtctcgttccccctcaccccccgcccgcctacgcacactggccaggctgctgtcaaggtcaggcaggctcatgtcgggcacggtcaccgaggggctgaacagctgcggaggagggagggaagtcagaacagcacccgggggcggggcgggga

SEQ ID NO: 16094 - DNA, 1543 bp, Artificial sequence
  DNA replication origin
tgctcacaataccgtctccaccccacagatccaagagctcctgtctccccaggagccccccaggcctcccgaggcagagaacagcagcccggattcaggtgagccaagtcccaccggccccacctctgcccccaaccccccaccgccttgacacccccacccccgcagggaagcagctggtgcactacacagcgcagccgctgttcctgctggaccccggctccgtggacaccgggagcaacgacctgccggtgctgtttgagctgggagagggctcctacttctccgaaggggacggcttcgccgaggaccccaccatctccctgctgacaggctcggagcctcccaaagccaaggaccccactgtctcctagaggccccggaggagctgggccagccgcccacccccacccccagtgcagggctggtcttggggaggcagggcagcctcgcggtcttgggcactggtgggtcggccgccatagccccagtaggacaaacgggctcgggtctgggcagcacctctggtcaggagggtcaccctggcctgccagtctgccttcccccaaccccgtgtcctgtggtttggttggggcttcacagccacacctggactgaccctgcaggttgttcatagtcagaattgtattttggatttttacacaactgtcccgttccccgctccacagagatacacagatatatacacacagtggatggacggacaagacaggcagagatctataaacagacaggctctatgctatggcctccatgtgtttcctctgtcccagggtggtgcggtgggtggtgctgcaatgaggaggggcccagggcacagaagggccgggctgcagtggcctcctgggggaagacggatgcttgcagctagctccgtgcctgcccgactccccaggaccagcatgtgcttgcagttctttattgagggaccaggggtgggcgcctcaccttggccctgggggtctctggttgtcacaggaccaccaggaacccccttcccaaggtgttcgcactcggacaggtgatgcggggcgggcacactgtctttctgccagagccagcaccctgtgtaggcacggggaacgggagcctgtcccgtagctttagggttctccactcagcctggtggaggaagggaagggggcctgcgctgggcagtggagcaggctttgctgctttatctggcagcaacagtttgttctcgagctccactggccaactgatagggagaggcacaggagcccatgtgggatggaggagtcggccccacacccatccccccaccaggagctcacccactactgccatcctcagcagggcccaaggagatgcctccatctcagggcccaccagcccccactggggtagagggaggataccaccaagggagcccaccctcccctcacaccaccagttcagcaggttgctgatgaggcccctggtgcagtcctgggaccctgtgcagggcctcctcaaacacctgccttgttgggccatagctgcaggtctggggacaccaggg

SEQ ID NO: 16095 - DNA, 1727 bp, Artificial sequence
  DNA replication origin
acccagggccgacctcttcccaagctgaagctgagcacggtgggtgcaagttgaccatcctgcactgagggccagagtgccgattcccgcacacccagcaggagtagcaccaggagaggacgcctgagctgagcttttctaggtaggggagtgtggggaatgggggcgtctgcctggccttgcactccccctaccggccatgcccgccctgctgcagtggagctgctgctccccggcaggtcctgggacagctgtccacacagctctggcactcgcccttgtgggtgtggccataccccccaccaggccccaggcccctggcaggctgaagaggtcactggacagcactttattgacaccctcggacccggggcagggtcagcaagactcccagctggcatcagactgtgtctggcctgctgtcgccatccctgaggggtgcaggacagagccccataggggcagagaggcctccctgggaccagaggaggatgctgtgcagccaggcccatccccagcactcgaggcctaggaggagaggtgggctctggcagcgggtgtgaggtggcagtgagaagccaggccctcaggtgcagctcaggcctctgccgctggggcctcatagttgagcacgtagtagtcgtggacgtacatgaggacggctattggctgtccgatgatgagcgacagccacacagctgcgttgccatagttgccctggaaaaagcggcccacgaaccaggccagtgggatctagggagtgaggggccaagtcagtcggccatggtgaccacagggctgggggcttcagggtccctgggcatggggagggtcagccgaggggttcaggtgcggggtaactgggcgagtgaggaggccacgtgggggtcactcacctgagccatcatgcccgtgaacgcccagaggcggaacattcgcagagggacgctcaccaggtactgagatgggagggagagaggatgccagggagtggggtgtcagccgtccctgctgtgggcatacccctgcccagggatgaggcaagatgccccccagagcactgacctcgtggaagaaggccgaggccaggaacacccctgtcctggccatccacttgctgctgccccgtcgaagcatgggcttgtagaagtgtctgcagaggagggggcatggaaagcggttcaggttcacagccatgttccacatcacacacacacacaccccacctacctgatgcaccacttgtgcacagggatgttccagttctgccagaagtaggtgacagactcggagttcctgggggccaagagaccacagggggatcagagcacaccatggcccatcccagcccccagggacaccccagggacactcaccaccagtcccggtagaactcccggtctccaaactgcatgagctcagccacggcattcaggcaggagtggaagagccagtagaagaagatgagccagatgaggtgattggggacctggcagggaggtgggggtgggcaccaagttctagaaccttcccccacatgccactgtcccctcctgtcctgtgcatgcgccacctgtccgcactcaccgccagcttcaggaggcgctcgatgatgcgtgagtagtccatgtcctgcagaaacaagcccttcagctagccatgctcctggtcactccccagccaccccagctgcaagagcacctgagccactcaccttgaagggcttc

SEQ ID NO: 16096 - DNA, 1183 bp, Artificial sequence
  DNA replication origin
ggctggtgtgtggctggcgcctggcctgcctttgccagtttgagcctgcacgtccaagtgtggggaccccttagctcccgggtgctgggatgggccaactgaatagggtggactcaaccctcaccacttggtccccacagtgctgggcagtgccccctggtccatccccaggttggaccctgcttgtggccccagtgctagtccacagccagagtacatggcagtggccagaggcctctggagagtgaggcctggagtgtccaagctccatgtaggtccagtccgggcagggccagctgggcttgcttctgaccctgacatgctcgtcccgctgcctggaggtgcaggctctgggggtccggagagctttgcccactgtaggtcttgaggccacagtgtggctctgcctggcttctcctcctggttgtaaataaggagtggggcctgagggcagacgaggacactggggtgggggcctggatcctgcgggggtggcgctgccctgctggtgcccactcagggggtgcttgtgttgtgctctgtcaggtgccatcgcctgcaggattctttattcagctctgacagtggcttcagcaactaccgtggcatcctgaactggtgtgtggtgatgctggtgagtgggacatggtgtcgggagcgggtctaggtccaggtggggctctgtcccaggctggcctttgcctgagaacaggctctgtcacccagggtgtccaggctggagcccctgtgggctggggtgtgtggagcaggctgcacctccatgtggctgccagcactggactgttggggaggggagtggcagtggctgcccctgctgtggtcacttgggtgcccatgcaccacatacttgctgcttcccattggatcccaggagagccctgcagatgtggtgtgggcgtggggaggccgaacagtgcctggctggagcctgtgtgttgtgagctgggcctgaggggtgcagggcctccagggagggcagggtggagggggtcttgccctgggctggtgggagagtggactgcatgctctgtggacacaaggcctctctggcaggggatgtgagaagagcttcctgtgctacgccacatggcctctgtgggtatggagccctgcaggcctggccaccactctgcagtcctcctggccccttccctcagctgtg

SEQ ID NO: 16097 - DNA, 1728 bp, Artificial sequence
  DNA replication origin
ctcacggacacttcctgctcacctagggctgggctctgggtgtgagctcctttcttccggccccgtggcaaggtgaggctgtgaggcaggcaggagagggcacccctttctgctctgcttgtggctcactcctgccaggctctttgcacacacccaccagccctctgctcacaggcaccccagtcggggccatccggtttctggcttctcccagggtgttttgtccctgaggtgtcctttctgactctccctttctctctccagcagggtctgcgaggtgcagggagcctgccccaaccatcttgaacccaggcccagcccagaggccagagtggaggaggcggcagtgagcagagctggactctgccccctcctcattgtgcttggccctggagctgcactgtgtgggccccaagtgtgggactcactgggacctgtgcctttgggcacactttgaacctggagacagggtggcgggtgggcatgtgccaaggtctcagtgttgccgtgagactgagaggatcctgctggctgggtgggcctgggggctgcaggagggagggcaggctgctccgagtcttcttggactagggagtgggtgtagggacagctggaaggtgcagaggcttgggcagatcctccagtcagtgagagggtgataaaggtgctctaggcacaggggcagatcccacctccccatgccgttccatgcagcctgccctgtagcccacatgctgctggccgcactgactgcttggagctctgtgggcactggtggactggggcttcctcctcatgggggcctgtgaggggtaggggtagcgcagtgggggtgctgcctctgggtggggctggtcaggcctgtgaagggcctgaggtgaggctgtggctgggttgaggaaggccttggaagcctgtcaaggggcccctgagaaagcttgtgtaggattgtctgcagtgagctttgggaagcaccaccctttcccgactcctgttttcatcttggagatgggcatggataaagccagcatggtgtccttggtggctcaaagggggcaggggtcatactgctgtgaaacagctgtggttggtaggtcgtggtacaagaaggccaaccctgaggcttgggattgttctgctgaaaacaaatgggctcgaacttggggaagagggggcagtggagaggcccccagacagacagcccagagaggctgctgggcagttgggcctcgtgcccctgctcccgtcacggtgctggggctctggcggtgtctacacccagcctcctggttgtgggcaggcagtgagtggagtaggctggggagatgagccaagggcggtggtcagttgggaagacagctgccaacttggggaggagggaggctctggtggagaccacagcctcactgcatggcccaggatggacctggtgggtggatgcagggcgctcaggctggagctgggagaggcaggggctgggtggagctgcctgcccctgtgttccagtctagatgggcagagggaaaggtgtgagcatcctccctgcctgggggtcttggggactagtgtagacttgtccaggaactgtgtaggtgtagatggggcatgtgttgcaccaaccttggtcttggggagcaaaggttgggcttgttggcattgcctctcggcctccctggccctttgcctcctgggcagggccgtctgactgccgaccccaatcctagccag

SEQ ID NO: 16098 - DNA, 1110 bp, Artificial sequence
  DNA replication origin
tgcctagagcacctttatcaccctctcactgactggaggatctgcccaagcctctgcaccttccagctgtccctacacccactccctagtccaagaagactcggagcagcctgccctccctcctgcagcccccaggcccacccagccagcaggatcctctcagtctcacggcaacactgagaccttggcacatgcccacccgccaccctgtctccaggttcaaagtgtgcccaaaggcacaggtcccagtgagtcccacacttggggcccacacagtgcagctccagggccaagcacaatgaggagggggcagagtccagctctgctcactgccgcctcctccactctggcctctgggctgggcctgggttcaagatggttggggcaggctccctgcacctcgcagaccctgctggagagagaaagggagagtcagaaaggacacctcagggacaaaacaccctgggagaagccagaaaccggatggccccgactggggtgcctgtgagcagagggctggtgggtgtgtgcaaagagcctggcaggagtgagccacaagcagagcagaaaggggtgccctctcctgcctgcctcacagcctcaccttgccacggggccggaagaaaggagctcacacccagagcccagccctaggtgagcaggaagtgtccgtgaggggaggaggcccgagctcaaggagtaatgaggaagcgggagaggaaaggctgggctgggccaagagcagcaggaagctggagggaggggaggctgtgaggctgacaagggggtgcgctagaggccaagtcccaggagggcaggcagagcaaggcctgacgcagacagcagggagaagagcccagtgtccacagccagtggccgagccctgctgcatccctaggtctgagggacaagcacacatagcctgcaagtcctggagacccaggagcagatagacttttggtctcagcctccagccccatgaaggcctcacctctccatctactgcccctcttcccaaggagacccgacctccacggcagggacagggactcaccaggcctctcccacgagctctgcacccatcccacaccagcagaagtacaggaaagc

SEQ ID NO: 16099 - DNA, 918 bp, Artificial sequence
  DNA replication origin
tccttgcagacccttctgagagtggctgcgtggcccattcattgctccagtggttaggctggcctggagccctgccgatgttgccagagccagcgtctgttgtagggacagagagttgggttctgtgttgggacttccatcctccaggtggggagtggggtatgggggtggtggacacacctgcaggcgtgtgccctgctcagctggatgactgacagagaggggtggagggagagaaccatggccgatgggaaggacttggccagcctgggcattggcttcctccaccaagctggccttgagcaatccccttgccaccctccatcccccctttatggcctttaccctggcccaggggccctcagggctttgttttagagagcagctgagggcctagaggttatcaaggcagaagtgggctgattttggacatgtagttggcaatgatttgctctctcagtgagcaagaacagagctttccttcacggggcaccatggggagggggttgggggagggcaggcactgtcgtggccctcagggtgctcagttcatctgggagataagataacctcagcgagagtcaggcatggagcaacatggacaaaggtcgggcacggaggccttgaaggggccgtggggaggagggtggccctcctgagaggggtgcttgcctgctgtgggcctggggtgctggtgagggaggctggcctaggcacctcctacctgaaaaggaggtgtggctcctggagttaccctctctccaggaggcagggggatggctacatgacctgtggaggacgtgggaattgagatttctttttttttcttttctttttttttgagactagttttgctcttgttgcccaggctggagtaaaatggcacattcttggctcactgcaacctctgcctcccag

SEQ ID NO: 16100 - DNA, 1486 bp, Artificial sequence
  DNA replication origin
gcggcgactacgactcccagggtgccctgcgccccgtcagcctctccaggccccgcctcaggtcggccgcggactacaaatggacgagagaggcggccgtccattagttagcggctccggagcaacgcagccgttgtccttgaggccgacgggcccgacgcgggcgggttgaacgcgctggtgaggcggtcacccgggctacggcggccggcagggggcagtggcggccgttgtctagggcccggaggtggggccgcgcgcctcgggcgctacgaacccggcgggcccacgcttggctgcggccgggtgcgggctgaggccatgggcgaccgcggcagctcccggcgccggaggacagggtcgcggccctcgagccacggcggcggcgggcctgcggcggcggaagaggaggtgcgggacgccgctgcgggccccgacgtgggagccgcgggggacgcgccagccccggcccccaacaaggacggagacgccggcgtgggcagcggccactgggagctgaggtagcggagcgcctgaccccctaacctctgacccaagggccccgcgactttccggggttggccgaagcgcgagctccgagtccgagaacatgggccctgggctaagcggggatcggtgtgccctatgggccctgtggggaaactgaggcttggggagagtcacctgacaaggtcactgggtaggggctctggagctggccttggccaggcagaggggagccggcaggtgtcccgcatccagatcctcttgggtctgtgcatcctcaggggctcctgaggagcttttcgaggggcgggctggtgggggcccggccctggacagtgtccccttatatggaaggagtcagataagatctgggcagtttgtggtgataggttccttcttggtgctatgagcggtgccttgcgggtaggaaaggctcccagaggagggctggcctgccagggagggggccagaggagcccaggcctgtccgaggacaggggaatcagcagctgccccggacaaggggcagtgttagaggcgttcttgtccttgcagacccttctgagagtggctgcgtggcccattcattgctccagtggttaggctggcctggagccctgccgatgttgccagagccagcgtctgttgtagggacagagagttgggttctgtgttgggacttccatcctccaggtggggagtggggtatgggggtggtggacacacctgcaggcgtgtgccctgctcagctggatgactgacagagaggggtggagggagagaaccatggccgatgggaaggacttggccagcctgggcattggcttcctccaccaagctggccttgagcaatccccttgccaccctccatcccccctttatggcctttaccctggcccaggggccctcagggctttgttttagagagcagctgagggcctagaggttatcaaggcagaagtgggctgattttggacat

SEQ ID NO: 16101 - DNA, 1643 bp, Artificial sequence
  DNA replication origin
aaagcccttccttaatggcccgcccacagccagtgctttccccattggctccaagcctggctctgctcaccaggcccgacccatcctccctggtggtccagtccaccctcccattgtctttctcctgtggccacttgccggctttgagttgggacgcgaccacaggttgagtcgttgatctcctctgcctagcatgaggtgctccgtggccaggtccagacctctctgagcttgctgtcagtccatactcagacaggtctgggcctacctggccacagagtgtgtctgccagcgactgcattcaacaaatgaatattctgagagactgggtaggagatggggctggtcctgaccgaccaaggcccatgtgtgaggggctcttgggtccagtgagggcggccccactcggcaggctacacaaagggcatctgccaggtagctccagcctgcctgatacctggttggcagcaacccacagcggcctgtggtgacaagaatatgtcaccaggggggcaaccaagggggcagccctgctggccactgttggtggaggtggtggaagaggacggagctcagaggcgaggctgtgaccagcccacgggagaggaccccacctcaggaggagcacctgtttgcttccagagaagtgctgcttgcccctgctcaccccagaggaatgaaggtgtttctagagtcagagtcctcagtgaaccctggcatcctgagatccaggatgttctcactccatgccctgtgcaatatgcacaccaagccaaggtgggccgcaactgtggctgttacagttgattagttgcttcatttaacatacaagatgtctggggcagtggctcatacctgtaatcccagcaccttcagaggccgaggtgggaggattgcgtgaggccaggagttcgagaccagcctgggcagaatagcgagacccccatctttagaaaaaataacaacaggccaggcgcggtggcttgcgcctataatcccagcactttgggaggccgaggtgggcggatcacgaggtcaggagatcgagaccagcctggccaatatggtgaaagcccgtctctactaaaaacagaaaaattagctgggcgtggtggcacgcgcctgtagtcctggctactcgggaggctgaggcaggagaatcgcttgaacccaggaggtggaggttgcagtgagacgagatcgcgctactgcactccagcctggcgacagagtgagactgtctcaaaaaaagaaaaaagaaaacaaaaaacaacagggcggttgcacaggccgtgcaaatgcacagaagcctcttgagtcccggcgatccagcggcccagacttctgacatcctggagaggctggcccacgttggaaactgggaggccctgagagttgagggacgtggagctccttgtggagagagtgggtgggctgagaagacaccaccaaggggcctgcgccctcgccctcgccctcgccctcctctcgccgggctctgcaggcggggaggtggagagcctgggagtcgcgtgcaaggcaggcgtcccggtgacgcagggcctggtgcatttctccagcttggtcttctgacctggcccttgtctgacgtccccctaaggcgaagaaaagcaggttcctgc

SEQ ID NO: 16102 - DNA, 1835 bp, Artificial sequence
  DNA replication origin
tcttgtcaccacaggccgctgtgggttgctgccaaccaggtatcaggcaggctggagctacctggcagatgccctttgtgtagcctgccgagtggggccgccctcactggacccaagagcccctcacacatgggccttggtcggtcaggaccagccccatctcctacccagtctctcagaatattcatttgttgaatgcagtcgctggcagacacactctgtggccaggtaggcccagacctgtctgagtatggactgacagcaagctcagagaggtctggacctggccacggagcacctcatgctaggcagaggagatcaacgactcaacctgtggtcgcgtcccaactcaaagccggcaagtggccacaggagaaagacaatgggagggtggactggaccaccagggaggatgggtcgggcctggtgagcagagccaggcttggagccaatggggaaagcactggctgtgggcgggccattaaggaagggctttgccaccgggggtgggggcgtggcggggcagcagctccagaggtgggtgaagccctgcccagacaggccctataccctgggatctagggtgaggggaatggtcagggtaggtgaggttggttggggacaagggtgtgtatggctgggtcatcgaggaaagcatgatgcagatcaccctgctgggggcagcaacaaatgagggggcccaagcccgaagcgagttgccttccagggctagtggaataaagggctggaagtgggttggggcctcaggctgatcccagggcctaggggccatgggtgggccaagaaggcctgtgagaagcaagggtcccaggagagttcacagccagtggtggtctatggcctgtgctgctcattcagagggaaacttgtgtctgtggctgggaggaactggggggtcgagctcatcccaggcctcagggaggccacctccatccttccacccactctacgcatcagaatcctggagaagtagaaacagccagtcgctgttggagtcctttggaaggagtgaggctaggagccttcctcctggccattgctgtctgccattgtcattgctggtagtgctctcccaaagagagcacccacctgcaccacagctcctccaagtgccaggcacacaggccatgacatgctgcagacctggttcccctgctctccaccctagtggagtctgggcaggtctgtcccctgtccctgctagggtgtgggcagctttgctggccctggatctaggactgacctggtttgaatgtatgtgcccgaagactttgggcctctcggctcatgcctgcctacctggttaccaggggacattgctgggcaaagggtccctgtcccttatctcctccactactcattctgtctagagcccttgggcgatggttgcagaagcctctctgccccctgggcacctcctccctggaaccggtccaacccagctatccatggaggcatccgcagacactgggggagcatatctgggaagcctgggggtcagaatgtgggcagcaggccacaggaaaagggccagacctcgaactctccactgtccccatttcctgcaacagcatctcagagggcttgaggtggctatcaggccttccatcacagcataaagctccttcagggagagaagagcgaaggcacccaggctggggaacagcagctcctactatacctaccctgcccactctggtccaaccgtgggcttggcctgactttagactggaaccccttagtgctcctgttcctggtgtggagcagatccacctaccccaggggaaatgccaactactttgccttcagacctg

SEQ ID NO: 16103 - DNA, 1194 bp, Artificial sequence
  DNA replication origin
cacccaacagcgtgggcccagcccaggacacatcagcccgacactccaaattctatcaagagtggcatttattctccttgtggaggtgcggtgctccggggagctggtgctattgtgcttaggaaggaggtctgtccgtccgtccgtctgtccggccggcctggccccaaatgggggcggaagaggggcacggcccgagtaaaaatcccggcctattccgggtgggaatatgtacaaggcggcggggcacaggcgggggtgggggcgggcgggccggcggccgcagcccccacccgagggcccccgcacctcgggccctacttgtagaatcagtacaaaataggtgctacctaaacgttccttctacctgaattcgctaagtcggttattgtgctgcttagttatgggggcgggagggggcccatggctttccacggcggcggggtgtagggggaagcaggagaccctgacgggcccacagccctccagctttctccttaggtaggtagacaggagtatggggtggggtgaggtgggggcgcctgtgtgtgcgtgtgcatgcggcacaggtgggcaggccccagcttgggagctgtgcaggcaccacacctggttgtgtagggtgtttggatgtgggcactgctgtgcagagcggtgggtcatccttgtgggggcagccacgcttgctgctgggggtgaggctggccacaccataggctacagctggcaccttcttctccagccatggctctgcccctggctggacatggcagatgtgtgttggccagaggatcagagaagtggccacctgtgtgggggcccaggagccctggatctgtccccctcagctggagtcaaaaggcctaactcaaaggtagagcccagttgtgcccagcagggactggttgaggtggggaggagtgtagggggcatgtgaacctagggacctggtctctctgcatctgccgttcttccctggcccacccaagccggttggacccctgtcctgcaaacacacctcccagcaggtggctgcgctcctggcggactcagcaattggcctggcacatagtaggtgctcaatgaacggtcagtgaatgattaatgcctgaaggaggggtcttgggggcaaccaccccacccccgcccatggaaccattacagccgccgggctctgccgtgggggtcggggag

SEQ ID NO: 16104 - DNA, 771 bp, Artificial sequence
  DNA replication origin
gtggggctgcatgcagtgacgtcacaaaggcggcggccaatggggcgggcccttggggcggggtcgccgccgaggctttggcatagacgggcgaaagttggcaaccgagtgggggcggggcctgggtctcaggggcggggcctgggtctcaggggaggggcctgcctcggagaggcggggcctgaggctccctagaggctcccagctaggggcgggcctcggggcgtggaaagtaatcccggacatcccaggcccccggcgtcggcgggcaagatgggggttcagcgccccctccctgacccgagtgcaatccgttcataaataaaacgtacaaatacagaaaaagaaacccgacgcgtccgcaacccccccagggggctttacccgcaaagcgaagacagaggtgtgtagagggcagcgcccaggcctgcctgccggccccgggaatccgtcctccaacacgaatgcctggggtacgggggtggggggtgggggcccggggcagggcggaagcggggtctgaggaggtcggataagtccatgcgattcgatatgtgtcattattattcgatatggaggacagagcccgggaagctgggctggaagaattcggatttggcagaggatgcgaggcgagggtaggagggcggctccgactgaggccccagaagcaacccgagggagggggtgccgccgtccgcccctctccccgacccacaacgcgtctaacactgccgggagttccgcgaaggctgctaggcaggggcgtcc

SEQ ID NO: 16105 - DNA, 725 bp, Artificial sequence
  DNA replication origin
ccgccagcacctgcggcccctggccccgcgcgcgcctcggtgcctgcccccgcgcgcgtgccgccccggccccccggcccggatcccaagctgcgcccgcccgccccgcccccgcctccggcgtcgccgtcgggggccgccgccgaggctgtggagggagcggcggcagcgccggcattggaagccttacgccgcgagcgcccgtcggtgatgaagaaggcgtccgccgcgtagccctcgctgacggccgcgtcgccgttgatgtagccgcccgcagcggtggccagctccgggcgcggggtgggcggcggcgcagaccctgcagccgccggacccagctctccacgcacagctgctgcgtacatgggctccggcgacggccctttgagcagcgcagcctcggcgtcgccatcgtagacggacgagggccccacgtagtcgctgaggtaccctgcgggcggaggcggacggacagcgggaagggaatggggcggcggcaggacacacacgggggatgggggggcgggagacagcagacgcggaccgggagacccgggtccgggagagaggcgaacagggaggaggacaaaggagaggaggccgagggaccgccgggcagggaggatggagacagcagggaggggaagagaggggaggagaggatgagacagggccgggccacgctccgcccccgccgccccaccctcgcagagaggaggagagag

SEQ ID NO: 16106 - DNA, 1982 bp, Artificial sequence
  DNA replication origin
gcccccccagcctcctcccccgcctgtccaggggcggcactgcgggctgggaagccgggaccagaggagggaaggaaggaagaggagaggagagaagaggagagaaggaaggaaggattgaaggaaggaaggaaggattgaaggaaggaggaagaagagggatccggaggggcaacggaggagacgcagggcagcaaggagagaggacaccactcgcgcggcagcatccaaaggccagagtggggacccgcgctgcctccgccgctcctcggatggtgacggggccctgccgccgcagcccccccaagccccggctccgcaggcccacagcgccggagccccgcaggaatcatgcccaggtccttcctggtcaagaaggtcaaacttgacgcgttctcttcggccgacctggagagcgcctacggacgcgcccgcagcgacctcggcgcgccactgcacgataaaggtgagcgctggtctgagaccagggcgcggggcctggggctttgctggaagcggtggagggccagagtgtgggggcggagggcagggcccggggaaacagactgaagggaaccagaaacggcaagagtctgtggctggagcctggacggtagaggggaggaaggggaacacagaggccaaggctgggcagggagagtgtcgacgttggacagagggtggggaagaggatcaggaactgaggtacccaaacgcacacatggacccacatcctgacccatgctgggacagacacagccgcatgggcgctgccatgacgggacccagccatgccggcacacacagacctacactcaagagaccagggccgcctcgccaccctctcctcttccttgactgcaccaggacacctgctagggttagctggggaatgcagggagctccagggagtaggcagggggtccaacagggccgcccacctgtcagagcagagggccagcagaggcagcagcagtctcttccctgaagcctgggtcagggagaggaagcagggaggaggctgtgagcaagggacgcccaaggtgtgggaggcagggggaggctctttgtgtaagggtgcccaagttcaaggacaactgtcagcatgcaggagagggggacaggagtgccagcagcatggggtggcagagcaagtgtgacctgcaggagtgtgagcctgtgtgggtccatgtgactgtgtgtggccatgtgaccgtgtgcgcttgtgtgtgaccctgtgtgtgtgtgtgcttgcctgtgtgccactacatgggaccatgtgactctgaggccgctgtgcaccatgtgacttgagagtgtgtccggggtgactgcatgtgtgaccctgcgtgagtgaggaggtggtgagttcggcacatcagtgtgcagcccaccctgtgagggcacacaagggctgatcatgctgggagactgggtgtagccctgaaggaggcagagcgtcgcgaggggcgtgcatttgtgactttgaggttatgagatccatcttgtgcctggggagcaactgcagctaccggtataagtgatgctgccctcctgcagctcgtccctgtgaaagtggacgccctggccctctctgcacagttcaggggcttgggaaggccctgaaaggggttagggtgtgagcaggagagggcaatgttgaacagggtaggacccaagggtgcaggatggtgagagggagttcggaggagaagcagagtgcatggaggagcagggagggcagggtcaagtccagtgggtggccggagagctgagggaggtgctggtgaggccggagggaactgggggagggagacgtcttcagggcttgttggaggaaccagaaggccagagggggtcaacatcaaaatggagcgcacgttctgcaggccagagggagagccggccaggaccccggagaggtgggacagacggggtccctgggccggcagtcctggctttgtgcgccgcgggtctgcagt

SEQ ID NO: 16107 - DNA, 700 bp, Artificial sequence
  DNA replication origin
cccgccctccctgcgcacccctccccccaggacccccgccccccgcccgccgccgccgccgccgccgccgccgccgtcgccactgccgctcgctccggctgcagaacaataaagcaagcctcccagagacccccgccgaggacccctgcccggcggccaaacccccgcggaccgcccctctccgcccgcgccggttgagcgcgcccgggcgctggccgcggtgctgcccaggccggcgctggccgcggtgctgaagctgccggcgctgccgctgccaccgcgttctccgggcccggcgccgccgcccccgggggcatggggggccgctgactgaggctccgccgcggcggcggggggggggaggggaagggggccaccgagccgggccagccctgcacccactcgcagcctccaggcccgggacggagccgctccccccctctccgcccccccagcctcctcccccgcctgtccaggggcggcactgcgggctgggaagccgggaccagaggagggaaggaaggaagaggagaggagagaagaggagagaaggaaggaaggattgaaggaaggaaggaaggattgaaggaaggaggaagaagagggatccggaggggcaacggaggagacgcagggcagcaaggagagaggacaccactcgcgcggcagcatccaaaggccagagtggggacccgcgctg

SEQ ID NO: 16108 - DNA, 1026 bp, Artificial sequence
  DNA replication origin
tcagggcggcaggaagagactccccaagaggggctctgcagagagtggctagggggaccaggactttaattggctggggaccaaggcagccttgcctgggaaccctgaccatctcctctcctgcaacaaagcctcccaaggccccagctctcagtaagagactcggggaggcctcccatgcaggagggctgacacttttccaaagcgtgagaatcgtccactgtcctccttcagcctctcctagctggggcccaggactggggcaccacagcgacctcctgatgctgggggtgagggggaaggggggggatcaggatgctggtgggggggcggggcgaggaggcccaagtaattgcgcccgggtcgcatgtgcgctccgcaccccggtcggtgcagactgatggccaaagcctggacccagctgtccctccccgccaggggtcccggggggctgcgggctccacccgagcgggagcaagggccgccccaatggttcccgcgggagcgcctggccacgggacacatgtgtgccgctgtgatgcctcttccgtcaaggggactgggggcaaaaggggcgaggagcttgacagagagaggcaggtatgtgcacagaggcaggagaggaaggggctgagagggtggatggagggacaaggaaacggggtgagtgcagggcgacaggaatggcgcggggagaagggacgaagtgggaggagcagaggagagaaacggggggtggggggacagggcagacgaacggaagaatgggggaaggggacagagttgggggtcggaggacccggagagtggggacagagaggcaagaatactaggacgaacggaggaggccaaggatggagtcgaaggacagagttgagggcggggacagggtccgggagaaggcggtgagcgctgggtcatgaggggatcgcgcctggcacgtcccgccggcgccccgagggtctgccgggtaattaggcctcggtccagatggccccccagtcccgcaatcaaaatgttaattgg

SEQ ID NO: 16109 - DNA, 1775 bp, Artificial sequence
  DNA replication origin
cccgtttctctcctctgctcctcccacttcgtcccttctccccgcgccattcctgtcgccctgcactcaccccgtttccttgtccctccatccaccctctcagccccttcctctcctgcctctgtgcacatacctgcctctctctgtcaagctcctcgccccttttgcccccagtccccttgacggaagaggcatcacagcggcacacatgtgtcccgtggccaggcgctcccgcgggaaccattggggcggcccttgctcccgctcgggtggagcccgcagccccccgggacccctggcggggagggacagctgggtccaggctttggccatcagtctgcaccgaccggggtgcggagcgcacatgcgacccgggcgcaattacttgggcctcctcgccccgcccccccaccagcatcctgatccccccccttccccctcacccccagcatcaggaggtcgctgtggtgccccagtcctgggccccagctaggagaggctgaaggaggacagtggacgattctcacgctttggaaaagtgtcagccctcctgcatgggaggcctccccgagtctcttactgagagctggggccttgggaggctttgttgcaggagaggagatggtcagggttcccaggcaaggctgccttggtccccagccaattaaagtcctggtccccctagccactctctgcagagcccctcttggggagtctcttcctgccgccctgatgcaagccccagttctgcccccttgtcccttcgggtgggtgcagtgttggctctgaaccctccgtgccctctgctgctggccgcacctctccctgcccctcccaggccccatgttgtggaaaggtcagccataagggtcaggggtccccactcttgtgtctccagcaccccaccctcagcaaagccagagcccctggtgtgcccaccctcagatcctgcagttgcattctcacccacccctgccctattgaggctccaacccaggaaataagtggacagcccagatccgagggtccaccctgctggacagaagcgatgggcagagaatagggtgttgaatggaggtgacaggtatgggatgcagttactggtggtgatggagcacagttgggttagaagatgaggacattgacttggagaagagatcaaggcttggaagggacaggcagtctgcagtggttcatccacgagaacattagaccaccaggaattcaggcagcgatgggtggggacgaagccatagtgagagctgctgctgggtggttggtggccaatgacacgtgctccagctgggacgctcaaggagaggagggaattggggtctgcaggcctcagccaggagcacaggagtatttgggggagagagaaagcagcccccagagaggactgtggggagggacagcatggaaggagggccctcagcagggaggacgtggggtcgctggggatggagcccctggggaaggtttcaggatggggggtgggtctgtattccaaaatggctctggtggggttggggggtaggcatggggacaagggcgtgaagagtggcccagaaaagccggtgggcagacttggtccctgctgggcaggagctttggaggacccacaggagcaaggttgcagcacaagtggaaatgtgcgtgtgaaaaccagaagcagagagcgagggcaagtgtcagtgccagaaaacacctgcactaaacataacaacaggttaacattctgattgtcgggagaaataactggtataaatgaactt

SEQ ID NO: 16110 - DNA, 1355 bp, Artificial sequence
  DNA replication origin
ggtgagcggagattgagccattgcactccagcctgggtgacagagtgagactctgtcccaaaacgacaacgacaacaacaacagcaacaaaaactcaagtatggggcctttctgagcctggggccctgtgtgactgcccaggttgcaggctcgtgaagccagttctgcctggaaccatgacttagagtctctacttgacccccaatcccaaggctgctcaaaactcactgggcacacaggcaccctggcccatctctggggcaggatctgggggctactgaagtggctttaggtaatccctggaagcaattgtcattaacagcacaagtgcagggacctccactccccagaagatggggctcaaggtgtcctacagtggcagcaccaaacttaggtttgggttgagggctctgtttcactcaggcaggcaaagtccctcctccctggagctggtgatctaagagggacccagaatgaagagtggttggaggggcagggtccctctggctggggagctttgggggaagggcatcgtgggcaaagagtaaacacaacacaagggcgtgatataggactgagctgggtgtgctggagaagctgcaaggggattgggctggtcagagtagagaggacaagggagaaggaggcctgagatgaggtgggaagggcaggcagcgtccttggaggccatagctcagagctttagtcctgtgtgccatgggaatctgctggagagctgtaagcagatatgcactaagacccagggagggagcggtggggaaaggccaggaggctgcaggaattgtgcacggaggaaagggagctggaggggcagaggggaacagagaggagcaaggaccacagacagttctgagctccggctccgtggaggggatttgctgctgggcgggaagtgggctgggaagaaaagtgactcgggagtccagagtgtctggcctgggcactggggctggtggctatggggagaggggttggcagtcaggagttctgaattagacaaggcctgaggagcttacaggaccttgtgggggagattttgaaaaggcagaaaggccctggggagaaaggaaagggggaagcacagacctgaaaccatcatgccctgggaggtccctaaagctaaagcactagatgagatgtctctggcaacgcagaagatgggggagaacaggaggagggccaaggatggagctctggcatcagacacagaggcagacaaggggccacgggggaagaggacccaaacagagggagaaggaacccatgttgagtaagatggggactcataagaggcacgaacgcccctgcaggaacagcctcaagaaggggcctca

SEQ ID NO: 16111 - DNA, 1810 bp, Artificial sequence
  DNA replication origin
gcccgccttggcctcccaaagtgctgggatgacaggcgtgagccaccatgcccagtctatcttgaaattcttaataactttatttttatttttattgtttattttattagagactggggtctcactatgttgtccaggctagccttgaactcctgggtttaagctgtcctcccaccttagcctcctgagcagccgagactacaggtatacaccactgcaccccacttattaacttcctaacaatgggctccaaattttcatttggcatgggaccctgcaaattatgtagctgctcctggttgcagggacgttcagctgataatgcctgaagatccggagagccaggtcctgctttccctgggaccccatggcccacagccttctcggcttccacaacagcccccagcactcaggaggcctcaggtgctgcagtgatagctgggggatccactggacaggagagtgtgggcctggggttccagcaggcacagcaagtgggtgtcaggggcgcaggcctggggttccagtgggcacggtgagcgggtgtcaggggcgcgggcctggggttccagcgggcatggcgagcgggtgtcagggcactgcacatcctccctcctaggaggccctgcaccctggcccgggactcttgtgcccacccccttggaggcaagcggcagcagctttgtgggtactggggcaagcatgcaccccaggcacagggcttgttctctggccgcaccccaccccattgctggttggagtagcagcaggcaccgggtccagaatgggccagattctgactcctggattccacgcattggtcagcacctctgaggtcaggtaggacaagttaagtgctgctggctaagaggggatggagttcccagcctctctagtgatgggccgaacctcagaggcctggctatatgccatcccttgctctcagctgttcctgtcttcgaacacaagctgtggggtttgcttcagtcagctggaaggcacaggctctctgaggtcctaggagtgcgcaacagtggaagacctaggcaccagagggcctcccctgccccctaaaatgatccgtgtggaagctgaggcagctttattgaaaggaaggccagtgagtgggactcacatttgatctgccccagagtggggctgggaggttaccgagaacacagtcccgaggtgggggaggccctcagagtcacacctccaggctggactgagaggagctgggcttgtgacccatggggctcttgcccatcacagtgccagcgccagggggtggccagtggcgaaccacgtgccggtaggaggtggccaggtagtcgaagtagttgatgttgagtttccgggcgatgtaacggcccaagtattccatttgctgtgggagcaggtggcgctcaactggggccgggacaggacagacccgagtcgccgtccaggcgtctccttcccctaccaggctgcatcccccgtcctgcccgaagccccggcgccctctccacggcccccagcaccgaagaccgtgttgtatttaccctctgcgtgcggaaacggccccacccaaagaccttaaacagtgatcggtgtcatcgtgtcctgaggagggcgcgtgtctgggcgggacccacctcgtagtgctccgacagctgcaccagcaccaggggctccaacctgtggccgccgaggaccaggtggaagaagcaccttccgtgggctgcggggagagcggacttagccagcctggccgcccctccgacctcccaagctgcctccccgtccctggcgcaccctcccggcccgt

SEQ ID NO: 16112 - DNA, 1439 bp, Artificial sequence
  DNA replication origin
gtgccaaggcttggcccggactagctgggtccgcgcagggctcgcggaggcgacgtctcgcctgcggcctctccgtccccaggagcaccggccggccccacccagggccctggccctgcctctgcccacctggctccgccccattcaggcctcgggcccgtctccctcctcccccgccccgcccttcccagccccgccccgccccgccccgcccagcctcgcgcgcaccgtttggctcctgctgcacgaatgggtagaagctattgttcttgaggcgtctggccaggtggcgctccgggcaggtgagtcctaggaaccagagctggaagcgccagccgatggaggtcgtgggcaggctgccggcccggcccttaggcatctgagtcaggcagaggtggtcagcctggccgctcgtccgctgccgccgcccactgcccacagcggcactcctacctcggtgagcaaattctccagggctgcaggcccaggaaggagcaggagctcacaggcgactgacagggcagcgaggccagggagcggcccagggtggaccgcggatgggttctagaagttctgggcaggttctagaaggggctgctctgttgaccacctcttagggagtccagggtgaggtcctgcggtaggcattaacttcttggccagtccatccactggaggccccctgtatggcctgttcacagtccccatgtgaagggtggatgggtggacaccctaggcctgagctggagagaaatttgcaggcggcgaccactcagtgagccccacagctgggcggggccccaccccctcccaccccccacccacatgcaaccacagacaagctcaccagtgtccccgaggacggaacacacacactggacccagcagtgggcaggcaaaggcatggccacctgcaggctcaagagcccatgggaccaccctgaccccacaacacacaggctctgggccggctgtagccccagtggctccatcaggtataacctgttgcccaaccctaccctgaggaccacacacacagaactcctaaaaatgttttattttaacaaaatgctcaaatatctgaaattgggcaaaggtggagggtgggcaagctggctgaggtgtcccaggtctgtggctgcctagctgggtgaggggctggtgagcagctgctccagacaccactggacttcctccaggccccggtaggcccgcttcagaccccggggaaggcagcggcaggactccaggttgaggtagagcaggcccgggcagccgctgatcacagagctgtggggagggcagaccacaggaagttgagctgttgcctcagaagggctgggccaggctagggagctgtgcctgctggtgttcgacacctggctctgccacccatagccaccaaggccaagcccagttcccctggtgtcctcaggccc

SEQ ID NO: 16113 - DNA, 1848 bp, Artificial sequence
  DNA replication origin
cactgaacccctggccactcaagtccagttctcgcagtgtatggcaccacttctgggtcaaaaaggggctgccctccttggctagagtcagccggtctgacgtgccatacaggcccagatgaagctgctccagctctgcagtgaaaggagtgagcataagctacaaggtgacaagggcccccacacctcacccgcccggccaccacccaggactgctgaccccgacatggcagatcctgaaggccagccggcgtgatgcgcgcacagccacgaagatccagtaagcgcaggttgggagagccgtggagtaggcggcccaggacctcgttgctcacaaagttgcaggttgagctcgccaggcagagctcctctaggctagggaagcctggtccgggagccacccctcgtcccggaggcttgggcagccacatcaggttcaacagccgcagcacctgggggcaaggtccaggctgtagatgggggagggtgtgacaggtgggagaggcagggcgccaggtacctggagctgagggcagcctttctgcagagcctcgacaggcagctgaaggggaatgctattacggttgatgccggtgctcacctccaggacctggagctgggggcagcagctgccctgcagagatggggggagggggtaggtcacagggtcagtggcctggcagtccccagctcagcatctgcctctgctcccaccaatgccaacttaccagcagtgcgcccaggatggctgtcgtctgggagctgtaggtcagccacaacttgcgcattcgggaccctgcctcctccaagaagctcaccacagctgtggactccacctggggccccaatacaagagcacccgtcaccccggcctgggttttttcagggccccttgggacacagggctcaccatggagtgctgtaggtccaggctatggagctggcagcaggctttggctagcatgaccagagcgtcagcagtcacaccgtggcagccggagagcttgaggaaagtgagccgaggacagcactcacctaccagctgcggggagacagaggggcagctggggttgggagacgacaggctaagatccacaagggaaacagacaagtggctggtgccaaccccactctaccgccttagctgtgacctcctttctgcccatgccaggcctacttgggtgtccccgcctctgatacctccctgctggaggaaacagcaggaaaagagaaccaggcaggcaggcagacatccccacggagcagcgttgggcccccaaggtgcctgacccacttcctagagtactgaacagtcccagagtgtcacagctgatgtgcaggacagcctggagctctcaccttcaacacggggtgtacctgagacttccagtggatgagggtcagcctctggagctgtgaaaacctgggccgacagcggaggcagagctgcactaatgttcccacacgagtccttcccacccaacaccttggtgcagggagacggaaggagcctggagccaggggtaaggaagagagggaacccctcaccgattgggcataagccactccagggaagcaaggagcttcttctccgccttgaccccgcccttggcaggccggccgaccagcggggacgacagggtcacggtgtgccagagcgcgggttgggaagcggcctcctgccagcggcggcacacgcgcgcagccctgggaggacagcgtgctgagggtgccggcccctccgtaggcgatgcccccctctcgcagcgcagtagacaccccggctcaaagccgggctcctgggactccaactgggcgcctaaggggctgcgctctcggactgagcgg

SEQ ID NO: 16114 - DNA, 2070 bp, Artificial sequence
  DNA replication origin
gccgctgtgcgcggggccgggcggggccgggttcggacagcaccagcagcatgctgtcggactgcagcaggtggtaccccgagcccctcggcgccagccggtcccaccaccagtcctcggccgagcggggccgcggcgctgcccgggctctgcgtcggacctgccgggaggctggggcagccatgaccaccgacggcgctcggggaagccccagggagcggaacgggcgaggcttatagaccgacaaccccccggttcctctcaacgcccgcccgcccgccgaccagcttccggggcgggacttccggtcgtgggccatgccgggggcgggcccggaaccgccacgggtgagtcgggtcgtggctgctgccgggtcctgcgcgctccggactgaggtggcgtccctgggccggacggcggtgtcccggcgtggcgggaagccggcactggagcgggagcgcactgggcgcgggaccgggaggcgcagggaccggacggctcccgagtcgcccacctgacggtaccgagagggcggcgcccctccgagcagagccgtcccggccactcccctgggatctgacttggctcttgcggtcgcgggcaccgtgaagccctggggtgtgcgtggctcctcctggtaggcgccctttcccggcgtccggcttggggtggtggtggcgttgactccagccccgcctctccctggagaggagggctccactcgctccttcggcctcctcccctggggccgcagcgactcgggccggcttcctgcttccctgcctgccggcggtcccgctgggtacgttttagccaatcctccccatctgcgctcctgcccggggctcccccagttcccctggtctcaccctgttctgactccggctctgcatcctatctgtttctctgtttctttcaagctagaagaagtcttcacttcccaggagagccaaagcgtgtctggccctaggtgggaaaagaactggctgtgacctttgccctgacctggaagggcccagccttgggctgaatggcagcacccacgcccgcccgtccggtgctgacccacctgctggtggctctcttcggcatgggctcctgggctgcggtcaatgggatctgggtggagctacctgtggtggtcaaagagcttccagagggtgagtgggagggaggtgcaggtgtgcccaagactcctgggctgcggtcagtgggatctgggtggagctacctgtggtggtcagagagcttccagagggtgagtgggaggaggtgcaggtgtgcccaggaaggtgggctttggcactcttcctcccttgggcatcatgaccctgacatggcctcctcccttccctgcaggttggagcctcccctcttacgtctctgtgcttgtggctctggggaacctgggtctgctggtggtgaccctctggaggaggctggccccaggaaaggacgagcaggtccccatccgggtggtgcaggtgctgggcatggtgggcacagccctgctggcctctctgtggcaccatgtggccccagtggcaggacagttgcattctgtggccttcttagcactggcctttgtgctggcactggcatgctgtgcctcgaatgtcactttcctgcccttcttgagccacctgccacctcgcttcttacggtcattcttcctgggtcaaggcctgagtgccctgctgccctgcgtgctggccctagtgcagggtgtgggccgcctcgagtgcccgccagcccccatcaacggcacccctggccccccgctcgacttccttgagcgttttcccgccagcaccttcttctgggcactgactgcccttctggtcgcttcagctgctgccttccagggtcttctgctgctgttgccgccaccaccatctgtacccacaggggagttaggatcaggcctccaggtgggagccccaggagcagaggaagaggtggaagagtcctcaccactgcaagagccaccaagccaggcagcaggcaccacccctggtccagaccctaaggcctatcagcttctatcagcccgcagtgcctgcctgctgg

SEQ ID NO: 16115 - DNA, 1254 bp, Artificial sequence
  DNA replication origin
atcgcctgagtccgggaggcggaagctgcggtgagcggagatcgcaccactgcgctccagggcgacagagcgagaccctgcctcaaaaaaaaagagggaaaaagccccgagggtctctagggcggggtctggggacttgcgggtctcgggtctctggggctggtgtgcaggatctcgggcgccccgggccgggagagtcctcaccggtcgccacatctccgaccactgctccgctcttctcccgcccggcgccgcttagcgtctcgcagcccagcaggccctgcgggagggcgcgtagtgcgcacgcgccggagccagagccccgccccgtgggcggtgggcgaggctggaggccacgccccgagtcgtgccggcctccgcggcggggcagcgtcccctggcggcccccagaggcttaccttttggcgcccggaccgcgcctcctgagagcggagggttccagtcccgccctcggcgcactgcgcattccccgggcaggcacctgccggaaggaccgctgtgagaagcacgtggataatccggggagggctgagggcttcctgaggtcctcacggcccggtatccgcctctctttaacactccgtgctatagtgtgattagcgtgaatctctttaacctcaggactccaactcaccacctgcctgtgtgagggccaagatgacgcccctgactgggaactggaagacaaccaggagagtggccaaaggggtcctggagcagctcccgtgcccatggggagaccttcccagggccagggcttcagattctggggttcactttgcagccacccttggtccctgtcacttagcttcttatgggaacgtcagtgacgtcacagcctcctgcagtgccctaggctgctgctactcactctgtgacagccctggctgggtaggggcccaggcccgggcatgccatgcagccagcaaggctactgctggactgacgacctcaccgctactagactgacctcaccgctactagactgacctcactgctactagactgacctcaccgctgctggactgacctcaccgtccccgaacatgccagggatcctcgggcgccaacacgggtcctggcacttactgcctgcaagccctcctagaccccactgtgagcatgaaacaaaacaccatccttgtggaatccacgagggctcctgagtcagcttggcctaagggtgccacagtagctgaaagtgggaggttttcaggcctcaaggccttttca

SEQ ID NO: 16116 - DNA, 899 bp, Artificial sequence
  DNA replication origin
cttctggaagggggtgggtaagatgcgtgtcaaggcctctgccccgcccccccgcagtcctaaccgcagggacagagcaacgggacccggcggcgacgtgggagcggggagacgccgagagcctgagagagggggcctcggagccatggggggcgcgcccctgagacgacgcaggggcgctcagagcagagcccggcctgcagcccccgcccgcccgccgcctcagggcagggcaggcccggcggggaggcgagcgaaggaggtccggggcagcaggctgggcagggaggcgtccgtgattccgggaggccgcctcgcgaggggaacggcgcctgaggcttccccgcggggcccctgccctctggagatcgcgctctccggggcgccgggcacccgcctccgggctgggcggaggggcccctgcggctcccggtgcaggcggcgtcagggctgcgggcgcggctcccgcctgaaatcccagctctcggggaggctgaggcgggcggatcgctagagcccaggaattcgagaccagcctgagcaacacggcgagaccccgactctgctaaacagagtcggccgggagcggtcacgcctgcggtgtcagctacttgcggggccgaggcgggaggatcgcctgagtccgggaggcggaagctgcggtgagcggagatcgcaccactgcgctccagggcgacagagcgagaccctgcctcaaaaaaaaagagggaaaaagccccgagggtctctagggcggggtctggggacttgcgggtctcgggtctctggggctggtgtgcaggatctcgggcgccccgggccgggagagtcctcaccggtcgccacatctccgaccactgctccgctcttctcccgcccggcgccgcttagcgtctcgc

SEQ ID NO: 16117 - DNA, 1832 bp, Artificial sequence
  DNA replication origin
gagtcggggtctcgccgtgttgctcaggctggtctcgaattcctgggctctagcgatccgcccgcctcagcctccccgagagctgggatttcaggcgggagccgcgcccgcagccctgacgccgcctgcaccgggagccgcaggggcccctccgcccagcccggaggcgggtgcccggcgccccggagagcgcgatctccagagggcaggggccccgcggggaagcctcaggcgccgttcccctcgcgaggcggcctcccggaatcacggacgcctccctgcccagcctgctgccccggacctccttcgctcgcctccccgccgggcctgccctgccctgaggcggcgggcgggcgggggctgcaggccgggctctgctctgagcgcccctgcgtcgtctcaggggcgcgccccccatggctccgaggccccctctctcaggctctcggcgtctccccgctcccacgtcgccgccgggtcccgttgctctgtccctgcggttaggactgcgggggggcggggcagaggccttgacacgcatcttacccacccccttccagaagagatgaaggggctcccagcgccgttcctttttttcttggaatgtcagcagagcttgtgtttggcgataagctagccttgcccgtctggctataaatagcacagatggacggcccactcgtgccccagcccagctgtgtgaccccagggtgcttcatgggccggggaggtggccttcagtgcagctccttccaggtgacaaagtcttcccacgtgcaggccactcagtccctccccagccccagcgagtggacaggtcggtttagcctctggttaggagctgctcatggccagtgagcagggctgggtccaggcggcgtttgaggactggctggggctgacagggtcacacaccctgggagaaggacagtgtctgtggtcgccagacccacttaccctgcccagactcccaatctgtctcttcctaactttggggacaattatgtgcctcagtttcccctcatgttgaggtgcacagtgctgttgggttccccaggctctggtcatccgttcatggtttttagtttctggcatcattctgagactcggcagttgcttctcactgctgcggccgggcctgtctgtgggagctgcatcctcctcatctgcaggcgctggaaaaccagacacgatcggacatgcatgtggttctgcggccaaagcacgccctttggttgtgaacttcatgatacctgtgtgagtgttaccactcagaatacttgccgctttcaaggtagtcagctgtggtctagagtcactctggaacgggaggtgtttccgtttgtgcagacagactgcacacactcaccataagaaagcatgagaggttctgacagggggcacccgtttcatcttgtccaaactggaaggctttggaagtcaggggagctgcagggataagtgtcaccagggccgtctcaggtgtgttgggggaaggccctggggacccaccgtctaaaagacggcttatcttctggcagtttagaggtcgtgttctgggtgcggttggggctgtgtgtcacgtgagaattgccctggattgggctctgggaagtccttctgggagatgcagctgcaggctcgccccccaacccataacctctctgggccttggggacctctcctgtgtgatgggaatttcagagaggatagtctgggtgtgctgggcgctccacatttggaggagacaggctcttgctcagcctcatgggccctggcaggcactgtgggttatcagtgcctgttgcttggcagggccatgtggggttcaa

SEQ ID NO: 16118 - DNA, 2142 bp, Artificial sequence
  DNA replication origin
ggtggcagggagtgagggtggcatggacacaggctgcccattctgcagatctttttttgttttttgagacggagtctcgctctgtcgccaggctggagtgcagtggcgcaattttagctcaccgaaacccgcctcctgacttcaagtgattctcctgcctcagcctcctgagtagctggcactacaggcacgcaccaccatgcccagctaatttttgtatttttagtagagactaggtttcaccatgttggtcaggatggcctcaatctcttgactttgtgatctgcccgcctcggcctcccaaagtgctgggatcataggtgtgagctaccaagcccagcctcttttttttttttttgaaaccgagtttcgctcttgttgcccaggctggagtgcaatggcgcgatcttggctcactgcaacctctgcctctcgggttcaagcaattctcctgcctcagtctcccgagtagctgggattacaggtgtgcaccaccacacccggctaatttttttgtattttaagtagaaatggggtttcaccatgttggccaggctggtcttgaactcctgacctctggtgatccactcacctcggcctcccaaagtgctgggattacaggcgtgagccactgtgcccagctctgcagatcttttttggacggagtctcgctctgttgcccaggctggggtgcagtggtgcaatctcagcttactgcagtctccacctcctaggctcaaacgatcctcctgcctcagcttcctgaggagctgggaccacaggtgtgcaccaccgtgcctgcctaatttttttgcatttttggtagagacagggtttcaacatgttgcccaggccagtctcgaactcctgagctcaagtgatcctcccagcacagcctcccaatgtgatgggataattgacatgagccaccacacctggccccgttctactgatcttgagctgagactgacctgcagggccacaggacaccccacgagctcagcagcaccccttgtgctcacacaggcctacgcggctgtaggctggaccctggcttggcctcacccttgggacatgaagggctggccggggtgaggctagaccatgagggctctgacaagaggaccaagcaccggggccccgagcctgccccgctggagactgaggccacctctgcccgcaggtctctgaaggtcggcctgcagatctccctggactactggtggtgcaccaatgttgtccttcgaggggtggaagaggtttgtcctggtgccctgggcacacagtggtgggcatgaggtggtgggctgggtgggactgaggaggcagccacctgtccccatgtgttctccccatgcctgtggtcagaacagcccaggctacttggaggtgatgtctgcgtgtcaccagcgggcggctgatgccctggtggcaggggccatcagcaacgggggcctctacgtgaagctgggccaggggctgtgctccttcaaccacctgcttccccccgagtatacccggaccctgcgcgtgctagaggacagggccctcaagcggggcttccaggaggtgagtgtgcgctcaggccgagggaggtggggcctccagcagtggccccaggctgctctgagcacctgtccttccaggtggatgagttgttccttgaggacttccaggccctcccccacgagctcttccaggagtttgactaccagccaattgctgccgccagcctggcacaggtgcacagagccaagctgcacgatggcaccagcgtggctgtgaaggtatatgggggctgccttgttcagcagtgggctggggcggggcacagtggggccccaagttctcaccacaccctcgcccagtgcaggtgcagtacatcgacctgcgggaccgctttgatggggacatccacaccctggagctcctgctgcggctcgttgaggtcatgcaccccagctttggcttcagctgggtcctccaggtacagccccaccccttccccggccagcaggagcaaacacgtaggcagagctggtaggagcagctggtaggcagagctggtcttcaaccgccatctggcccccaggacctgaaggggaccctggcccaggagctggacttcgagaatgagggccg

SEQ ID NO: 16119 - DNA, 935 bp, Artificial sequence
  DNA replication origin
ggctgccttgttcagcagtgggctggggcggggcacagtggggccccaagttctcaccacaccctcgcccagtgcaggtgcagtacatcgacctgcgggaccgctttgatggggacatccacaccctggagctcctgctgcggctcgttgaggtcatgcaccccagctttggcttcagctgggtcctccaggtacagccccaccccttccccggccagcaggagcaaacacgtaggcagagctggtaggagcagctggtaggcagagctggtcttcaaccgccatctggcccccaggacctgaaggggaccctggcccaggagctggacttcgagaatgagggccgcaacgcagagcgctgtgcgcgggagctggcgcacttcccctacgtcgtggtgccccgcgtgcactgggacaagtccagcaaggtgggctgggccaggcccttggggtgggcacagcgctgggcctgctgagcccagcctcttgctctccccagcgcgtgctcactgccgacttctgcgccggctgcaaggtcaacgatgtggaggccatcaggagccaggggctggcagtgcatgacgtgagtgcgggggggcgggggcgggtcagggcgggctggtgctgtgtccactgcaatgcctctcctctccccagatagcagaaaagctcatcaaggcctttgctgagcagatattttacaccggcttcatccactcggacccacatcctggcaacggtaggaatttaccccaggggtgggggtctcagggtgggcgcagcgcgacctaagaggctgtatccctagttctggtgcggaaaggcccggacgggaaagcggagctggtgctgctggaccacgggctctaccagttcctggaggagaagtgagcgcgggtgggtgggcgtggggcagggcaagcctctcctgccgc

SEQ ID NO: 16120 - DNA, 2082 bp, Artificial sequence
  DNA replication origin
tccccacccacctgtgacctgtgacctgacccacgcaggctggagaccttggccatgcggctgaccgccctcctggctcgtgctctggtccacctgagcctcgtgcccccagcggaggagctctaccagtacctggagacctagggtgcagccgcccagggccggcggggcccttttcaccttgggctgacggaggtggcggggctagaggtgtagacaccccgagccccgtgggcactcgcactggggggctgtgacagcagctgggccaggaggccgtgtaatgaccacacactcctctcaagcaaaaaatgtttttccttgtgttttgtacaaaaagggggtgggaggtagttccgtgtgctggtggtgacggcatccacggggctagaagtgggcggtgacgcggtccgtctccagcaagtcgtccaggatctgcaggggatggaagggtgggtgggtgggtgggtggggatgcacacggaggggcggggcgcgcggggggcggggcgcgcactcactatgtctggtgtggtgccgatcttcttggctagctcgctgcgctccatggtgctcaggtacaggtagcggttgagcagctccccatccagcacgttgcgcacggcattctggagggtgcggcggtccacgtgcagcatcctggggcgtacaggcacaggtgtcagggcaggctggggtggagggggtgctgcacgggggcggggccggggctcaccggaaggcgcgggggttgaggccggcgtggtgtggcagcatggtggtcagcgcgttctgcagcatcagcagccgccggtaggtcttctcctgcatgggcagcagcagcccgatgccgccgtccagggtggctggcaggggtagggtgagggttttggtgtgagccaggccaaccctagggccccccacccagacacacctgctcccccacactcaccaaaccacgtgatgtgcttattctcccacacgaccgactttttgctgagcccttcagtggccccccggcacggggtcctccagaacgtgttcacgtgggcacccacgtggaagtctgcccgacgcagcaggcgcatgcccccgaaactctccttggctagaccagaaaggcctaggggtcactgctagcccagccccggcccaggcagagggggtggaggaagcactcaccttcgggcaggtacatgtacaccatgaggttgcggtcgcggtcagacactggggagcagaggcccagggtcagccccggccacccccagagcctcagctccccagggccctgcccacatacccagaaaacccagctgggcattgtccaccatgaagtccacgctgtacacctccaggggcttggcatcctgggggcgggaagggggcgtcagaggtgccttgggcgggtacccacccagacacgagcaccgccgccacaggtgtacccgcgacaccaggctcagcgtcttgctttcctcctggtagcgcagcagcgaaatgctcttcatgacgtcggctgccaggatgaagttcttgacgctgatcatctggtgtatgtagagctgcgtgtcgatgaaggccatgcccgtcagctcgctggcccgcaggctccacaggaaaatctgggggcgagggcgagggtgagcgggcgcggacggggagccgggtgagggtgagccgggggacacacgccgggtgggactggcacaccttctggccgatggccgacaccaggtggccattgcagtggcacagggcggtcacgggccccttctgctccttctcgtaaaggactttgaacttgttcttggtcaagggctggccaggctcgggcaccacctcaatcacatccatgatcaagatctggagggcatgggtatggctgtgggatggctgtggggatggcagaggggctgccagttcccgcccccgctcactggccccttacccgccctcggcacgtgacctcctccccctgcatgaggcaggtcccggcggccacgtagcctttgaggcccgacacggtctcctcactgcgcagagacactgtcttcatgcaggtcacatgctcccactcct

SEQ ID NO: 16121 - DNA, 999 bp, Artificial sequence
  DNA replication origin
ggtgagccgggggacacacgccgggtgggactggcacaccttctggccgatggccgacaccaggtggccattgcagtggcacagggcggtcacgggccccttctgctccttctcgtaaaggactttgaacttgttcttggtcaagggctggccaggctcgggcaccacctcaatcacatccatgatcaagatctggagggcatgggtatggctgtgggatggctgtggggatggcagaggggctgccagttcccgcccccgctcactggccccttacccgccctcggcacgtgacctcctccccctgcatgaggcaggtcccggcggccacgtagcctttgaggcccgacacggtctcctcactgcgcagagacactgtcttcatgcaggtcacatgctcccactcctgcagctcgatcctgtgggggccaggggcctcaggatgctgcctggaggccttgggcagaccccacccccgccggcccagcctcacctggcattgggaatagcctcccagctgaccggggagatgagctggatggagaaggcctcctgctgggggtggatgtaccgctcatctgtggggaccaagggtgacagtcagagtagggcttccccaagatgcggctgaggatgggagtatggtgtgggcgtcaccacctctctcgatggtctcaaactccttctcctcgccagtcatgcgtgggatgcgggcacacggcgtgttggtgctggtggccacagcatacacctgtgggttagtgagggtcacacaccagtggcccggccaggcccagaaggtccctggtggggtgggggtgggggcagaccttagactccacgtggtaagccacatagtgggccgtgcagcgcagcgggatcttcctgacaggccatggggcatcataggacaggtaggcaggcaggacactgatcctcagctcgccctggggtgggggcacaggggtcaggggatccagggctagccaagggcagggg

SEQ ID NO: 16122 - DNA, 1154 bp, Artificial sequence
  DNA replication origin
ctcaccgcatcccaggcagggtctcaagtgacctggtggtgtggtggcttaaatagggaaccaggatgagaaagcctgtgtgccctcccaaagtcacagagcagccaaggggcagagctagcactcacgtcagctctcctgagaagtgtggaggccaggccctgcgagggcttgcccggcgagccggcagagcagtggtggggaccccaggggctgcagccccagctcccaaccacccctttccagacctttggagcaaccaagtcacaggttccacctcctcgacctcaaccccatcgccctctggacactccttcctggtcctcagggtggagccaatggtcccttctcctgtcccctccccctcagcccccagctggggcagcatcagccagtgctgctgggaaccggccgggccccacctgtctgttgaagtacaggaagccgcggggacagttgacattgtggaatggagcgaaagagtcgaccgggccgtcgatggccatggggtgtagccgcagagcccctcggccggtcaccaagagccagtgaggggaggggccgcagatgaagacctgggggcaggcaccgtgaggatgctgtggatgaggatgctgcggatgaggccgcgtctcccttctaccacagacccctgcaaaggcgctggcctacccctgagtagccataaatatcctcgaagtagcggaaacgcgccacgcggccccgggccccagccccctcctctgcgccgccaccttctgctttcttcttggatggctttggcttcttctcacggaagttgatgttgtgagggacctgggggggaaccatgcaggtcctccaggggctgccggtctgaaacccacaccttgtaccacacccaccccacgccccagcagtccagccactggcaccttcttaaagcggactttgagattgccctggccgagctgagagtcgtgggggaaggcctcgtagataagcagctcttggtccacatgcacctggcaggatgaggggagccatgggggaacgggcagggccatggagaacatgggatgggccatgggaagaggtgggctgtgggtaaggggcggggctgagatggggtggagccatgtatgggaaggggcggggctgtgagggagatgggg

SEQ ID NO: 16123 - DNA, 1118 bp, Artificial sequence
  DNA replication origin
ttcctctcccggccttgcgcagcccgggttggcgccatgtacgccgtgtacaaacaggcgcatccgcccaccggtctggagttctccatgtactgcaacttcttcaacaacagcgagcgcaacctggtagtggccgggacctcgcagctctacgtgtaccgcctcaaccgcgacgccgaggtaggtcgggccctgggagccctcccggctgtccgcgacgtgggtgctctcaccgcccccggttgcagatggaagagccaagccccagacaagttgagtgatttgcttaacgttcctcagcctgaggagccaggacatgaccctgaatctcttgtgctcagatcctttctcacagctgctaccctgttctgcctcccttcctaccccaccgggaagggcgcgctgccctagccgtcttgtttgctcttccgttttttcagcaagttgttcggaaggagcgaacgcccactgtgcgctgggtagcagagataccatgtgaaccacacctgcagacacttggggaaggggaacatctaaataaacacacctgcccctgcagcaagtgctgctgcgggaataaaggagtgaaggaaggagactgtgtatttccagtcgcatgatcagaagagcctgtctgaggcagagcgggagtttgtcgggggaaggacattggtagcacaaggaacaaggccaggtctaggatggggacagactgttgacaggagtcttggtacagtggggcacacgcctcaagggtttgggaaatacagtggtgttttggttgccggagggttgaaagctggtccaggaaagcaacttgcaagaggcagtttctccattgctcttgaagggaggagtacctcttacccaggcccagggatggtgagaggagggtgttccaggcagaagaaacagcctgtgcacaggcccaaagcagttgagggtggagagacatgcacagtgtggccgtggtatagactggatgtggtggtggggatggagggaggtaggccgtggtcaggactattctccacaaagcagggaggagccacaagagggttgtgaataggggctgacccagcaggcagatgggtcagaagctcaggccaaaggaggcc

SEQ ID NO: 16124 - DNA, 1484 bp, Artificial sequence
  DNA replication origin
tacatggcgccaacccgggctgcgcaaggccgggagaggaagggtgagcggggtcgcccacgcaggagcccggccccgcaccgcgcccctccccggcctcgcgctgccgcctcggccgcccgcccggccgcccacctggcagttggagccgactcgagaggaaccgggacagcagcgaactcagtccggccgggcccagaagctgggcgggaaggttccgggcttctgcgcctgcgcagcgccgccgcgtgagcgtggctgcaggggcgacagcgggccctagtggcccgggatgcgggcggctggcggctcggctccgggctgggcgtccggaacccaaacccctagcgcgcgaagtgcggggcctccgctgcgggcggagcagcgcgggttggaagccgcaggggcgccggctgcagcggctcggggtcggccggggggtgcgtccgcgccagacccaggacggctgcagggagaagcgactccgctcgtagctcccgggttcagggggcgcgccggaatccagaagagggggcgcggcgcctcgccagtgtctggggctccgagaaagcttcctagagaggccgcacgccccctctgcccagtgtccccgcgcagagcgacccccgccgccaacactcccgcggaggacgcaggaccccgcgagcccagcgctgtccgcccgccttgctcactgctgcctacccagggcgggcccagtgccagcttccgggagcttggatcctggatcaggcacgggcctaggacctagaaacggaatcatgagaaataaaacaagaaagtatcgttacgcccaagaaaatggcgtggaaatatgtgtttttgttgcatccaaatctacttgctcattgggcagtgggggaagggccacttggatgctcaggcgtgtgacccctgagccacactcaaccgccttttaaaagtcaataggaggcggtggctcacgcctgtaatcccactttggaaggccgaggtgggcggatcacctgaggtcaggagttcgagaccagcctggccaacatggtgaaacccagtctctactaaaaatacaaaaactgtgggggaaagagagagagatcagattgttactgtgtctatgtagaaaaggaagacataagaaactccattttgatctgtactaagaaaaattgtttttgctttgagatgctgttaacctgtaactttagccccaaccctgtgctcacagaaacatgtgctgtaatgaatcaaagtttaatggatttagggctatgcaggatgtgccttgttaatatgtttgtaggcagtatgcttggtaaaagttatcgccattcttcattctcgattaaccagggacacaatgcactgcgggaagccgcagggacctctgcccaagaaagcctgggaattgtccaaggtttccccccactgagacagcctgagatatggcctcatgggaaaggaaagaccttaccgtcccccag

SEQ ID NO: 16125 - DNA, 1506 bp, Artificial sequence
  DNA replication origin
ccgccccgccccaccgcgttcctcctccacttccgggcgggacttactcaaggctcctcccaggtggcggaggagagcccggagctgctgaaccctgagcccaggagactgagcccaggtgagcccagggggcgaccccggaagggctgggggatctggggtttgtgtggagcgcgggtggggcccaaggcttggcggtaggcgacaggccacgcgaacccacgggcctctgcgcccgcagagttgaggctactgccctatatgatcactctgggcgacgccgtgcacaacttcgccgacgggctggccgtgggcgccgccttcgcgtcctcctggaagaccgggctggccacctcgctggccgtgttctgccacgagttgccacacgagctgggtgagcgcaggcggggcctggaaggagatgggcggggccgcacggggctgggaggggagacctggaacaggtgggcggggcctggaagatgggcggggccgcacctggctgggtggggagaccggaaacaggtggggcggggcctggaaggtgatgggcgggatctgacggctgggcggggagaccgggaacaggtgggcggggcctggtggtaagagggcgggaccgaaaggaggtgggcggggcatgtagctaggagggcggagctgttaatgtggactcgcccgcaggggacttcgccgccttgctgcacgcggggctgtccgtgcgccaagcactgctgctgaacctggcctccgcgctcacggccttcgctggtctctacgtggcactcgcggttggagtcagcgaggagagcgaggcctggatcctggcagtggccaccggcctgttcctctacgtagcactctgcgacatggtcaggatggcgaggggaggggctgctctgggccgggagctgagcagaggagctgagcaggggcgctgacccggtgcccacttgctcctcagctcccggcgatgttgaaagtacgggacccgcggccctggctcctcttcctgctgcacaacgtgggcctgctgggcggctggaccgtcctgctgctgctgtccctgtacgaggatgacatcaccttctgataccctgccctagtcccccacctttgacttaagatcccacacctcacaaacctacagcccagaaaccagaagcccctatagaggccccagtcccaactccagtaaagacactcttgtccttggagcatggctgtgctctccttgctgggtgggaagggccctcagctgagaaaggacaattgcggcactgccttctccccatcggggtgcctcgaagccaggagagctgcactcaggacccccaggcagccagcctcaggtgccccctctttgatatggagaccctgcctgcctgaggagtggggtcagggaaattcacccgggtgtgtgggcagcaggtgggacctgtccccaaacaggaatcaaacttgcttacctataactgcttacacagccgagggcttatttctctg

SEQ ID NO: 16126 - DNA, 1767 bp, Artificial sequence
  DNA replication origin
ccgtcggcgaagttgtgcacggcgtcgcccagagtgatcatatagggcagtagcctcaactctgcgggcgcagaggcccgtgggttcgcgtggcctgtcgcctaccgccaagccttgggccccacccgcgctccacacaaaccccagatcccccagcccttccggggtcgccccctgggctcacctgggctcagtctcctgggctcagggttcagcagctccgggctctcctccgccacctgggaggagccttgagtaagtcccgcccggaagtggaggaggaacgcggtggggcggggcggggccccagatcaccgcgggaggcggagccgcaggcctggggtggggctgggagtgtgggcgtgggaaggggtcggtgggaggggctccgcgtgggatggggcatctggcgcccactcaccaggtctgcgcgggagccctcgtgggggggcttgggctgccggagctcgctgggtgccagctgcagggacacaccgtggctgtggcccccgtggctatggctgctgtggccgcagggcccgtcctccaggtcctgtgagggtaggtgctcagtgtccaccaggcccccagcacacccacccgccgggtaccttcccaagaagcctgacctccgggtccctgggcagcaggagattgaagaggttctcaaacaggaagaaggcgtagagcccggccagcatagccaggaggcgccaggtgggctgtgggctgaggccctcttcgctgtgtgtatgcagccccagcacctggggagtaggggcgctgggctgggggggaggtcccagggcgcctcccaccaagacccagggagaggggtcaggaggtggggtgggtaaggtccctgggagggcacggcctgggagtccatggtggggaacggagggccagggtcgcgggtttgtgggggcagaccttgggcgtcagatgcaggacagcgtccccagtgactgcacccactgccaggctcaggaaggtctgcaggatgtagtgggtgacccccctgcagccagtgcaggtcagcagcaggaggccaaagaccgcgcagaggcagatgagcagcgtggccagggagccgtacagataccctgggggcgggtgaggcggctgtgagagcttttcttccagactcagcccctgcttcccgggcgctgctcaccagagctgcaggccgtcagtgtgggccaggccctcactcaggctgaccctcctgcctcaaagccccactctcctggcgacgccaccttcccctgtgtctgttgtttctacttccagcccctgctcactctctccatccctcatcctgggcagccactccttccttcctacacgggctccacctctgtgctgccagcacaatgtcggcgtgggcactcactctctgactggctgagctggtcctggacggggggcctggactgggaggtgcaggctccactcagctgctgttggagcagggcagggctcagttgggcccaggcctccggggtcaccccagcctgttccgacagtccatatgcagccatcacgtccctggcactcaggcatacctggggggtggcaggacaggctcaggggcccaagcagaccccggtgaggccccatcttaccccagggcgcagctcaccgtgtcccacacactggagctgttgctggagctgatgaggggcacagggtcccggctgctggctcccctgtgccgatgactgtggtcactgtgggcctccctgcccacccccaggcgctgca

SEQ ID NO: 16127 - DNA, 993 bp, Artificial sequence
  DNA replication origin
gacttgaaagggaaacaggccctcggggaagcccctggccaggcctgcctctcccctccctggtgggcccagcgcccctgctcacttgtctctgcccacagtgcctgtctgtggaggacgccctgggcctgggcgagcctgaggggtcagggctgcccccgggcccggtcctggaggccaggtacgtcgcccgcctcagtgccgccgccgtcctgtacctcagcaaccccgagggcacctgtgaggacgctcgggctggcctctgggcctctcatgcagaccacctcctggccctgctcgagagccccaaggccctgaccccgggcctgagctggctgctgcagaggatgcaggcccgggctgccggccagacccccaagatggtgagggagagtccaggcagaccaggggagtgggtgaggagggtcccacggcccatgggacccggcctggctgcaaagccttcggggagcctgggggcctggggagacgcccaggagtcggcctgcggctggggattcacaacgtggggctcactactgggcagttgggagcctgtaggagccccgggagggacctcatgagggaggaacccagaggcctgagtgggagcctgaagcagctgggcccggcagggagggctgtggctccagggaggggcggggctggtgggggcagatcctgtagttggggtgggagatgcatccaggggcagcggggtggatggcagaaggtcacaccaaaggctgaggcggaggccccctcttccccaggcctgcgtagatatccctcagctgctggaggaggcggtgggggcgggggctccgggcagtgctggcggcgtcctggctgccctgctggaccatgtcaggagcgggtcttgcttccacgccttgccgagccctcagtacttcgtggactttgtgttccagcagcacagcagcgaggtccctatgacgctggccggtgaggcctgggctgggctgtggaggg

SEQ ID NO: 16128 - DNA, 1385 bp, Artificial sequence
  DNA replication origin
acccagcctgggaggcctcagggaggaactgaaatggagactgggactggagtctgcccttgggttccctttggggccagcctgccagctctctgccttctcttgcagcccctgggaacaagccggagctgtatgaggtgagtggtgggtgcccacccggccggcattggccaacagcaaatgcctgtgtggcctcaccagggtcctgcagcccctgttggcactggcccacagagcccgctctctccggcaggaagtgaagttgtacaagaacgcccgggagagggagaagtaagtccaggcgcccaggctgtcccaacacacccatgcgcatctggctgccctggggcagcccctccagacccaccccaaactgaggggtgggaggacgcagggtcagtctggggaactgttcctgaggcactccaggatggagcaagaggtgggcagagcgcccgcagtggcacctccgggcagggggtagcactctgggctctaggcttggcaccccggggcctggcccgatagacaggtgtgtcctcaggtacgacaacatggcagagctgtttgcggtggtgaagacaatgcaagccctggagaaggcctacatcaaggactgtgtctcccccagcgagtaagagcccacgtcctgggaggtctgttcctgccctggggggcttgggtgctccataggcagcaagagcaggcgtctgtcaggctgggaggcacccacttgtgtggggcccacccagcgtgaggagggtgcccctgggtctcagccagggaagtcctgggggctggtgagggaggcgggcagaggcgcagctcctggggtgtcatccggcccactcccccaccctcatcccccagcacaggcaaccttaaaaaacggtcgagaggcttggggatgtcccaggatcttttgggggggctttgttcaatgaagtgacaagaccgtcacaggccaccgcacaggaccatgagctgtggatgcggccatcacaacagagggctggtcgctgtggttcagagggtgggcaggggttgggggccggggtctccacctggagccgagctacaagccccactacgtgctcagggcctcacccccaaaagctactagcagcccctcctccttgctcggcctgcctttgcctgtcgcctggtcctctctggaagctgctttgcctctggaccagccgagggggtaggatgagctgggtggggctggtcccatgcttgggcagcagctgacctctccctaggtacactgcagcctgctcccggctcctggtccaatacaaagctgccttcaggcaggtccagggctcagaaatcagctctattgacgaattctgccgcaagttccgcgtgagtgcctggtc

SEQ ID NO: 16129 - DNA, 1316 bp, Artificial sequence
  DNA replication origin
cacagcctctcccctgggattggtgacacagggtgcccaggacccccaccgttctggccacaccgaagctcatcatctctgcccagcaggaccaagccagttctgtctggaggtttctgagccctcagtgctcctgcaatgaactatttagcccctggccacccccaaggctgtacgagagcagggtcagatacctccccacccccgatccccaatacccaatactgcccgtcagcccctgcagaagcggctgaaagcctgcgcccttccagccacactcacctcctatgcccggcgtggctgggatcccatgaaacatcctctaggctctggggggggcacagcactgagacctggggagcagagccagggccgactcaaagatggcccctaagccaggcgctggctcacacctgtaatcccagcactttgggaggccgaggtgagcggatcacctgaggtcaggagtttgagaccagcctggccaacatggtgaaaccctgtctctactaaaattacaaaattagccggacgttgtggcatacggttgtaatcccagctactcaggaggctgaggcaggagaatcgcttgaacccaggaggtgaaggtttcaatgagccaagaccgagccactgcactccagcctgggagacagagcaagaccctgtctcaaaacaaacaaacgaacaacaaaaaaaaccgacaaaaaaagacagcccgtaagtgccaggtcctggagacccagggctccatgaagagctctcctaagctcaataatggtgaacacacagggtgctataggggctaccagaaaaagtgaggtactatggacactcaggagagcggggcgggggctgcagtggagtgtggttcaagctggaggttgagggaggttatgagggcggcaggcagctgtttgatggcccacgaggagagtttggggcacaggaaacaacacacttaacagcccgcctttaagtaggcatgaacttggaggaaccaacaagctgaaggtgcagcttctcgaaagagggggtcctagggaatgaagatggagaggtgcccctagttgggcagcgagctgtggagaaacaatgggagcggggcccgtgggagggtcctgcctagcacggaagctgggccagctccagacgttctctctttgaaagtggagccgtcagatccgccgagggatttgagataggattaaaataaaggagttacgaacgacacccctgtttttggcccaatgggccgggcagtaagataaactcagacggagaggggaggaggagcgggcctggcgggcaggcgc

SEQ ID NO: 16130 - DNA, 1895 bp, Artificial sequence
  DNA replication origin
aatttttggtatttttagtagagacggggtttcaccatgttagccaggatggtctcgatctcctgacctcgtgatccgcccgcctgggcctcccaaagtgttgggattacaggcgtgagccaccgcgcccggccagcagcttcatttattaggggcttcggtgagggtggggaaaggcagcgccagggtcagaggcgccgaaagaagagcttggagccgtggtccagcgtgcactcgccggggcccggccgactgggctgcagctggcgcagggcgtccctgtcctcagcgcagaggcgtctgctgcacagctgcagttcccggagctgcgcggctatcttgtcccacaggcccaggcccaggggaccctggacggcgcagcctgcggaggggaagagggcagacctcagcgctgcgggggccggcggcgtcctggtgcccgcggcaggctccagggaacaaactcgctttcgctgagggccccagggctgtagcgaggggcagtgggcagagctccggagaggccccatgactctccaggaaggggtgggatcatctgcacagccagcggtcagacaggaggaagggtggctcccttctttacctctgacagtgcccgatctcaaagtccatgcctacacgtcagtctccccacccataagaaggacataatggatctgcttgcaaatctgtacatcgtgggcctgagtggatcaagagaacactaagctcaggaattcagggagctgggtgggaaggtacagatgccaggaactgaggtgtggggaaggggtctcacaccagcactcgggggccttcctggaaaaggcggcctggccctgggaggtgaaggggagggggcacaggaagaaagcagagccccgcttcgtgcacattcacttaagccctcatcccctggagggcacagcctgccccggccccagtggggcaagccaggtcatcaaagcccttcctggggttgtcttccagacagctcaggttggggactgccctgatgtggctcaagagagaacaagctaaatcagaccacagccctgggcagggttgtgtcagaggagcccctgccaggaagtaggagggtcccttggcagctttcaacaccctgaccttgggatcccttttcctgccagggacaagaagaaagtccctgtggaacagggtcttgcctaccatagtctgctctgaaggttgggttggagagaccagaggcagatacccacctcgccccctaacccatggttttaggagctgggatcatgccccttttctgtcactgtcactctgccccctgctgccccagcctcatggagcccagccttgctgcctggctggtagcagtgacagccccttaggaggaggcacctgggtctcaggcaggtccctgaaaaggccgaacatggcaggcgtggccaccataccagcactcacctgacaggccaaggaagctaaggccttggggccgcttttggagggtggacaggagctcttccaagctggcacagctgatctcagggttggcagacagatccagtgagatgagtgaggggcacagagagagacatctgagataacatgggaagaagtgcaaaggttggcttccagagaggctgtgccccaacactaggaaagctgcccagacaaatgccagctcagggagcctcgggccagacccaggggctctgcctcagcctggcccagtagcaggtggccctctagggttgggggtccttcccaggggtcagggccacagtggccagctctgggtgtgcctggcccagcttgggctcctctcaacactccccagagagctgactgaggctccaggtcataagagcagtgccctcatgtgggccgaggcacaggaatgacaagga

SEQ ID NO: 16131 - DNA, 2218 bp, Artificial sequence
  DNA replication origin
gctgacagggagatggcaaaaagcagccgaaagcctggaaagtcaaacccaaggaggagggcctggcatgggctgggagctgctggggaagcttcccagaaagcttgtcccggggggtgtggaatctggcagtgactggtggagctcagggtgctgcagacccaccccggcccccagggcctcacagtgctagacccacaggcatgtgcgagtgggctctacagcaagtctggtgggtgacccctggggctgttgaaaaggggctgcctggtttgccctctgggattcagagggcagaaagggccggccttaccctggtgacatcacatccctcccgcaggggagcaccaacaggtgctgcaggccgtggagctccagggcttgggcctctcgttcagcgcctgctccctggccctggaccaggcccagcttacacccctgctgcgggccctcaagctgcacacagcactccgggagctgcgcctggcagggaaccggctgggggacaagtgtgtggctgagctggtggctgccctgggcaccatgcccagcctggccctccttgacctctcctccaatcacctgggtcccgaaggcctgcgccagcttgccatggggctcccaggccaagccaccttgcaggtataggcacagagagcagcaggccctcaacagcggggagttggggttcccattctgcaggtccctgggtggtctagggtagttgggagagccagccagtgcccggctgtaataggctatgccaggcaaggtggggaagagactgccaagccaagccccaagggggaccctgtccgtgggactgctgggggctcactgccagcctgtgtcttccacagagtttggaggagctggacttaagcatgaaccccctgggggacggctgtggccagtccctggcctccctcctgcacgcctgccccttactcagcaccctgcgcctgcaggcgtgtggcttcggccccagcttctttctgagccaccagacagcactgggtagtgctttccaaggtgagctgaccaggcactccctgtccactccctagccctggggcattgagggtttccaggactttcagagggggcccaggctgggcacacaggggcaacacctgtggtcccagctacttgagaggctgaggcgggagtatcgcttgagccaagagttccaggaaagcctggcccacatagtgagaccccatcccttaagaaaaaagcgtctaggccgggcgcagtggctcacgcctgtaatcccagcactttgggaggccaaggcgggcagatcacgaggtcaggatatcgagaccatcctggctaacacggtgaaacgccgtctctattaaaaatacaattagctgggcgtggtggccggtgcctgtagtcccagctacgcaggaggctgaggcaggagaatggcatgaacccgggaagcggagcttgcagtgagccgagatcgcgccgttgcactccagcctgggcgacagagcaagactccgtgtcaaaaaaacgaaacaaacaacgtctaggggcctgggatgccagacctggctctccgggagggcctggcacctgggagcaatagatggatgtgtgggtacagggtctgcctccgaggggcgtctggtgcccacccagccaggctgacccccgcaggacacaccgagagcagagtccgggcagctagtgtcctgtggtccccatcccgtgctcgccagctgagtgctgttcgcctgaggcagttccactgtgagcccactcaggctgcagagactggggtcccagtgccaagaggctgggaattgggtgtcatccagggggagtgtaaggggggcagcaatggtcagtgcactcccctggcacccccactgtgcagaggcatgtggcccaggaccgtgtggttgtggggtgggagagggcaagttgtccagaactgggggcagccgagcttggaagtctggccccgccctcccagctgggagaatctgggcgagagcctttgcctctgcacttgccaccccaccctgcgagcactgcggtagtggtttccccaaaggggtcctgagggttctgggcccagaacttggggtgggtacagggctgtggccacgtggggctgacggattctggccccggtgcagatgctgagcacctgaagaccctgtccctgtcctacaacgccctgggagcccctgccctg

SEQ ID NO: 16132 - DNA, 1282 bp, Artificial sequence
  DNA replication origin
ctcccatccgggttcgagttcaagttcaggatcatctcttcctcatccctgtcccacacaggtgaggcatcgcctgccctaccccgcagcccacctgtgcagctccatgccagggtgctcgtgtttgcatgtcagggtggggcgtgtgacgagggctccctggtgtgttccaggaggatcctgtggcccccaggaatagcagaggggctggtggtgtgctgggctgcagggagaggaggggccggctacctgggaatgggagaagcagctgagggggcttctggccctgggcagggatggcgggtccctggggcattaccccggctgtgtgcaggcagcagcagcagcgcctctgtccctgcagcagtgacacccactctgtggcctggctggccgagcaggcggcccagcgctactaccagacctgcgggctgctgcccaggctcaccctacggaaagagggggccctgctggccccacaggacctcatccctgatgtgctgcagagcaatgacgaggtgagccgcagagcggagggggagccagggcctcaggcaccgggagcccccgggtggctcatggctgcagagcaatgatgaggtgagccgggggagcccccaggtggctcatgacggtgccttccaggtgttggctgaggtgacttcgtgggacctgcccccgttgactgaccgctaccgcagggcctgccagagcctggggcaaggtgagggccaggagagctgcagtttctgggtgaggtcgtacaagggggttgggcacacaggctccaccagcccggttcattcctgggcctcgggtgttttggggtgcacctcccccagcctggtgggtgctgtgtcctgcacttggatgtgtgggtggaagggagaggacagccctcagcccccatgatctgctgacagggagatggcaaaaagcagccgaaagcctggaaagtcaaacccaaggaggagggcctggcatgggctgggagctgctggggaagcttcccagaaagcttgtcccggggggtgtggaatctggcagtgactggtggagctcagggtgctgcagacccaccccggcccccagggcctcacagtgctagacccacaggcatgtgcgagtgggctctacagcaagtctggtgggtgacccctggggctgttgaaaaggggctgcctggtttgccctctgggattcagagggcagaaagggccggccttaccctggtgacatcacatccctcccgcaggggagcaccaacaggtgctgcaggccg

SEQ ID NO: 16133 - DNA, 1255 bp, Artificial sequence
  DNA replication origin
ccccgagacctctcctcctttgagcccctgcccagaacccccctctaatagcactagactcccagaggcctctcaggcccatgtcagggtctccccagggcaggcggcaccagccatggccaggcctcggaggagcaggcatgggccagccagcagcagcagcagctcagaaggcgaggacagcgcaggccccgcacggccgtcccagaagaggcctcggtgctcggccacagcacaacgggtggcagcctggacgcctggccccgccagcaacagggaagcagccacagccagcaccagccgggcagcctaccaggcagccatccggggtgtgggcagtgctcagagccggctggggcctggcccaccgcggggccacagcaaagcccttgccccccaggcagcgctcatcccggaggaggagtgcctggccggggactggctggagctggacatgcccctgacccgcagccgccggccccgcccccggggcactggagacaaccgcaggcccagtagtacctctgggtcggacagtgaggagagcaggccccgtgcccgagccaagcaggtccgcctgacctgcatgcagagttgcagtgcgccagttaacgcagggcccagcagcctggcttcagaacctccagggagccccagcacccccagggtctcagagcccagtggggacagctctgcggcaggccagcccttggtgggtatgcagacctggagcagagccctctccccactccgggcaggcaggtgtagggtggagcccactgtggctcctgactcagccctgctgccttcacctgccagggtccggccccgccccctcccatccgggttcgagttcaagttcaggatcatctcttcctcatccctgtcccacacaggtgaggcatcgcctgccctaccccgcagcccacctgtgcagctccatgccagggtgctcgtgtttgcatgtcagggtggggcgtgtgacgagggctccctggtgtgttccaggaggatcctgtggcccccaggaatagcagaggggctggtggtgtgctgggctgcagggagaggaggggccggctacctgggaatgggagaagcagctgagggggcttctggccctgggcagggatggcgggtccctggggcattaccccggctgtgtgcaggcagcagcagcagcgcctctgtccctgcagcagtgacacccactctgtggcctggctggccgagcaggcggcccagcgctactacc

SEQ ID NO: 16134 - DNA, 1541 bp, Artificial sequence
  DNA replication origin
tggggctccctggaggttctgaagccaggctgctgggccctgcgttaactggcgcactgcaactctgcatgcaggtcaggcggacctgcttggctcgggcacggggcctgctctcctcactgtccgacccagaggtactactgggcctgcggttgtctccagtgccccgggggcggggccggcggctgcgggtcaggggcatgtccagctccagccagtccccggccaggcactcctcctccgggatgagcgctgcctggggggcaagggctttgctgtggccccgcggtgggccaggccccagccggctctgagcactgcccacaccccggatggctgcctggtaggctgcccggctggtgctggctgtggctgcttccctgttgctggcggggccaggcgtccaggctgccacccgttgtgctgtggccgagcaccgaggcctcttctgggacggccgtgcggggcctgcgctgtcctcgccttctgagctgctgctgctgctggctggcccatgcctgctcctccgaggcctggccatggctggtgccgcctgccctggggagaccctgacatgggcctgagaggcctctgggagtctagtgctattagaggggggttctgggcaggggctcaaaggaggagaggtctcggggtcaaacagaaggctgcttggggtgtggaaggcctgggagctgtggggatctgtgggagagagaatgcgtgttgaggcaggggcccggcacctcccgctccacctgtgatggagcatctcccgaaatcagggcccggggactctcagcgtaggcacagcaaccccagggacaagggacgccctgcttgccttggcccgaggcagccgcctggagcagcatctccatggccctggccttctgccgcgtctccaggtccaggtccctgcggtacagcttcacccactgctgcagcgtctccagcgggctgaggccctgtgtggcatcagttgagcaggggcacagcagcccccataacctcgcccttgccctctgccccaccaggctcacctttcgagtgcggagggtgacggacgccccccgttcaagcagcagctcagccacctcgaagtggccacagttgagggcatcgtggaggggggtgatgccttcgcagccctggccacctgggtcgtccactgcggccccgtggtccagcaggaagcggacaatttctgcagaccaggagacgtaagcccagctcccgatgccccgccaggactgactcttcgccccacgtgtccaccaaggtgcgccaggctccttctgtcccttgctcacctagatgcccgtagttgcaggcctcgtgcagaggtgtccagccacagtagtcccgagggttaagggggtggccctgtgaccaaggacaggaaggagcctggccctgtgtacctcacagcctggccccagccccgtgagctctgcagcctaagctgagcccagggcctcagtcttagagcccagagcaagtccgtggccctgccctctcctcctccggcctaggtgtca

SEQ ID NO: 16135 - DNA, 1680 bp, Artificial sequence
  DNA replication origin
aggcccagcgtccccagctgcaggtgcgagagcccatcccacccatactggctccccggtgagcccagcttcgttgcagcctgcctgccccttgtgccccatccccatctttctctgcgtccacagcccccagtcctgagctgagcatccctctgctcctcagaggcaggtcttgcagcatctccataccgtgcagctgaggctgcagccccaggaggcccctgagaccgaaaccagactacgggagctcagtgtagctgaagatgaagatgaggaggaggaggcggaggaggcggcagccacagcggagagcgaagccctggaggccggcgaggtggagctctcagagggcggtgagggccagcggcaccttgcatttccctgggcctgctctgggccgggctggagaggggtgtgctgtgctgctgtggagcctgcttagggctgtagcaggaacagccacaggcaggcaggacggccagtgctttcccggaactggacagagaaggtggtgacccgcagggagcctggggcggccttggcctcctggaggagacagtggttgggagtcgagtgagtgtcagctggggcatggtcccgttagagaggcacgtgccatctggggccaggggtgagacggtgcactttgaagagccccggctgcctctgcaagagctgagcaccttcctgaaacccttcagagcaggcttgggtttcctccagaggctggcgacatcagctgcacggagggcaggcatgagggactggctggagcggggcttggactgaagccatcttggccgtggtgcagggagagagggctgagagcggggttagcgggtagctgggaggctggtttctgactgagtggtgggtggcaggagcctgtccatgaggcctgttggggggtgttccagggaaggctgtgacttcagctctgaactcgagggcgtcgttagaaccctgagtggccaggcagctgtgggaagttggggccttgccaggttggttgctggggggaggtggatcaggatctagaattttggggaatgctgctcagctggtgggcacagtgaggagctgcggaaagacccagaggcagctggcagggtgtgaagggcgtggtgatgaggggtcacccgaagcagggacggaggcgggtgtgtctgctgcctaggcagggtggaggctgcaaggtgcaggatacccaggctccagggctgacctggcctgacgacacagctcaggagatgggggtggataaggcgtggggtggaggaagactggcccacgagccggtctgggcgtggggatgagtggctggcgcatggacagagggggcctcgggcaggccttctgtgggagggccaggcgtgggttagggcagaaagctcaggggtgtgtctcaagtgggcagagggatggtgggcaggagcagggtcccagcagggtcagggagacatggaggcagcgctgggaccattgctgaggagcccccagagcccagcagcctcagagctcagccctcccgtctctggctcctttgtacctgggagtttggggagcttgcagcagggtgggggctgctaaccttcacctcccacggactcccctggggtgggcttggctctgttccagaggacgacaccgatggcctgaccccgcagctggaggaggacg

SEQ ID NO: 16136 - DNA, 2092 bp, Artificial sequence
  DNA replication origin
tccggatcccgcggcgatccgagcatgagcctggagcgcgagcttcgccgtaagttcctcggggaccccttcctccgggggcgcggaggctggggagggcttgggactcggccccggccccggaccccgccgcggaggcccagccctcctcttcctcccacagagctgagcaaggcgaaagccaaggcgcagagggccgggcagcggcgcgaagaggccgcgctgtgccaccagctgggggagctcctggccggccatggtgagcgccgggaccaggaggcgggaggcagggccggggcccgggcccgggccgggatcgggggccggggggcgacgggctcttccggcagacgccgccccagggccgccctcgcacccgcgacgcctgccaggccgtgctgtgcccccgcctaggccgctacgccgaggctctggagcagcactggcaggagctgcagcttcgggagcgcgctgacgaccctctgggctgtgccgtggcccaccgcaagatcggagagcgcctggccgagatggaggactacccggctgccttgcaggtgcgggcgccctcactggcctcgtccagcccggtcggcctctggagcccttttctgaggagggaggcctggtcttcgccgtcaggagcctcgggctggaggggacacctgacctgacgcagccttgccttcaccgccccgggccagtcctccggtggggaccccacagcctttcctgggactggggcaggagtaggtttcctggcaccagaaaccattactgaacgttattttagctgtgtttgtgttgggggaggtcaggccccatcccaaaagctctccctgaccctggctgctggaggcaggactgcaacccccccgccaactcccagctgcccctccccacgtgacagcgttggctgcatacagcgtgaagccactgtcaccacagagagcccttggcatgcagaggaggggcacgtgtctggccttggcctgctctgtgggggttagggggagcaggctctttccttagcaagaacagggtctctgggaatctggcggtgccggtttgcttgaggcggagtcggctcacagcagtgacttccttccacactcagcaccagcaccagtacctggagctggcacattccctgcgcaaccacacggagctgcagagggcctgggccaccatcggccgcacccacctggacatctatgaccactgccagtcgagggatgctttgctgcaggcacaggctgcctttgagaagagcttggctattgtggatgaggagctggagggtgggcagacccctccgcgttttctgcctcctgaacttcgggccgaagaggctgcagcccagcacccccgcagcctccttgggcaatcccgtcttctggagccctccctttgcaaggctcttgtgtgaggggtgcatgccccgctcaacctttcccctggagatcgtcagctctttatccactctgtgctccatctgccgcaggacacttgcacccacctcgggaggagggagggggtaggagaggcgctgcacaggccccaaatggggcccaaagctggaaaccccatgtggggaggaagtggctgagtgtttgggggggtatcttccagggacactggcccagggagagctgaatgagatgaggacccgcctctatctcaacctgggcctcacctttgagagcctgcagcagacagccctgtgcaacgattacttcaggaagagcatcttccttgcggagtaaggccctgccccgccccaggagggagtggagtcccttgttcctggaggaagtagttaggggagtatttttcccagagtcctcctgagagagcagtctggctgggcctcatccccccacctctcacacctgtgccacacactgggagaaggccaggcatggttagggccctgagaccacagcatggcagggctggggcccgtgtggcatcagcagctgtcatggacactcctgggtgctcagtggtcgtcacccctctgcaggcagaaccacctttacgaggacctattccgcgcccgctacaacctgggcaccatccactggcgcgc

SEQ ID NO: 16137 - DNA, 1304 bp, Artificial sequence
  DNA replication origin
caggctcatgctcggatcgccgcgggatccggacttcccgcgctgcgccgcggccccgcccctcgccgccgacacgcaggccccgcccctcgccgccgacacgcaggccccgcccctcgccgccgacacgcaggccccgcccctcgccgccgacacgcaggccccgcccctcgacggcggcggcgggcgcggggcattccgggaagtacggtcggcccgcccgcggcatcctcggagttctcgtgcgggaggagctggggcggggtggcggcgacaactggggcgtcccaccctaggggccgtcttcccggacgccgggttggcccgcgcgtggagccctctgcccggcccggggagtgcctggtggggaccccgttcctcctcgtaggcggcggggacgcgggaggccgggggcccggagccagcccgtccggggtcgcagcgcgccctgggtggggtcttctgggctgcagcccccgtgccgcccgcgctactcatggtggacgagctgtgccgccgccccaattcctcccgaaattcacacacacagcctgctcacaggcgcaactattaaaaacgaacgtagtgtccagatagactgacgataaattcacgagcatttggctgtggggacgtaataaggtgtcaggcgcgctcctcctccgcagaacgcagctgggtcacatttggggactcggccccaaggactgttttgggaggggaatgtgctttccatagtgaacaagtattgtttcagcaatgtgtatgccagctgtattctcggaagagtcagtgaacctgtgcttcagctgcagaagtagcccgggcacagtggcccgcactgtaatccgagcgctatgggaggcccggtcaggaggatcgcttgagcctagcagtacgagaccagcctgggcaacatagtgaggccccatctttcgtgtgtgtgtgtgtgtgagacggagtctcgttctgtcacccaggctggcgtgcaatggtgtgatctcggctcaccacaacctccgcctcccgagttcaagcgattttcctgcctcagccttccaagtagctgggactacaggcgcgtgccagcatgcccggctaatttttgcattttagtagagacggggtttcaccatgctggccaggctggtttcaaactcctgaccttgtgatccgcccacctcggcctcccaaagtgccggtattacaggtgtaagccaccatgcccagcccgataccccatctttatttaaaaaaaagaaagggagggagggaggaaaagaaagaaaggaagaaagagaggg

SEQ ID NO: 16138 - DNA, 1323 bp, Artificial sequence
  DNA replication origin
cgaccctacctggatcttcctgcccaagcctcagtctcaagaccccatgacagagtgtagggggaggcagtgtctctgagtctttcctcgggggacgtgtgcgggcacacagatgggggcggggcaggctctgacccccaggccaaaccaaagcccccacgctgtccattcacagccatgccttcccctcgaacaaaacagaaagtacgaaacaaggctgccttttaattgctatcagatattcggatatcccgtctgatgtcagcaaggcccccgcgccccgccggaacccgcagggatggagcagcaccgccgcctgactgcacagaagggctggggcagggtcgctgtgcctctcggcctccttgctgccaccgtctctgagcctcggggcgcctggtgcaccgtctcctcttcgggtcagcccagcctctggcggccctcggaaggaggggaggcaggggtcgggggggtgagccggaggcgggggccccgtcgcgcacgcatgcagacttgccctgtgttggcttcgtttgttctcctcctttgctaaagtgatcagatagtcctgtgaagcagctgccagccaggtggacagggcagcggtgctgggatgccgcccgtgggctcctcggacatcctgaggccccgccctacttctgtatctggaacaggaagagccgcaggttgatgttcttggcagccagcagcttgttgcactccacggagtcaatgatgggcagtggcacgtagtccgtctcgttgctctcgttggtgaagacaaagtggtagatgacggggctgatcctcacgtcgtcgtaggggcccttgagcagcaggaaggagcactccagcggtgccgtgaccttgctcttgaggaggagctggaaggagagcgtacgcttgcaggacaggttggggttacgctccgagtcgttgactcgagccttcaggacccacgtctggttcagcactgtgaacctgggcgtctcatagtacaggcgcgtgatgaagtcgtctgtgcggtacggccggaactggacctctgtggagacagacagggccggaaagagccggctgttagtgtgggcagggctgggcagcaacgccttccctgaccaggccgagggcaggctcagccggggaggaaggcaacttacccggacaccgggctctgcttgtcacaagcaagccaaacgcaactatggcaaatggaggtgcacacaagctttgaggggaacaaccacaaacagaatcaacatggattagctggagagtccagaggctgcacgtgtcaggccacaccccaggcgtgcccgaccc

SEQ ID NO: 16139 - DNA, 1089 bp, Artificial sequence
  DNA replication origin
cctggtgcctgacacccaggagggtgggttagagccagtgccctctccccacccaggcacactggggtcctcccgacaaggtcatgccacagcaagaaggacttggagatccagagtttggagaaatggcaacctagactagccctacaccacctgctacaaaagtagctcctcatccaggcccccaattcaaacacaagcagggaaacaaggccccattagctacttccagctcctgtaagtgtaaagaaagctgacagagaacctgcttcatttctcacagggactggggagttgaaagagagggaaagacacagggaaggtggggacactgtactctgcctctgggtgtcaaccagtttgtccctgctgctacctgggaaagggcatgtcaaacccacctgggccaggtaccctaacagccctaggctgcttaagggctgagtcccactgccatgcggatgtgaagatgggggaggaggggtgggccggctcctggagcactggctgcctaggaagcctggcctggcctgggtgaggtgggcaggagcctagcgtggggcatggcaagtccagttggatgtggggtttggctgggactggagaaggtacccaaactgtggggcttgttgcaaatggttcatcccgacaaacagcaatcccctctccttactgttcttcaggatgaactggaaatggaccaagagaaaggattcttccacccaggagggtagaaaaggaggcgtccataggatgttcaggagtggagggacaaactcgggggtgtggctgccggaagaatggggaaggagctctcgagcacaggactctgagcccagggagcttgggaccgggtgggttgcggggagcagttgcgggctaaggatcagtttgaggctgtgggttgggagagtgttcaggggaccgtggggaagtctagaaaaaagaagggagaggtaagcggaagacaagcgattcagatcgggaagtaccgtggatcagaaaacagaaaaggggggtcccgagcggaaaataaagccctgagagaaagacaacgaggagcttcggagcagccgctggagccccgct

SEQ ID NO: 16140 - DNA, 1488 bp, Artificial sequence
  DNA replication origin
cgaacccgcagccccgctccctgcgccgccgcctcagtgggcccggcccgcgcgtagccccacagccgccgcggccaccgaccccggcacggccgccatctttgttttcgctgtgcgcttccccccgccccgccgccaccaccccctcgtcttccccgtcacgtgagccccacgcggggccaatgggagcgccgcttggggcaagaaagcgcagggactagagccaatgggagagcgagggcccccgaaggcccgcccctgcagaaggtgggcggggagggggcgcggcctgcgagagtcgcggagggactcgcacctgggggcagggaggcccacgcgagctgtggcgccggcgcggcacccacgctccacgagccagtggcggccgccgacccctacggcggggtgtgcctgtgtctctgtcccccaagactcaggcttgtgttaggggctctcgcccccttccccgcaggggaaggacacaagtgaaaaatcccgccggccacccctctctgtcgggtgcgggaccccttaggtctccacaggagcaagcggagagacttccaggagaggggactccagacccctaacccaccggaatctaatcctctgctcgtccgaaccccctctaaccctggggttggagactgaaggggtccactgaggaaaacgaaggtattagggaatagggctggcttccacaggccggaggtacacaggagggcgaatcagctctgggaaggatgtgcgtttctcgaaacgcctgtggtacagccctcccctgcctccaccctactcttcagttcttgaaggtcactgccccagagggccacctgccaggccaggccaggatatctggaactccaccatgtccctggagagtaagggcccagggctatgtcttctcagcccaggggtcttcctgacaatagtcaaaaggaggccgggctgcatgagaccccatcctagttccagcacataccctgtcagggtaactgactactgtcctgaggggccttaggaagctcactgaaagatccctcaatccctctcaaaaatgggcagttttcatattcctgcaaaattcctaagatttattggagactaggcctcttctctggatccacaaccgtgtccagcccagaatcaggacccccaaacgtgtctgggaccctgtccctttcattctggtctagacaagtccccacacgtggccaaaggacagcacccagactctgcccctgaccagtcaatgtgcagcaaacccacttcagtaggcagaagagtctacccctagggagaaggcgccaggagcaggcaggtgggagggaaagtgttcggcagggcagaaaccctgcctggctgtatccaactgtcactcccactggaggcgctgtgtatgcagggcccggcagtaagcccagctgcctacagccaaggcccagcgacagacatcctccttcggtagcagcagcagcctgtcctcct

SEQ ID NO: 16141 - DNA, 1236 bp, Artificial sequence
  DNA replication origin
tctgcccctgaccagtcaatgtgcagcaaacccacttcagtaggcagaagagtctacccctagggagaaggcgccaggagcaggcaggtgggagggaaagtgttcggcagggcagaaaccctgcctggctgtatccaactgtcactcccactggaggcgctgtgtatgcagggcccggcagtaagcccagctgcctacagccaaggcccagcgacagacatcctccttcggtagcagcagcagcctgtcctcctccagccggctcaggaggcctgccacacccagcatcgcccccccccacatcccataagtgttggccgtgaagacagctacaatgaggatggtcactgcgaccaccaacagcattgcctgaccagccacagagcggccctcagggccgaggtggccgccagccactgccagcaccatgcctcctcccaggagcaggttggcagaggagcggtccccattcacccagtggaaatcgaaggccagaaggggaaggccgatgacggtggccacccaggctccagcaaggcagtcttcgtgtgtgctcagccctggggccagcgtggtggtggcagccaagacctggagcaggaagccagcagcagcccctcgacttgcctgtcaacacagggaagggagaacacgtgggaaaaagaggccggggtcacccttttaaacaggaaagggtttggggcttccatggagacctggtcttagacgcacttcccaccaacctctctctaattcaggaaactaggtccttggggtttgggaggtatggggatgcgcccctgctcagccccagtgtactcacctcggctgtgctcacggctgcgtgcagagacaccactcccagcaccagatgggacagggctgtgctccactcggcccccggcttgggggccatggcacctcaggcggcagtatgtacgaggacacagataggagatactcaactttggagaggaaggaagcgcagaagccagcgacctggagccctacgcgcggcactctagtaagcccaggttccaggtccccattactggatgttaggagaagttcagtcctagactttccggatccctgaggccactgcacacacctgtggagaagaagaacctaattcagccgggaaacgggggaaaacgactcagggtctaagctggggggaacgtcagccctggggccctggagcccaagtgggagtgcgggcctggggaagagaga

SEQ ID NO: 16142 - DNA, 1119 bp, Artificial sequence
  DNA replication origin
cggatccctgaggccactgcacacacctgtggagaagaagaacctaattcagccgggaaacgggggaaaacgactcagggtctaagctggggggaacgtcagccctggggccctggagcccaagtgggagtgcgggcctggggaagagagagcggcgaggcgctgcaggcccacgcggcggcctcggcctgctccctgcgttccgggaggcgttgtcctgggaacccgggtccaggaggagcgacggcgcaggactccgggaggccagccgtgcgcagttaccgggctgcgcggtcccaacgcagcggcgagcgggaggcccgagcctgcgcaacgcaccgcccaccgccgtcggccctgcctcctctgccgtgcccccagttgcgggagcgagcgcggtcgggaacctccaccagcgagaggagcggaggctagagcggccgggcggggctagagcggctggggggggagggtcgaggcctgggggagagggtcgagacctggggggggccggttggaggccgtaggagcgggtggggtcgggaggagctcggggaccagaaaacgctctgtttgggtgggtgcgtgcgtgggcatagtggtttggaaggagcgtgatgaggggagaagggccggggcggggctgcgaggggcggggtctgggcggggctgcgaggggcggggggtctgggcggggctgagggagataaggtttaggcggggctgagagcggcgggtctgagagggagggggcctgggtggggcggggcctgggcgaggatgcgatgggggggtctgggcgtggctgcgaggggcggggcctgggcggggctgcgaggagaggggtctgggcgagactgagagggaccgagaggggaggagcctgggcgaggctgcaaggaacggggtttgggcggggctgcgaggagggggggtctgggcggggctgagatgggcggggctgagatgggcggggctgtagggagaggaaggagaaccccggcgtgttgaaggctccgcgaaaccggagcggtgggggactacgcggagggtgggagggattccgagaggagggtcgcgggagccgtgggcgctctcagcccggtgtccgcggtgtag

SEQ ID NO: 16143 - DNA, 1169 bp, Artificial sequence
  DNA replication origin
gaccggcctggccggtaggtgcgggctgggagtcccgcggtgcgagggcggtgccgggacctcccagggaggggcggaggcctggctcaagcacgtgacccgaaatgtctcccgccctcctccctgaccggcagccagctccgagcctgaggatgggtcggaaggcgcagccgagggccgcgcggccgcggtgtccctggaagaggccctactgcgcctcgccgagttcctctccgtccagctgggggcggaagagagctgcgggggcccggcggacctgggccaggtgagcgcggcggagggggctgctggcaggtaccacctgccccggccttcctggctttcacagccctgctcggattcttgtctccttcgcagtctggcgaggtcccctcactgttgacagtgaccagtcagctcttggcccttctggcatggcttcgaagccccagggggaggcaggccctgctccaggggactcagccagcccctcgggtccggcccccctctccagatggtgagtaaaggacagtaagttgaagaagaactctggagggagcaaatcccggtagaacctgggcggcctggagttcggggtcatgttccggaagatttggactagagacctcttcagtgctaactgggcccaccctactccaggatccacatcccaagaagaaagcccttcccacttcaccgcagtcccaggcgagccactgggggatgagacccagggacagcagcccctccagttggaggaggatcagagggcgtggcagcggctggagcagctcatcctgggacaggtgaggtccctggagccagaagggattgccggctgggacgccagaaaaaggaggtccaccctgtctctcttacttctccccagctggaggagctgaagcagcagctggaacagcaggaggaggagttgggtcgactgcgcctgggcgtggtgaggctgcagggagacctggcagggccgggcatggagggggtgcttcaggtgagtgccgaggtttcctctccaccagggggcgacggactcagagaaaagggttcagcatctgactctggagaacgaggccctgaagcagagcctgagtctcatgcgggacctcctgctgcactggggccccgggccccccatcagggctccgcaggtactc

SEQ ID NO: 16144 - DNA, 1179 bp, Artificial sequence
  DNA replication origin
ggctcttgcacacctggcatgcagccacagggcccgagcctcctcaggacctcccgggatggtctgtgtagggcagccccatcagggaggctgatgccaatgggaagacccccctctccgtggcccctctgagtggctgaccccaggagagcagagggactgtgggaaggaggtctgcgtggagctgggaggcatgggttcacagccagctctgcccacctcttgacttgactttcccatctgtgaaatggtaccacagaccgtccctctctgagtccctcctggcccccaccctcccgcaggaggaggcagaggcattgctagagctccagggccggcttcaggaggcccaagacaccacagaagccctccgagcccaggtgggcatggggcccagggatccatggctcaggggtgaggcgggctggggttttgggaggggcttatctgaggcagggcctggtaagtgcctgtttcctcagtgacaggggtggggttgggcggggcagctgggggtgcaggaggtgcagctgcagggccttcaaggggccctccagcagctccagcaggagacggagcagaactgcaggcgtgagctacagcagatgcatgggcagctggcaggtaagggttggggttggggctcatgggaggccctggaggctgggccttcccttccaacagacttccctctccaggacttcgggcacggatggccagcctgcgtcagggctgcggggacctccgaggtttggtcagcacctttacccagagctgtcagggttcgctgagtgaggcccggggccaggtcaggacccctccccgcctagcccctcctctctgggcagcctattcactgttcttttgacgggggcgttcctggggagttggctgtactaataagtggggctctggaacccaaacagcttctgtgtgacccagggtgggattccacttctgggccttattttaattctatgcatacttggttgacagtaaactcttaaagcattgcccagaagcacggaggagacagatgatgtggtgttcctgcctgtcattcctgggctttatcctggggttactcaatgatgtccccaggggcccagagccactgaaagttgtggcttagcacagctgagcgggcctgtgggggctccctgctgctctcaggaccct

SEQ ID NO: 16145 - DNA, 1758 bp, Artificial sequence
  DNA replication origin
cgggtgggcgggcccgggtgggcggcgaccggcacgcacacacctgccccgccccggcgcccacctgcagcagcagcaccgcggtggtgcctgggcccagcgccggctgcagcagtcgcgtgagctgcgagtcgcggaagggcacgtgcggccggtgggcccgcagtgcggccatcacgcctcctagcgccagcagcgagcggtttatggtctgggcctcccgcaggcgccgggcgccgtctgggtctccccgcggcgggccggccgcccctgccttccgtgcgcgttcggatcccgccaggtccaccaggtgcagcgtgcctagaggggcgagcgagcccgacatgggggaaggccgggcctcgggtgctctggagactccgcagggctcaggcaccggccgtggtacctgcggtgcctggagcgcgcggtggagacgccgcgcgcagcgtcagcgtgaccagggcatgcgagcgggagctgcgctggttcatggcggtggcggcggtggcccggttgctcctccccagtttcagcatctggaaggcggggcgaagggctggtcaggtgcagggtccccgcccccaagtggaagcacggggcggggtctcggagagcggtgcagccctacctggtgcaatgtctccaggttgggcacgtcccagtgggtgaggccagccacctggatcccgccctggccttctgggccctgcctcacggccaggcgctcgggaggccctggagcaaggaggtccctggtgagaaaggggaaggtcttggttccagaattctctggaaatccggaagggccctgggccaggggtggggagaaggcctccctggtggagtagcccacctgacagcctcattgtagatctccaccatgctgagtgtcacccggtgctgccggccggcccccatctcccggaacagcgactgcagcgccctaggaactatgccggggtcctcaggagggccctgaggatggggtggggtgcacaccgggctcacatccaagtcatgcagggcccctggggcctctcccactggggcgtgagctctgtcccacctccatgctgtaggtcttcccggtgcctgtctggccataggtgaagatgcagacgctgtagcctcggaggcaggacagcaccgcaggttccagctctctgaagacctgcgggaggcgggagaatgtgttttgagtcctccccacgttgcctgtttatgccctatttggtggggtggggagtgccacgaaggcaggtgtgagcagagcctagtctcctgggaggatggctctaagggaccatgggggagggtgtgtcctacagagaccctctgtctccctagagaaggtggtgcttgcaagaatttgccaggcaaagaagggaaaagacacaatgagaagaggaacagcctatgcagaggctctggagtcctgaagaccacgtaggagacctggggacagcagttaagagcgcaggtgtggtgtccttaatgtggaagccaacgtgaaaaaaagaaaaataaatcccagcattttgagaggccaaggagggtggattggttgagctccggagtttgagaccagcctaggcaatacggtgaaatcccgtctgtacaaaaactacaaaaaaattagccaggcatggtgttgcacatctgtggtcccagctactcgggaggctgaggtggaaggatctcttgagcccaggaagcagaggttgtagtgacctgagattgcaccactgcactcca

SEQ ID NO: 16146 - DNA, 1363 bp, Artificial sequence
  DNA replication origin
ttcctgggggacggtccagcgggggacacagggcctccctctgggggcagctgcccacctcctacttgcctatctacactcccaatgtggtaatgcccttggcaccaccacccacctcctgtccccagtgtccgtcaaccagccctgcctactggggggtggcccctgaaacccgagggcccccagggctgctctgcgatctagacgccctcttccaaggggtgccacccaacaaaagcatctacgacgtttgggtcagccaccctcgggacctggcggcccctggcccaggctggctgctctcctggtgcagcctgtgaggctcttaagacaggggccactcctccctcccgctcccacccccaccttgttgacagggagccaaggcgaggcggctgtctgcgaccacagcagcctcgaaacaccaggcagcagccttgctgggagtccacggtgtttattgggccaccccacgcatggccgtggcccagctgggcacaaccctcaccctggtctgtcatgcctgtttttcctacactcagcggcaaagctgcaggagcagggctgagcctggaatagcccttcctagtcccctcttctcagcccactacccatccatcagtcaccagccgtcacctcccctcccgtgctccaggctgggggagggagagcccagtggtggatccagcctgaagtcctgccctctctcatctgtctggaaaggaggtagcacctttttcgggaaacgggttagggagtaaagactgcaccctacatggtcctggtggtgggggggataacagtaaaggaatttgcaacgttttaatgccatgcctgatttttgggtcaggagtggtgacttgggtaaccacttggcgggggggcctgggattccctgctgtgtgccgtgataacagcaaatggtgataaggagaaagccaagacctgtggcctgatgcagggctgggggcggggggtgatcacttcagcaggcacaacacacttcactggctgcggaggtggaggggtgactctgggagctcaggggcaatggatccaaagaggctagggagcttgtgccctgggagacggggtacagggactttactaccgcctctgccagcagagacctggcctgagaccccatgggcagggccgcgacccaggactagaggggcaggccctctgcgggcgcgagagccgagcccgagccgttgtcgggactggggcatggaggactgccaggggacggcgtaggggtgcagggggtcccggtgagcggagtgtcggtgctgagggaagaaggcgtcccggaggagcgcgggaccctgcggcgccgggctggccccagctccacttgacc

SEQ ID NO: 16147 - DNA, 2383 bp, Artificial sequence
  DNA replication origin
aagtgctccaaggctcccgggacggtggtcattgatttatgctggacaaaaccgagtcatcgcgggcaacgggacgggcgccagcggaatgggtggcagctttgggggtggtttcgggcccaggacagtgcggtcggagaagagcggtcagaacttggggagcctccagcgccccaccaaggaagcgccagtggagaggggggtgccttaaaacttacgggagaccgggcgcggtgtctcacgcctgtaatcccagcactttgggaggccgaggcgggcagatcacgaggtcaggaaatcgagaccatcctagctaacctgatgaaaccccgtctccactaaaaatacaaaaaaattagccgggcgtggtggtgggcgcctgtagtcccagctactcgggaggctgaggcaggagaatggcatgaacccgggaagcggagcttgcagtgagccgagatcacgccactgcactccagcctgggcggcagagtgagactccgtctcaaaaaaaaaaaaaaaattatgggaaaggcccggcccggtggctcacgtctgtgatcccagcactttgggaggaggccgaggccagtgggtcacttgagcccgggagaccaacctgagcaacataggcaggcccggtccctaccaaaaattaagaaattagctgggctctgtggcgcacgcctgtagtcccgggacgctgagtcgggaggatcgccctagcgggggaggtggaggctgcacggggcccagatcgcaccactgcactccagcctgggcaacagagtgagaccttgtctcaaaacaacaacaacaacaaacacttgtaggaaagaacgacgccttgctgaccgaatggggtgaagtggccacaagtattagcctcatgaggcacaggattgtgcagccataacctagggaacacagcagagaggtggtggcaggagtcctgagggaaaccacgtggcgtctgaggggagagtcagagatagaaggaaaaggggcaccacccgaccgggggtgtggggggcaggagcagtgtggtaccccacatacaaggccccttgcggcccaggcctcctcctcctggacacttgctgcctgtccctcccctccacacctcagggtgtgctggaccccaccgtatgctgcagattttcagccctttgaggttatcatggtggaggctgcacaagaaaagctgaattctcagagtgaagggcaaaagcatatccctgggcccccgtgtgtctgggggcccttggcctggtgccagcaccaaccaccgctgctaattcccagagctgctatcctcttgggcaaacttgccccttgtgagggaggagaacctgggctttggggcaggatacacaataccagccttgcttgggtggaggagcagagatggctagggaggaggaggtgagcggtccacctgggctcctgaagcaactcccaggaaatcagttgagtcaatgtgtccccctcttgttcctagggtgcgggcttcatggccttctcctccaggaagctccacctgatcatgtcctgggtggatatccagcccccatagttcagggcctactagcagctgctagatcttgaactccaggagcgccccacgccttgggagcttggcatgggctaaatactcccccatttgttaaatggggtcctgaaacctgaccagggaagacgggataaagtagccatgggtcatcgcagcccctttgaagccgggcctggccacccaaaggcaactcaggggtggagactgaggcctcaggagaagcccccactagaatgctctctgcccctcccttccagattaaccaaaacctgctaattgtggaagccctcggcatgctcccctcccccacagcctcttcctcccttccctcccctcccccttccatccgaatgataaaggccccagcccgcctgccccagcccggcctcaggtcccggccctgccttctacactgccccaccgccctgcaccctccacccggccaggcccctgcccacgctgtctaccgtcccgcatggggccctgcagcggctcccgcctggggcccccagaggcagagtcgccctcccagccccctaagaggaggaagaagaggtacctgcgacatgacaagcccccctacacctacttggccatgatcgccttggtgattcaggccgctccctcccgcagactgaagctggcccaggtgagcgggccccggcccccactctctctttccccagactcgttccccacccacttccaggttcaagccctgacccccaccccttcctagcccacccaggtatgccagtgggaccagtcctgagagctgagggcctcaaggcacgacccttctccgggagcccc

SEQ ID NO: 16148 - DNA, 926 bp, Artificial sequence
  DNA replication origin
ccctccccggcctcctccgtcgccagcctcctctctcccttcggtctcctcctcctcccgcccttcccggcctcctccctctcctctgcctcatccttccccggcccggcctcctctctcggtgtcgacccagtgcccctccttcccgggcccgccactgctctccctggccggggcccctctccctcgctccgctcccgccgcaggacccgggagtccgcgcctcacctcgcgccccgcgccgaccgccgcacaagtgggtccgctggcttccgcgggtcagtgggccccgcgctccctgaggcgctgcgggggcgggccccgcacccggccctcgccatggcaacgctacacttccggcccgcggtacccatagccggaagccgcggtgccccgtgggagccgggggcggagcctgggaggaggaaatgtcgggggcggggcctggggagggacggtcgggggtgggggccaacgcggacagctgcgggcggccgggcgagtcctccgcggctgggacctccttggggcgtgggtgggacgggaatggctcaaagtgctccaaggctcccgggacggtggtcattgatttatgctggacaaaaccgagtcatcgcgggcaacgggacgggcgccagcggaatgggtggcagctttgggggtggtttcgggcccaggacagtgcggtcggagaagagcggtcagaacttggggagcctccagcgccccaccaaggaagcgccagtggagaggggggtgccttaaaacttacgggagaccgggcgcggtgtctcacgcctgtaatcccagcactttgggaggccgaggcgggcagatcacgaggtcaggaaatcgagaccatcctagctaacctgatgaaaccccgtctccactaaaaatacaaaaaaattagccgggcgtggtgg

SEQ ID NO: 16149 - DNA, 1165 bp, Artificial sequence
  DNA replication origin
gctcccacggggcaccgcggcttccggctatgggtaccgcgggccggaagtgtagcgttgccatggcgagggccgggtgcggggcccgcccccgcagcgcctcagggagcgcggggcccactgacccgcggaagccagcggacccacttgtgcggcggtcggcgcggggcgcgaggtgaggcgcggactcccgggtcctgcggcgggagcggagcgagggagaggggccccggccagggagagcagtggcgggcccgggaaggaggggcactgggtcgacaccgagagaggaggccgggccggggaaggatgaggcagaggagagggaggaggccgggaagggcgggaggaggaggagaccgaagggagagaggaggctggcgacggaggaggccggggaggggccctcgggagacgcggctgccggcacgcgggcgcccagggcacaggtcccgccgggccgccttgggcgttgctggctgaggcccagggcagcaggtgccaacggtcaggaaaggcagggagccgaaggctgccggtgggcgcttcgcgttttgttccaaggcgaaggtgtgtggattctccgcagcccgtcggtcaggtagacagctccggaattgtcttcattttcagatgaggaaatcgaggccgcagagaagggacttacccaaacttaagctttgtgtgggccttggagctaggctgaaggagaaagtggagtctcactggggcaagttccttcaactttcagggattcaaatgacctcacttgtagtgcggggcgtccggaccacccctcaggaattgggatcagggcaagaattactaactaagcaagcaccccgcctgggagggagcgtccaggactggtgtgggcccctgtctgtaccagagcggaggcccggggcacggtgggattaatttccatgggtgcagagaggggagccgtgtacggagtcattctaggcttaggggagacagagcaaagttagccttccccaaacctctgtgccttccttttcttcctggattcctacctgggggtggaggtggaggcgggggtaccgctgcctttctcaaagtgtgtctagtccagcagtgagccctcctgggcgtcttggcgccccagttgcttcctggacgtattggggtttctctgggagaa

SEQ ID NO: 16150 - DNA, 1289 bp, Artificial sequence
  DNA replication origin
taagctttgtgtgggccttggagctaggctgaaggagaaagtggagtctcactggggcaagttccttcaactttcagggattcaaatgacctcacttgtagtgcggggcgtccggaccacccctcaggaattgggatcagggcaagaattactaactaagcaagcaccccgcctgggagggagcgtccaggactggtgtgggcccctgtctgtaccagagcggaggcccggggcacggtgggattaatttccatgggtgcagagaggggagccgtgtacggagtcattctaggcttaggggagacagagcaaagttagccttccccaaacctctgtgccttccttttcttcctggattcctacctgggggtggaggtggaggcgggggtaccgctgcctttctcaaagtgtgtctagtccagcagtgagccctcctgggcgtcttggcgccccagttgcttcctggacgtattggggtttctctgggagaagggtcttgcctgcagtaccctgggcctcctgaagaggcctctggttgcgctgcctgattcagggacccagagccacgactcgccgagaggagctccggcggcgtgcggctgggttgcctgaggggctgggggctgcctggtggacttgcacacatgctggctccatacctgtcactgtggtggacgctcagagctctacagggccagctgcctgcccctgccccaagtcccccgggctggggttgggatgggggtggctttagggggtccttccccctcctggtgctcgagctggatttcctccctgttggctggggccatccctcgtgtctctgattggcctgtcctggcctcatccctcacctgcttgggatgcacttggactctgctttgccccgagggttgcctgggctggcacctagcaagggggctcctcctgtatgactgtactttggggtctgtgttctagggattcttgaacctctggtctgaatgaacagccgattgatacagctctccactgcatgcagcttaggaacctcagtctcaggtgaccccacagactaccagcacccccagctccacccttgctcttccccgagcgtgtcctaaccctagcacttgtgccacatctatccattggccaaaatgagaactgggtggcagttccaggcccttctttcatgccgaggctctcctggcactggtgcacgcacacctaaagggaggccttttcatcagacttgctcagccaggagctcagagccttccatgtcacatcctgtgctgggacccctg

SEQ ID NO: 16151 - DNA, 1486 bp, Artificial sequence
  DNA replication origin
aagtgatcttcccacctcagcctcccaagtagctggaactgcaggggtgcaccaccatgcctggctaattttttaaattttgtagagatgagagtctccctgttttgcctaggctggccttgaatccctgggctcaagtgatcctcctgcctcggcctcccaaattgctgggattgcaggtgtgagctgcctcatctggcaattttctggactcaaccgtattccattggtttatttctctatgcctaagccagtaacttaggtcttacttaccaaactgtatataataagtcttgacatctaatagtgtaagtacttcaaatttgttctctttcaggcttatccctagtgttcttggccttttgtgtttccatataagtggagcattagcttgtgagtctcacactgttggggttttgattgggactacgtcaaatcttggatgaatttggggagaaatgacatcttttcagttctgggttttgcaacatataacgagatgtctcctcctatatcttcccataaagatatggttgtggtttactctgtacatcttttgttaggcttattccgaggcattgaggcttttgggtgctattctgttgttcagttctaagtaggagtggacatcctcccctgacagcctctgtctttccagggaatttgctttgggagggcaggagagaaaaggcaagggaagctctttccaggggatatgctttgggagggcaggagagaaaaggcaagggaagctctttccaggggatatgctttgggagggcaggagagaaaaggcaagggaagctctttccagggaatttgctttgtctgggagggcaggagagaaaaggcaagggaagcagatttctgcaagcgtcagagcccttgagggagtggctctgctatgttcagagtcactggggctgtgggagcaggagggcatggggcaaggtgagggcatggcagcgagggaggcactggagtgttggagtcagggcttgtagtagcgagccaggcagagaggaggcgatgggcagagagtgggatgttgaatggaggtgacaggcatgggctgcagttactggtggtgatggagcacagctggccagaagataaggacactggtgtagagaagaggtcaaggctcagaggggataggcagtccacaaaggtttgtccacaagaacattagaccaccaggaatttgggcaacgatgggcgggggtgaagccacagtgagggctggtgctgggtggttggtgcctgatgatgtgtgctccagctgggatgctcagggagaggatgggagggggactccaggcctcagccaggagcacaggggttggggaaagagggccctcagtagggaggacatggtgtcgctggggacagagccccaggggagggtttcaggatggagggtggagagagcctggatcagaagccccctcctggcctggtgcagtggctcacccctgtaatccca

SEQ ID NO: 16152 - DNA, 1381 bp, Artificial sequence
  DNA replication origin
atggagggtggagagagcctggatcagaagccccctcctggcctggtgcagtggctcacccctgtaatcccagcactttgggaggctgagacaggcggatcacttgaggtcaggagttcaagaccagccttgccaacatggtgaaacccgctctctactaaaaatacaaatattagccgggtgttgtggcacacacctataattgcagctactcaggaggctgaggcaggagaatcatttgaacccaggagctggaggttgcagtatttcatgcctacgcaggtgctttgggatgaacttcttagggttggactgggaggggggttggtctgggaggggggttggcctgggaggggggttggcctgggaggggggttggactgggaggggggttggactgggaggggggttggtctgaggggggttggactgggaagggggttggtctgggaggggggttggactgggagaggggttggtctgaggggggttggtctgaggggggttggactgggaggggggtttgtctgggagggggtgagctgcacactgggccctggaggacactcagaccctccctcctgaccccatcaccactcactcgtccagccaccacttcccctaaactgctgcttccttggagcagtctgcaggccccggggatgccctgtgtgtaggaaacttaatgctggggcctccctcccagagcttcatgtggctgcagaggcccctccagagcctcctcttctgccctgtacaccccgatgccttctgtgctgacctcagtagacgtggtgtgacgtgctgatgtgcatcctgcaactcagctccagtccccagatgtaggctgcttaagtgcagggcctcctcccactgtccctccccagggcgcagccagacaagtgcaaatggagcctctccagcagccaccaacctgctttatggctggtgctgtccttgtcacatttcaggaggtctctagacatttggcttcttttcagagtggaccctgtgagccgcgggccatgggccatagggagccttggcctgagcttgtcccctccttggccgcactgagctgtgcctgccttgccagcatctgcctggctccctcggtccttcacaaagactgatgaaggccccttttccaggtactggcacacggatgaggagtcgtagaagaggggcctgcagattgtgctctcagcaagcctgtcgtctagtggaagacactggccgggacacagagcccacgtgtggacaccgctgtgggttggtggcaggggtcgagcaggtgccatcaggcacatgaacggtggagtcttcaaaggtgagctgctggggccgggcgcgatggctcacgcctgtaatcccagcactg

SEQ ID NO: 16153 - DNA, 1018 bp, Artificial sequence
  DNA replication origin
ccacgggagcaggggtggccggtagtcattgctgcttcttgttaggctgctcaggagagccctggtctccacctccgtgaaatagggtgggaccagccacctctgtgggtgagagagccaggccctgggcaggcacagagctatgcaggtggccccctctcagtgcctgccctaggctctgcttgtgactctcttctcctcacctgtgccccacgcttgcagccccagctgtgtgggttccacttctggtgctctggagtcttgggggaagaggcactgtggtggcccttgagactccttcctgcctccctccggagcagagagtaaagaggagccggcagtgtctggcctgcatctttccatgtggacaggagccctcccgggaggcctggaggcagagggaagaggcggagggtgccatggtccacagggagctgtgggaaggtgggagccctcctgctgcaccccaggcaccgtcagggagaaccctggtgacctgggcgagagctgggcccgagttgggatctttgatggggaggggagtgagagcagggatgtgctctggtggtggggagcctcaggtcaggtcccagaggacccaggagagctcatgaacacagggctggcaggttgtcagggaagagccgaaggagctgtggtagcctccaggcagggagctcttcctgggctggagggaggtgtgggattgttggagtgctgctctcacacaggagcacggcctgttctgggggtcggagggctggagcaccaccatgaagggcctgcaggtgggtggaggcagagggcttctgggagtgtgaccggcctgggccagacagatgcctggtgcttctgcccccacccctgggctctggtgtgcctcctgccatcggcaccactgtcttccttgtccttccctgggtcctgggccgaagcacagttgacaggacctgaccaggggcaggaccctgtcctcacctcgccacctttttgcagtccgccagttccttgggagtgg

SEQ ID NO: 16154 - DNA, 1360 bp, Artificial sequence
  DNA replication origin
ggtagcctccaggcagggagctcttcctgggctggagggaggtgtgggattgttggagtgctgctctcacacaggagcacggcctgttctgggggtcggagggctggagcaccaccatgaagggcctgcaggtgggtggaggcagagggcttctgggagtgtgaccggcctgggccagacagatgcctggtgcttctgcccccacccctgggctctggtgtgcctcctgccatcggcaccactgtcttccttgtccttccctgggtcctgggccgaagcacagttgacaggacctgaccaggggcaggaccctgtcctcacctcgccacctttttgcagtccgccagttccttgggagtggggtcagccctgacttggccaacgaggacggcctgacggccctgcaccaggtcagcctgcactgggtgtgggcagggtgggggctggcccccgtgctctggtcgctcacgtggcacggtttgcagtgctgcattgatgatttccgagagatggtgcagcagctcctggaggctggggccaacatcaatgcctgtgacagtgagtgctggacgcctctgcatgctgcggccacctgcggccacctgcacctggtggagctgctcatcgccaggtagggcctgttgggcgtccttggcagggagaggcttcctctcagatggccgctcaggaggctcctcttgggcagtatctgtggctctcggcctcctgtgttcccgccttcacctttgctgaccctgcctgtgtcctggcatggagagcagggcctggggctccaggggaatgggcatgtgcccagggcagcgcggtccctgcctccccagcattcgtcctcctgccgagagggcaggcctcgggcccccccccagagtgtgcacagagaaatgtcttggtcagtgaggagggcagaactgctaaggagggaagcagagtgaggaggccaggtggcttgggaggagagggtacctgagcacaggtagggcctttacctttaacacagagggacgtagagcggggggaactctgagcagggagggtccatgagcctcctcccttcccctttgctccaggcatctgtagtgggagagaggtcagggctgcggtcattctcgagtgcccctgtgaggccgggtggggtgtgcatggcggtcgcgtcacacacaggcgctgcggggcaggcggggatgtggggtgtccacaggtaggcctgctcctccactgcacacagacacccccttctgtgttctgggctccccttcaccgcccttcttccctggggccatgctccccacagctcagcagcccctcagcgtggctgcctggtcctgcacccccgccaccc

SEQ ID NO: 16155 - DNA, 1078 bp, Artificial sequence
  DNA replication origin
ctcctctcaggagagcaaagggttacggaggaggctccaggaggctgagcatgggagggagtgggtgaggcccaggcttccagcccagtggctgtgagcctcactcccacacagccagggctgccacatgccccagcgcgcacctacaggctttcatgctcacaggcacgggtggcaccccagccaaacagcacaacccactccccactgtgggacagcgacccagctgagacacacaacacacaacgaggctccatggcaaaacagccctttatcaagagttgcaggataaaaatagtctttgcagccagacatccctccaggcatgtcttctgacctgagaggggccagtgtcctgtacagtagaagccggggtttccgtgctgcacccgcagcaccagggcacgcaccgtggggaggcagccttgggctgtgcccgcgacagggcccctgcatgctgagcaacagcctcacatgagcaggcagcacggcctcctctccacgggagcctccaccgccggggctgtgagcttgagcaggggtgggtccccgcctgccctgaagccacagtcaggctggggggtcaccgtgtcaccaggcaggccaggctcagctgtctcagggctctcgggcccctcaggtgggggtcgctgcagcttggcagcagctcgctggcgcttcaggtcagccagggtgtggtgggccttgtcgtggaccagggtgtggggggtggtgctgtccagggggctcagctggtaggagacactccggtctagtcgcttggagtatagatgccgcactggggagccccctactcggccattgtgcggcctgaccacttcggggttgtcctcctgcgggcagtgaaggtcccagagccatcaggaggctcctcccccctccctggccttgggttcaggctgtatggtcatgaagggacagacaggagagatggggcaaaagctggcccctgcagggcaccattcctgacacaggcaggagggggtccaagcggagagagaaccagggcagagccaggcccacccctgcgctgggcggagcagggacggggcgctca

SEQ ID NO: 16156 - DNA, 1437 bp, Artificial sequence
  DNA replication origin
ggctctgggaccttcactgcccgcaggaggacaaccccgaagtggtcaggccgcacaatggccgagtagggggctccccagtgcggcatctatactccaagcgactagaccggagtgtctcctaccagctgagccccctggacagcaccaccccccacaccctggtccacgacaaggcccaccacaccctggctgacctgaagcgccagcgagctgctgccaagctgcagcgacccccacctgaggggcccgagagccctgagacagctgagcctggcctgcctggtgacacggtgaccccccagcctgactgtggcttcagggcaggcggggacccacccctgctcaagctcacagccccggcggtggaggctcccgtggagaggaggccgtgctgcctgctcatgtgaggctgttgctcagcatgcaggggccctgtcgcgggcacagcccaaggctgcctccccacggtgcgtgccctggtgctgcgggtgcagcacggaaaccccggcttctactgtacaggacactggcccctctcaggtcagaagacatgcctggagggatgtctggctgcaaagactatttttatcctgcaactcttgataaagggctgttttgccatggagcctcgttgtgtgttgtgtgtctcagctgggtcgctgtcccacagtggggagtgggttgtgctgtttggctggggtgccacccgtgcctgtgagcatgaaagcctgtaggtgcgcgctggggcatgtggcagccctggctgtgtgggagtgaggctcacagccactgggctggaagcctgggcctcacccactccctcccatgctcagcctcctggagcctcctccgtaaccctttgctctcctgagaggagccaggtgctttgaaggagcctccatgggggccagggcctagggtgtctgtgctgaggggcggaaggtgggggtcccagggaccatggcttggaaagggaggtggtgttttccacaagactcttgtgtcagagccagaggggcaaaacaagcacaaggctgtgtcagaagctccctgggggggttgtgggtccccagttcctggcacgcagccttaatcctggggcctggctgccagcttccgcctgggctggcataggggacacgcagttggccactctggctctgagctggcttggcacaatgtgtcagggtgagggggccccttaggggcctcaagcaggagggctgagggcaccgctggttcgtctgttcatggtgggcggctttgtgtggccaccagtgctgggtggtgtgggtttgggctgttctccctcctggctcagcacgggcccgtcagcccagtgtcctttgggcctgcccttcccctagcatccctggttggaagggtgtcctcacagggctgtgggcgggccagggctggctgctggttaaattt

SEQ ID NO: 16157 - DNA, 2900 bp, Artificial sequence
  DNA replication origin
ttgtcctggtacacctggaagggcgcaaggcgtcacgggggcggactgttgcccggcttcccgctcccccgcgccgcgcacctcgtccgccagcagaaagagccgctcttcgaaggcgaagcggatcacggcctcgatgcactcgcgggtctgcacctgccctggggtgccggggaggcagcagtgctgggtgagccaagggggcgcactgccctccgctgggcagccggggtccagcggacccggcactgcctgggccagggcgcacgtgggtgcgggaggagtggggcggggcggcggggaacgcaccgtgggcgcggagggagtggggcggggcggcggggaacgcaccgtgggcgcggggggagtggggcggggcggcggggaacgcaccgtgggcgcggggggagtggggcggggcggcggggaacgcaccgtgggcgcggggggagtggggcggggcggcggggaacgcaacgtgggcgcggggggagtggggcggggcggcggggaacgcaccggtggggttgccagggttgatgacacagagcgcacgagggcggcagtggtcacgcgcctggcccagtgcacggtgaagctcggccacgtccagcgcccaggcacgctcctcgtccaggtagtaatccacctgcactgcgcccagctctgccagcgtggccgagtagagtgggtactgggggatggggatgagcacacccgtgcgtgtgtggccctcgccggccaccagcagcttcagcaccgtctgcggaaaggaaggggaaggcagggttggcgaggcctggggccgcacctgtcccccaccctgggcgccccctctgcagtgtcaggaatgtcttggtgcccatgcccagcctaccacgatggcatcgctggcccctgtggacaggaagacgttgttggggtccgcagggatgcctccgtcacgcctctcaatgtaccgcgccacgtcctcccggatcagctggatgccggagctgacgctgtaggcccctggactcgggcaggacaggatgggaagtacaggtgaagttctcctcagccctcccaagggacttccctcctccagtggcagggcggccctctgcttcctcctggccctggctctcacccagactgtggcccccacacgcctgcaagatgcgctccgcccttttcttggcatcgtcagggaagttggggctgctcagaagatcagggttaacacagagggccaagacctgggaagacggagtgctgaggccagggcacatgggctgggggtgggggggtgctccgggcagtgcaggagcctcacctggcgcaggaaggtgatgggcctctgccccatagcctgtgcgtccccgatgttggcacggatgacctcggtgaaaggcttcttcacaccctgggaggggaggggagcaggcagggagactgtgccctacctaacccctcagcccttgtcccatgtgccagtggggctggggccaactcggccaccccattgtgacctggagggcagcgaggggccctgggccatacctggcgcagctcctgctccagctccaaggctcgctgcactatggggccacgcactgcgtactccactctccgcacacgcgggttcatgccgtccagcgtcagcaccttcgccctcagtccatgcctcaccgcctggctccggtcacctgtgctcgaggccatgactctacccagaccaggcgggaaggcagctcaggaggtggcaggaccagaagtgggaatggcgacagctgggtctggcttagtgggccagggctgggagggggcagccgtagcagagggaactccaggcaagagagcaccctcttcaccgcagctggcctcactgggagggacagaaagggctgaaggagctggggacagttgggccccgccccacccgtctgggaacagctctgccccagggaggcagaggcagtgggtgaggtggcaggcggggcttggggcaaggcccagtgcctgcctagtgtccccacgaagggagagcaggagacccacatggggggtaggtacagacgtcagtccggacagctctgagggactagacatggggggagggggagagggctgagcacctggggtgctcaggaggtgaaggggtgcccagcagccctgaggggctggcagagctggcaaggagggacccccgaggcgagactggagcctgggctgctgggatttaccccagcagggcttggccgaggcctggccctcgtggcacccgcatctttgcttgggccagcggacctgtctcctattaactgagccaggcctcaggaatccagggggtgctggggggaggggaggggtgttcaggctctgggttccatctggaccctccagagctggcagctatggcccagaggctgcaagagctctgtagctggaccttggtccctgatgagcactgcgaggggctgggggagggggctggagccaggcagtccagccctgagccctgggacagctcacaccgtggctgctgtcatgccctttcaccaggcaccagctgggggttgcccttgggacacacccgaggctaggggtgacctgagctctccagccctcttgttcccgattggaggagagagtaggaaacgagctgggataggccgtcagagccccacctccacaggcctgctgagctgaaaggccaggctccacgctggcccaccccagcgtcgggcaccgaaacctgaaccatgggggtcagggagccggccctctgagcagggctgtgggcaaccagccaggcccaagtcggaccttggctcctctgatcctgctggctgggagaaaagccatcgggagccctggacagccggcccccaggcctctcaccgtgcacgtctctgttc

SEQ ID NO: 16158 - DNA, 720 bp, Artificial sequence
  DNA replication origin
gctccaccgcccgcgggggcagctgcacgcgcgggaaggagtacatggcgccctgcactgggttgcagctgatgccaggagcctcattgaagacctgctcggtgagcttggccttggccgccagctctgccagcactgcctgcttctcctgtggccgcggagggagggcccatcagggcacggcactcggcatcccccacccctgattaggtcacctggaccccctcctgcccccaactcacagcctggaactgcgcaaaggaggggtcggtgggcgcgggcgggctgaccaccaggtccagcagggcctgtcctggcaccggcgggcacagccgcacactcatcagcttcagcatctgctgctgcactgcagcgtccatgttcaccacctccacatagccgccgcggaacccgcacctgcgcacggccaggtcaggtgcggaggagggggtggcccatcgggcgaggagggcctggccatggcccgcgagcccccacccgcctcgtacgcacgcactcgcccatgtagcccttggaggtggagtggaaggaggcaagctcctgctgcccggcgtagggcggccccatctccatgagcaccttcttgaatgagtggaactgcgaacccgcggcgtacacgttgtcctggtacacctggaagggcgcaaggcgtcacgggggcggactgttgcccggcttcccgctcccccgcgccgcgca

SEQ ID NO: 16159 - DNA, 899 bp, Artificial sequence
  DNA replication origin
gcacccacgtgcgccctggcccaggcagtgccgggtccgctggaccccggctgcccagcggagggcagtgcgcccccttggctcacccagcactgctgcctccccggcaccccagggcaggtgcagacccgcgagtgcatcgaggccgtgatccgcttcgccttcgaagagcggctctttctgctggcggacgaggtgcgcggcgcgggggagcgggaagccgggcaacagtccgcccccgtgacgccttgcgcccttccaggtgtaccaggacaacgtgtacgccgcgggttcgcagttccactcattcaagaaggtgctcatggagatggggccgccctacgccgggcagcaggagcttgcctccttccactccacctccaagggctacatgggcgagtgcgtgcgtacgaggcgggtgggggctcgcgggccatggccaggccctcctcgcccgatgggccaccccctcctccgcacctgacctggccgtgcgcaggtgcgggttccgcggcggctatgtggaggtggtgaacatggacgctgcagtgcagcagcagatgctgaagctgatgagtgtgcggctgtgcccgccggtgccaggacaggccctgctggacctggtggtcagcccgcccgcgcccaccgacccctcctttgcgcagttccaggctgtgagttgggggcaggagggggtccaggtgacctaatcaggggtgggggatgccgagtgccgtgccctgatgggccctccctccgcggccacaggagaagcaggcagtgctggcagagctggcggccaaggccaagctcaccgagcaggtcttcaatgaggctcctggcatcagctgcaacccagtgcagggcgccatgtactccttcccgcgcgtgcagctgcc

SEQ ID NO: 16160 - DNA, 2439 bp, Artificial sequence
  DNA replication origin
ctgacctggccgtgcgcaggtgcgggttccgcggcggctatgtggaggtggtgaacatggacgctgcagtgcagcagcagatgctgaagctgatgagtgtgcggctgtgcccgccggtgccaggacaggccctgctggacctggtggtcagcccgcccgcgcccaccgacccctcctttgcgcagttccaggctgtgagttgggggcaggagggggtccaggtgacctaatcaggggtgggggatgccgagtgccgtgccctgatgggccctccctccgcggccacaggagaagcaggcagtgctggcagagctggcggccaaggccaagctcaccgagcaggtcttcaatgaggctcctggcatcagctgcaacccagtgcagggcgccatgtactccttcccgcgcgtgcagctgcccccgcgggcggtggagcgcgctcaggtcaggcgggggcggggcctgcggggtgggcagggggggccgggcatccctctctgacggctctccgtccacaggagctgggcctggcccccgatatgttcttctgcctgcgcctcctggaggagaccggcatctgcgtggtgccagggagcggctttgggcagcgggaaggcacctaccacttccggtgaggcctggccctcactccctgtcccgccaccctggcccttcactcactgtcaactcctttcaggatgaccattctgccccccttggagaaactgcggctgctgctggagaagctgagcaggttccatgccaagttcaccctcgagtactcctgagcaccccagctggggccaggctgggtcgccctggactgtgtgctcaggagccctgggaggctctggagcccactgtacttgctcttgatgcctggcggggtggggtggggggggtgctgggcccctgcctctctgcaggtccctaataaagctgtgtggcagtctgactccagggaggaagcgttggcagctgcgtggcccgctcccacctgcctacccttcttgcaggcctgagtcccttcagagaagggaccttccacggccaccacccacctcttcctcctgaagaccccgtgcccaccataggctgggtcttccctctggcctctggttgtggggcagagcccgtcagatcacacagaaatgggttgagagggtccagagtgtgaggaaagcgcaggccccacacccctttgtggaagcccccaagaatctagggagccaggggcccaggtggccacccgaagaaacacagcctttcctgaggaaggcacagtgaactgcctccttcctggctccctttcctgtgaggtccatgtcttccctggggcagggggaaatactaaaccagcatggtgctggctggtcagggtgactgacagctcaggaaggaagtcttggttctcttacccaaggaagcaggggtggggccactgtctggggggccagagaccacctttggtgtcattgtgtggtgcagtccttcggctgggtggagtgggaggcagagggagaggataagggagcgtcccaggggagggctggggctggaggaggcaggggctgggctgagcgggagtgggcagcgctgtgtcctggcctggggagcatggctgagcacctactacatgcagacactgctggggggtcactcaatctgcacagatgctcttctgaagtaggcatgatagtccccatttgatagacgtggaaacctgcaacccaaaaacctgctgagctgacaagaaaccccctcagaggcctcggcagccagaaaaatgcgttgggtccagtgccctcaagtccgccaaggacagggctggctttagagactcacaaacttgggagataggactggccaagggcacctggtttttttcgctctggagatggttcttaaccacaggccacacacacttcacagcctcatctggccctcgggagccccagagggcacagctctgggcaggagacacagcaggtgggcccctcccttggcagggcgggctcgaatcaggcagggtgctcctagccttgtcaccggacaccgaagggcgtcacgggcagtggctggcggtgtccttctgagctaagctgggtcctgacctttcacacttccctcctaacttccatggctctgtcaccgccttacggaggagctgaagccacagacacagcaaggttggggtccgcaccggaagtatccagtggtagacggcggaacccttaagaaacggacgccttcatgcgggcggctggagaagcgggggctgggcactgcagcaaccacgcttcggctgacaccaggaaggaagcacgcctggagcggatccgaaactactgagaggggccagggctggccgtgggcgcaggccgatccttacattcgaggccggcccagctctgtagcttccccctctgggcctctcac

SEQ ID NO: 16161 - DNA, 2091 bp, Artificial sequence
  DNA replication origin
cccagctgcgggccctgcctggagcagcaggatgaggagcgcagcaccaggctcaaggacctgctcggccgctactttgaggaagaggaagggcaggagccgggaggcatggaggacgcacagggccccgagccagggcaggccagagtgagtgcagtaaggccaggcagctcatcggggttgcaggttccctgggctgcatggggcttgctctgtggatgcagtgccacgggagctcagaggaagcctgatgtgcctgtccacacagctccaggattgggaggaccaggtccgctgcgacatccgccagttcctgtccctgaggccagaggagaagttctccagcagggctgtggcccgcatcttccacggcatcggtgaggcctgggaggccccacccgctgcaggctggggctgggggctggggcaggtgaggcctgggaggctccacccgctgcaggctggggctggggctcacggctgtgtcttggctccaccgtaggaagcccctgctacccggcccaggtgtacgggcaggaccgacgcttctggagaaaatacctgcacctgagcttccatgccctggtgggcctggccacggaagagctcctgcaggtggcccgctgactgcactgcattgggggatgtcgggtagagctggggttgtcagaggctagggcagtgactgaggacctgggcaaaacctgccacagggtgtgggaacgaggaggctccaaaatgcagaataaaaaatgctcactttgtttttatgggccctcttggccaatgaggcaacccccacaagctggggacaagcacatcacatattccaggcacagagacatctgggccacaggcacatgtggctttattgaccactccagccactcagctcagagaaaggtgctgggtgctaggtccaggtacagaacgggaaaggcagagaggatgagcaggagcaagaagcagggatgtggccccaacccatcagccaggcctccggccagagtgcccagcagcagcttccccagcagctccagcgtggccagaaggctgtagtgtgtggcctgaggggggtgggggtcacggtcaaggtcaggcccacacagccccagccccgtggtctctcttgtgtccctgctacatctactcacctgcagggccctgggggccagctggctgcagcgcatcatcccagtgaaggtgactgtggtgaccaggcctcccaagaagtgctgcagacataggctcagcaaggctgaccctgggagggcagaagtcagcagtgccccaggctcctggcccctctcttcctcctcaaggccagcccctcacctctcaagattgtgccagcgtccatgctggcccccagggtgtccaggtggaagaccaaggcagtctgacaggctaggcccccgaggcggaagcgcagcaccgacctcaacagaggcagcagtttcctgggatgggggtgggaaatgggtcagtatagtggattgggggcagctcaggtacaagtgggtgggcagggtacactggggagggctcaccagtgcttggccagcaaggtcccacccagggaggagccagcgatggagcagaccacagcacccacaccattccacagtcccaactcgggagcagaaacgccgtggtccagcaggagaagaggaaacaggctgctggcaccctgctcaccttgggtggtggggggggcatgagcacgggaggttccatatctgcccccacctcccttctccccacctgggccctcagtcctgccctgctctcctcagtgttccagagctgcagatactgggggagaagtggggcagcccgagagagcgctcagggatggggctagagctgggggcggacaagacacaaggcccagctgcagagccccggatgtcagggccaagtcttgcaggtcataccccagaaagagcgtggccctgtaatgggttgcaagcccctggggacacacctggagctgtcccggaagccccaactgctgttgcctggctcgaggcctcactcacccagcttgtaggtgagcacaaagcctgccgtccacacggtccccggcac

SEQ ID NO: 16162 - DNA, 800 bp, Artificial sequence
  DNA replication origin
ggtggactccatgggctgggagctggcctctgtgcggcgggctctctgccagctgcagtgggaccacgagcccaggacaggtgcgcctctccccaccccacaccgccctggacgctgcctgcctgcatctgacatgctttccggcaggtgtgcggcgtgggacaggggtgcttgtggagttcagtgagctggccttccaccttcgcagcccgggggacttgaccgctgaggagaaggaccagatatgtgacttcctctatggccgtgtgcaggcccgggagcgccaggccctggcccgtctgcgcagaaccttccaggcctttcacaggttgggaggaggcgggcggggcctgggaccatccaccctcccgcagtgatcagctctgacaggctcctccccacagcgtagccttccccagctgcgggccctgcctggagcagcaggatgaggagcgcagcaccaggctcaaggacctgctcggccgctactttgaggaagaggaagggcaggagccgggaggcatggaggacgcacagggccccgagccagggcaggccagagtgagtgcagtaaggccaggcagctcatcggggttgcaggttccctgggctgcatggggcttgctctgtggatgcagtgccacgggagctcagaggaagcctgatgtgcctgtccacacagctccaggattgggaggaccaggtccgctgcgacatccgccagttcctgtccctgaggccagaggagaagttctccagcagggctgtggcccgcatcttccacggcatcggtgaggcct

SEQ ID NO: 16163 - DNA, 2450 bp, Artificial sequence
  DNA replication origin
gcaaagtctcgatggctgggggcagagcagggctcagcggacgcggggacagcccctccacacccctgtggcttaccccaggttcctcaccctcctccggcatgtccaaagcctgtacggtaagctgtattgggagtgcccgctcatggcccatgcagacccttctgggtcctggggctgcttggtggctaagctgctcagcctcttgaggggggtacttgggcacaggcctctccccacccacggccccttcctgctccgagggcggcctggtgcaggtgcaggtgcaggctgggaacacgcgctgtaccagcctcttcacagccaggaagtccgtgctgtcggcgtgcacatgtctgcgcagctctcgcaggtcttcgccctgcagggcaactttcatgagggtggggtggaccactgggggctcgagcactggcagtgtggggggggggggtgccaacctggggctgcaggaagaggtggcagtgggcaggctgcccgtcacgcccggcccggcccacggcctgcacgtagctctcgaagcttgggggcagccccagatgcagcacagcccgcacatctggccggtccagccccatcccaaaggccaccgtggccaccaccacccgcaactggccctgcatgaaggctcgctgtacccgccgccgttcccggctgcacatgcccgcgtggtaggcctcggctgtggttttgggggcacgacctttggggaagacaggcagatggtcagtgggatgggaccatgtgtgcccaaggtgggtccacggggacaccagctctgtccatgccgcacctccagaccctgggacccaggctgcgtgcaggcaggttcggaggagcgcagcgatccgctctgtgtcctcgcgccggttgcagtaaatgataatggaatcgaggttttgaaaacgtttgccttgcagcagcgtcaacagtgcctgatgaggagcggttggcgtgggcagtggggagtgaggaggggtcggcgtgtgcagtggggagtgaggaggggtcggcgtggggagtgaggaggggtcggcgtgggcggtggggagtgagaaggggtcggcgtgggcggtggggagtgaggaggggtcggcgtgggcagtcagcagccagggccctgcagggtccccagagcacacacacccacctggtctgtgtccctgtccatggacacggaaaggtgcaggttggtgggaactggggctggcccgtggaggtcaggctcttcagccacagccaggtgctgtgccacgtcactggcagtgcggcgtgtggctgtggctgtgaggcccaggaagcagtgcacgcccatgcgctcccgaagcacctgcaccagaggcggcagtggtgtgaggccgcccagcccatcccggccctggccgcccaccccagttcacatatggctcaccttgcagacgcgcaggtagcagggccggaagttgtgggaccactgggagaggcagtgggcctcatcaatgcaggcaaaagcaactggaggcagctgtgcggctggagggaggcctcccgcccccaccagtgcctcaggtgtcagcatcagcacgtgtacctgggctgcccgaatctgaaggcagcaagatcagaggcacagcccaggtgcccgcccgctgcctccctcacccctaggcccatgaggcccccaccttctgcaggacagattcccgttgcttcctggtcatgcccgagtgtatgcaggccgccttgagacacggtggcaggccagacacctgcaaatgcaggagcgacagccgtcatacgccagcccagccctggcccttccccaagtcatcccagagctgctgccatgtccatcctagtccctcaggggagaggagaaccaggtcctgggtcctagggctaagggtttagagccacctgtgggccttggcccaggagccccagagcagacagactgaagtagggatggctcctttcccagcacatttcccgtaggggtggctgtggtgcctgtggagctgggctgcctttgacctgctgccaagactgggactgaggccacagacaccttgaagctcccaggggagggggtggttaggggacaagcagcagttgcccttgggagtcacaagtgctggttcttggctgtgtacgtgtgcccagggccctgtgtgcacacctggtcatccatgagtgacagcaggggagagacgaccaacgtgaggcaggggctgcgccggctgtagagcagcgctgggagctggtagcacagggacttgccggcacctgtaggcagcaccagcagcgtggagatgcctggatggggcgggagtcagcagcagggttctgcagcctggcctcagcccagcctcagccctggcagccacgctcaccagacaggatccgcatgactgcacgctcctgcccagggcgaaaggcttggtgcccca

SEQ ID NO: 16164 - DNA, 2038 bp, Artificial sequence
  DNA replication origin
cgggcgggcgcgcgcgccatggagcggctgcgggacgtgcgggagcggctgcaggcgtgggagcgcgcgttccgacggcagcgcgggcggcgaccgagccaggtgcgggctgcccaggggccgaggggctgagggcgcggcccgcggctgacgcgttccctttacaggacgacgtggaggcggcgccggaggagacccgcggtgagcgcgcggcggggcggcgggggcgagaagacaccgggtcggcaggggcccaggccccaccctgaccccgcctcccgctcgcccacgcagcgctctaccgggaataccgcactctgaagcgtaccacgggccaggccggcggcgggctccgcagctccgagtcgctccccgcggcggccgaagaggtacccaggccccgccgccccagcctcctcccacttccctgtttggcggagtggcgggagccacggagtcgcggccaggccgccgtggggcacagaacttgggagggggactgggcaaagtgaagaagggccgggcctcgctccaggtgcgggaggggtggctgggagcgcttctgccgccacaacagccttttctggcctgtgcccctgttgtctcctgcaggcgccagagccccgctgctgggggccccatctgaatcgggctgcgaccaagagtccacagtctacgccagggcggagccgccagggctcggtgccggactacgggcagcggctcaaggccaatctgaaaggcaccctgcaggtgaggagtgggcaggcagtgagtccacgctaggtccacagctgcttccggtccgggtcgccctcttgtcattttttccacacagacaggcacgggcccctgtgccaaccagggcacgagtcttcagggagcttctcggggccttcgcccttgactccctttctagtccagccttgtgctaattagcctgctctacaattgagcgtggggactcaggtaggttttagagtctacagtagctcaggggcctgagttcctcctgctgttctgttgttcccctcccaggccggaccagccctgggccgcagaccgtggcctctaggaagagcctcatctaaggcatccaccccaaagcccccaggtacagggcctgtcccctcctttgcagaaaaagtcagtgatgagcctccacagctccctgagccccagccaaggccaggccggctccagcatctgcaggcatccctgagccagcggctgggctccctagatcctggctggttacagcgatgtcacagtgaggtcccagattttctgggggcccccaaagcctgcaggcctgatctaggctcagaggaatcacaacttctgatccctggtgagtcggctgtccttggtcctggtgctggctcccagggcccagaggcttcagccttccaagaagtcagcatccgtgtggggagcccccagcccagcagcagtggaggcgagaagcggagatggaacgaggagccctgggagagccccgcacaggtccagcaggagagcagccaagctggacccccatcggagggggctggggctgtagcagttgaggaagaccctccaggggaacctgtacaggcacagccacctcagccctgcagcagcccatcgaaccccaggtaccacggactcagcccctccagtcaagctagggctgggaaggctgagggcacagcccccctgcacatcttccctcggctggcccgccatgacaggggcaattacgtacggctcaacatgaagcagaaacactacgtgcggggccgggcactccgtagcaggctcctccgcaagcaggtaagacagcgacgggccaggacaggcattccctttccctcccctcagccctcccgtatttcccgcccagtgaccctcctatgtgggcaccccccaggcatggaagcagaagtggcggaagaaaggggagtgttttgggggtggtggtgccacagtcacaaccaaggagtcttgtttcctgaacgagcagttcgatcactgggcagcccagtgtccccggcca

SEQ ID NO: 16165 - DNA, 1778 bp, Artificial sequence
  DNA replication origin
gtccgtcgggcctcggacaagcagccaatgggaggcgtcaacgtcatcgcggggcgccgcggcgccgggcggggagcggcggacggtctaggcggggctggaggcggtggctgcggttgcgggaccggtgagcgcgggcggccgggggggtgtctgagcggggcggcgcacgcccctggccctgcctggcctcaaggggcggggcaccggtcgctcggggcggcctggccgagggaggcagtggctgcatttgggagcccggggccgaggccgggagcctgggaggtgccaccgcgggccgggaaggactgggagtccccgggccggtcggagcggcgtcaggccctggtgggagacgcatccgacctggaggagcaggccccgctcgggaggcgaaagagcggagggtccagcgcctcccgcggctcgaggcccggaggagccgggcgggggcgtcttcgcgaaacgcaggcgaccgaggaccgtcgcgttccctgcggccggcgggaggggagggggcgtcgcacggaggtgcctgcctcccttggtgggcaggccgtctgctttggtgttctcccgtgacaagtgctcggttggtctgtcctgtcagagcgagtatgatcgttgagatctgtccaccggcagaactaggccgagggttggtgtctgggacttttcaggaaccggtgccttaaggacttacttgtatgtggaaaagtcgacaaaaagaagggccttggggccagagtgtcttccccggcccccttccctggcttgtcactcaggctgtgaccttgggccaggccgaggccttcattttctaatctgtcacagggagatggctgcgatttagttttgaggatgctacaggcagcagcagggctggcaccctgtgtcacaggtaccttgtggccttgggagtgtttgtgcatctctgcagcttgggtgctgctgaggcagctttctttgccttgtctgagcagtctgtagctttgcaccttctgaatcccacatacttaagacttggtctttccacagtggctctccagggaagagggagaggtttaggccagtggtaagggccaacaaaggtgagggttgctttctttcggggtctccgtgcttggtgacgctctggagaatagtagcttttgcgggggcttgtattttataggctacatcatctggactcggtgttccctgggtctcggtcttttcaacctgccttgttgcttatgaagctgcttctgtgcttccagctctttggtgttttgtggagtccaagtgtagccctggagagcatctgtgaggagaggggagggaaaggtgatttggctgcttgactccttagagtgtcccgtcaatactaatgctgatgaaggttggtggggagagtcctgggctttattcaggtttcgaagaaggttttgtgaagcagctttgtaatttgagaggcctgaagtacccatggggggccctgcaaggcaacaggcatctgtcaaaagcatacccaagcaagcgagttgttgacgatgccacactgcttgacgcttagtttctctaaagagatcctgtgcatctggagggctggggctgagttgtgagtttgtctgccagttcactgcacccagcccagcgctaggcatctaataggtgcttctctgtgccatggccactgctaactgctgactttgtttcaggcactatgctgggccttcctaccacttgtgtgtggcttggtagtggcctagggtctctcctccctgctgaagtccctc

SEQ ID NO: 16166 - DNA, 2200 bp, Artificial sequence
  DNA replication origin
ccgcgcaaccgccgcctccggccgcccgccccgccggcagcgagccccggcccgaggcgggcagcatggccttccgcgccctgggcgtggccacacagacggccattgcggcggccatcgcgctgctggcgctcacggcgctgctcctggtcgccatgatctgtcgccggcgccgcaggcgaaaaaaggcgcgggggcctccgggggagggagcgctgttcgtcaacgactacttggacggcccctgtacgttcgcacagctagaggagctccgcgacgagcgcggccacgagatgttcgtcatcaaccgctccaagccgctcttcgccgagggtccggcggaggcgcccgctgactgcggcccggaacagggggcggggccgggactccgcgtgcccccgccggtcgcctacgagatccactgctagggccgcgggcgcgcggatgacgtgggcgccggagattggccggtgcggcctcgcgcatgctccgtcagtaaaggtggaagccgcgcagtgtgcgctgagccgtgtgtggggcgcgagccgggaacgttgcactcgggaatcctggggtagcaatggaaggtggccggggaggccccaacacctcccttgaagctcttccgaaaagacatcaccccaacctccagctctgcatggggggggtccctcgctggccctggccggccacagtaggatcttgggcctccgaaaggtgggaagagcaaggactggccggcagtgccgacggggctgccccgcgaagggcggggcgacaggctggatggcagttgttgccgggtggccatgttgggggtgacagcagagataaggataagggtgaccaacgtggacagaaaaaaaaacagccacaaattcaacttccaggcacatgtgtaccttgatgaccccctccagcccgagcccagcccagtggggtggctgggtggcagggtagggaacacgtaagaggcgtgagtgcctggggactcccagcttccctgaagcaggcctctgtccaacttcaaccccagaagcactgagctctcagtaaagggagaggaaaggcccagagaggccatcatctctctcagctcacaactggaatcccaaagcatttgcacaaaggaccaggaccccagacggcagccaaatgcagccaaactgagcagggcaatggaggcctgacatccagccccggggcccacagatgatcagccaattatggagcaagtgcagggaaaaccgcgtggggcactgcagaaagcaggggaggcttgaggtgtgcccagaagcaaggtagacccagcaggaaaccagtaaccagtgcttttgtgaaggcctccaccaggggtcccagcaaaggccctgcctacctaaagagactgcagggcggcctgtgtctcacccagagctacttcatcataggctgaagtagtccgcagccagtcgcccgtagatgtccgtggtccagagcacatgggcacggcctgaggctagaagcagctggtgcaactcagcttctacgcgggcaaacttctcctcattgatggaggcctccagcaggacagaggcaggcggcggccagggcaagccctcatagcagtccacagggaaggggtgcaccacagtacgcagctcagcctgtgccactgagtcccgcagcagctccttgaggcccgccatggacagtgggttgccatagaggccaaggtaccggagactggcgcactgagtcaggatgggtagtgtggccaacagctgggtgtctgcgagctgacactcagtcagctccagatgcaacagtgtggctgctgatgcctgcaacagaccctggaagggtgccagctggctgccagacaggtcgttaccactcaggtccaacttcttgaggtgggcagcatgtgggctccgtgccaggaagcgtaggtcctcaggcagcagagcacagaaggccaactccaggctctccagggggctctgcagggtgctacaggggacacaggggtcacagacaggcagagccagggagggtccctacagaagggaggggcagggcagtggtggggcccgctcacctgagcagctggtccagcctccctgaaaggagagaggagcccatgctgagctcacgcagacaggtgaagcggcccatctgggcaaggaagtagcggaagttgtcctcgccatccacggag

SEQ ID NO: 16167 - DNA, 1400 bp, Artificial sequence
  DNA replication origin
gcgcagcggcgccttcgtaggcctggcccagctgcgcgtgctctacctggcgggcaaccagctggcgcggctgctggatttcaccttcttgcacctgccggtgagcgcctggggtctaaaggggcgggatactccattatggcccctcgccctgtagggctggaatagttagaaaaggcaacccagtctagcttggtaagaagagagacatgcccccaacctcggcgccctttttcctcacgatctgctgtccttacttcagcgactgcaggagcttcacctgcaagaaaacagcattgagctgctggaggaccaggctctagcggggctgtcctccctagcactgctggacctcagcaggaaccagctgggcaccatcagccgagaggccctgcagcccctggccagtctgcaagtcctgcgcctcacaggtacctcttcctcggaaagcgtctctgtctgggccacggtgttggcagtagggagcaggctcatgtgtggaggggctctgacatcaggcaactgggcagcagtctggaaggctgcaccaccgcctgcagccacactggagggctgcgggagtgggtgtgctggggaatacagctcaggcaccctgcctggggaaaacagaagacaggaactccacagggtgacttaacagaattgagggttctgcacacttttaggctgaggggaggcagacaaaattgcaaaggagagagacagctgaccaggactggggacattcccaagagagggcatccaaaggcaaggctgagaggacttgtgaggtttcagtgctggtgagatgtctatgtggacgcccaggttcctaaaaacagtggcacttgttgcaggaagacttaaggagcaggtgctttctcagagaccgacggagaagtgatctgtaacaggcaggcatcacagagctaaaggggaggggggcgagggtgaagggcctgccgccccaaggagcttggggtcaaggaaggggtggcagggccttggactccgtgtgaaaacgctgtgggaggtgggaaagaggcctctgtcctggcctgcaaaaccccaactgcacaggctgttttagcagcaccctcaagccacctgcctaacgctgctctcccacagagaacccatggcgctgtgactgcgccctgcactggctgggtgcctggatcaaggagggcggccagcggctgctcacctccagggacaggaagatcatgtgtgcagagcccccgcgcctggcgctccagagtctcctggacgtatcccacagcagcctcatctgcattccgccctctgtccacgtgcagccgctggagctcacagccaacctgggtgaggacctgcgggttgcctgccaagcctccggctacccgcagccattggtgacc

SEQ ID NO: 16168 - DNA, 2316 bp, Artificial sequence
  DNA replication origin
tggcagggccgccgcctcgccctcaccatggacctggccccgctgctgctcgcggctcggtcgccctgagcggggccaagggaaaggcgggaggccgcgggcgcctctcgccccgctcccccgggactccacgccccggaaagcccgcgccacccgcgctcgcggcagcctagtgcgcctgcgcgctcggccccgcccccacccggcgctgtccttggtgctgccgcggcccggccctcccggacaccccgctccccacggcgcgcgccccccgcgcacccgactccggcgccctccggattggcctgcgctcgagacgtcaggcactggcggcgggcgcggggctctggtgcgcgtgcgcgagcgtcccccgccccctcccagcccggcgactgctcgggcccggccgccacctgcacggcgggggagccgctcgccgcgggagcgtcaggtgaggggacgcccgacccaaggtcaccaggcgtgggggcgctgggggatcggggaccatcccggctctgaccctggtgcgctccgagaagggcgtgggtcctggagggggatggggaacgcggaggccacgccctccctgagcccggccgaaaatcaaccggctctcgtgggtagcagaggaggccgtgggggatacaggcaccaggtcgcagcgctgcagaggtgcgcaagggccgcccaaagaccagcttgggcctcgcactgcgcccgaggcagacacagggcgttccatcctcttccctccccgctcccgcacagaggggcgcccaggaggcagtgacagtcgtcgcggaatcctgcgtgtgacaccccgcccctgcccagcggattagggagttgtcctctggtaaaaggatttctgggctgcttccagcttggggccctcatccctgccctggcaggcctttctacaccgatctgcatctagtggggggtcagcgtgagcagcagcgccgtgagttctgaggccaagaaccttctccacttgagaagccttcctgggggaggctgagtgggccaggcctggagccacgtaccaacactttatacccaggggaatggatcccaagggcccagataacgcccccaacttcttggggttcacacgcgtcctgagacatctgggaactgcctctgcctgggccaaagctattccattaaaactttattgctgtgcttacttatttctagtgactttaaataatcatgtgagttacaatttagggcaagatttaaacaccaaggccacttggtcctgtccctttccacatgactcgaaaggaggaagagctgatggacaggcaaatgtttggggaggccggccagatgaggctgggagacaggacacctgcagccctgttttccctggcttcgggtgggctggctggcttagcccagatccctacttttaaaactgggctccttgttcctgaaaccagaccccagccttcccatttctttacgacaagtacatgtatatggtcccccagcaaactccctgctccttgctgatctcagaggtcacactgctcccagagcccacttgggaagccacaccagaaacccagttggtggcccaaggcgtcccctgtcccaccccagctttcccagggccccatctatccccaaagacaggacacctttctggggaccggcatgggaagcacagacccatggctcctgaaccgaatttcctattatttttctcatcccccaattctctgacaggttacctgagaaaaaggcccaattctagttaagctggtcccacccctaggccagcaggagcaggtgctggacaaagctgtgccttgacttccctggggctcgtagctcctctgaggccagctctgcccaggcccccacaggataacaaggaggcgtgtctgcccagggcctgctctccccctcctagccatgcttgggtaatgggaccccgggctttgtcacctaagcaaagttctcaagccataccctgtacttccagcttcttgcaccctagaaccaagcagcagccacttgcctgggggtagagtcgggggcagcaagcgacacacatccacgtcctgagcaggaagctcctgacctgctgggcatgggtggagaaggagaaggtgacagggttgggtggctctccctacatggtcacatcctgtgaagacactgaggacaccaggaattctaaatttgaacctgatgccccagagctttaagaaaatgtttttgtcaaaggagaaaaccagaacgttttattagtttcttgaacctatttatagcgtcaaaagttagacgcaggtgcaggcc

SEQ ID NO: 16169 - DNA, 1417 bp, Artificial sequence
  DNA replication origin
agggaagagcgccgggcccgggtcgcggaggcgggcgccgccggaacgcgaagcgcggggctactgcgggcaggcgcgagttcgcgcagcaccgcccccggcgtgacctgctggtcgcttccggcgcgggaggagaatgtggccgccttgcgggacgctccggaccctggccttggcgcggtcgcggggagcccgggcctgcagcggggatgggggcgtttcctacacgcagggccagagtccggagccgcggacccgcgagtatttctactacgtggaccaccagggccaggtgggcgggggcagggccgttgctcgagaggcggggccgggagaggtctctgggcggggcgggggggggggcgtggctctgtgggcgggaccattgctcgaggggcggggccggagggacgttccagggggtgggtgggtgggcggggcctgcgcggtgggcaacctcgactcctcagagctggaggagagcgcgctggaaagacggggagttgggtcggtccgggccgaggctcctacatgggccgcgtccctgctgcgttgtgcagcttcggactctgtcctacaagtccccagccccggcgctgacttctcgccgctgccagggagacacccgggccgccctgcctttttttggaagccctgtcaaaaggcagctgcatgtccgggaggcagcaggccaggtagtctccgcggaggaggtggtacaactgattacaaacttgaaaagagggaaaaggtgcgggaaagaattggctgaccagggagcagaggtgcgcatagacgcggataagtcggcggggcccccaggtttacctttcacgcgcctccctgcatgcggtgtgcacagacaagcaggaaaagtgggctcgggccggttcaggacctcccgagcttcaggacctcctgagcttccccgcccccacctgcacgctgggacttatcacggcctggccctctatctgcagcttttcctggatgattccaaaatgaagaatttcatcacctgcttcaaaggtaatgctgtgcctccctctccagccccttctttctcccttccgggcagcccctgatgggctccccgactctgccgacgggcccagcgcaccaaggagtgggcgtcctgcgctcaggagccccgctgagtgaggccaggcgaacctcttaccgtcggcgcctgccctcggtatggtcctgggcccggaggccttgggagcccagcgcgctgagtacacgcacccttcatcccccagacccgcagttcctggtcaccttcttctcccgcctgagacccaaccgcagcgggcgctacgaggccgctttccccttcctctcgccctgcggcagagagcgcaacttcctgcgctgcgaggaccggccggtggtcttcacgcacctgctgacc

SEQ ID NO: 16170 - DNA, 1765 bp, Artificial sequence
  DNA replication origin
gaagctggtgtccaggtgctggatgagcacccgcaggaaggacatctccttgcgggtgttctcgaagatgacgcgcgggtcgtcggactggcagcgcaagcagttgggcgccatcaccatggccaggttgctgacatccatcttggtgaccgcgacgttggccggctgcacgaagacctggtggaggagcgagggtgggcgcggaggggcgggggcggggcggggaggggaaagcagcggggacccccggggagggaagtacctgcaggaagcggatgaggtagcacagcaccatgcggttgatgcggggcagcgcgtgcaccacggccaccgccgcctcggggctgtcgtagtgcgcgatgcactgctcgtagaactcgtgcgggatcaggggctcctccagctcccggtaccacagcttcagcagggacgctggggacacagcacggggctcagcggccctgctcggcgggcacccctgggccaaatggggtcccgtggcggacatgcatggaggggtgctgtgggggacaggctgggagggccggctcattctggacagggcccatctggccaggctgggccctgaccccagagggcctttcggctcctgggggcctgaactcgatcctggaggcatgtgggtcacgccagcagagttgtgcaaaacaggatttttctcaggagtcgtctgtgtagccaccgtgagggggtgtctgcagagcaggcacagctgaagggcacagggcagagagcagcaggtggggagtgggctagacatagcaggcacggcagaagggcacagggcagcgagcagcaggtggggagtgggctagacatagcaggcacggcagaagggcacagggcagggagcagcaggtggggagtaggctagacatagcaggcacggcagaagggcacagggcagcgagcagcaggtggggagtgggctagacatagcaggcacggcagaagggcacagggcagggagcagcaggtggggagtgggctagacatagcaggcacggcagaagggcacagggcagcgagcagcaggtggggagtgggctagacatagcaggcacggcagaagggcacagggcagggagcagcaggtggggagtgggctagacatagcaggcacggcagaagggcacagggcagggagcagcaggtggggagtgggctagacatagcaggcacggcagaagggcacagggcagggagcagcaggtggggagtaggctagacatagcaggcacggcagaagggcacagggcagggagcagcaggtggggagtgggctagacatagcaggcacggcagaagggcacagggcagggagcagcaggtggggagtgggctagacatagcaggcacggcagaagggcacagggcagcgagcagcaggtggggagtgggctagacatagcaggcacggcagaagggcacagggcagggagcagcaggtggggagtgggctagacatagcaggcacggcagaagggcacagggcagggagcagcaggtggggagtaggctagacatagcaggcacggcagaagggcacagggcagggagcagcaggtggggagtaggctagacatagcaggcacggcagaagggcacagggcagggagcagcaggtggggagtgggctgcattgcacaggtaggcctcggggtgcccagcagacacctggggaaactgtccaatgggcagaagggaggatgtgctagaagtgactgggaagccatcacatcac

SEQ ID NO: 16171 - DNA, 2400 bp, Artificial sequence
  DNA replication origin
gtggctgtgccctgtagatacccatgatgtgaggtggagagctgcttgctgcagacacggggctgtctggcggatggcaccatggcctgggcccagcacacctgaagcatcgtcttggagagccctgggcagactctggcctcccacgctgccccaggcagccatcaggatgtgatgatggctccgacgtgcgaccccatggggcagctttggggcagctcaggtgctgcgtgacctgcatgtgagccagtcatcaagctcctgcctgctcacaggagccttctgccaggaccatgcccagaagagacaacccggatcttgccagggtggtagccctctaggtcacggatggcagaaggcaagtgcggcaggcacacaggtgcctgactacggctgctccgccctcggcgtcttcgtgcctgcccttgtcagggagcgggactggccatggtgggcttggagcagagtggatgcggccattgaggccccaagccctcgtgtctgccagggctccggggctcttcacctcagtgcccaggtggggctccaggaagaggccacatccagcagaggcccagagtgtggggcgttttgggaggtgtgtgtcgaaccatggccctgtgtggagggccgccagggacttcaccagctgccgcccagcacagcaggagccctctccactgcccttacctgagctggtggcaaagcccgtgcatggccttacctttagtgtcattgacggggtccatgtgccggtagatgtagccttccaggtaggagtggaacttgggggtgggcgggaaaaaggccaggcagatggccatgagctcccagccgcgggccaggctctccaggcggaagttctcggtggtctgccggcacagctggatgtagagctcgtcccgcaggccctgcacgctccagcccttggtggccacctccagggccacgtgcagtgggtcggccttggcccgccggtcacccatgtacatctggatcagcttgaagagctcgcaggcctccttcttcacgtgccggtcgcttgtcacgatcatgggcttcttgatggactcgctgctccaggccagcatgttggcgatggacaccttccgccggaagaggccctgcgtgtgcttgttgaagtgcttggaggcccagttctcgatgtccgtctccgaggagggcttgcgcagcgtgaaagtggggaagacgcagctggagctgggaacgccgctgcggctctgccggctgctctcgaactgggcacaggcagcgaggtcctcagactgagaaggacaaatgcggctgggctgttgggggtgggggagggccaggcaggtgggcccactgggccacagtccccagaagtgtgagctggggccccaccagagccagccaggtgagagccctgccctgctcaccacaaagctgtctgaggtgggaggcccaggggagcccagcccgtccacagatgcagctgggacgccggagccctgtactcccagggtgtggcagggcagcctgctgatgggtgacccaggtgacctggctgagggtgaggcgggaggaaggggagcatccgctggcacccccagggggctgacctcattctgccgccccctgaggaagtgtcagtgcccttgttcaggcacggaaggctgcagttcacaccaggtaaaagtgctgtctggttcccaatcccttcactgctgggaccccaggcccttccctccagccttcaccccaggccgacctccaggaggcccctccctgcctgctgctctgagagaacctggtccatgcaccctgggcctctctgccctcttgtcctgcatcttgagaagtggacagaatcacggaccggaagctgctctgagttctccaccctggagaccacgaaggccacccaggccctcgaggtctccccacccaaggaagctccctgtgttcctcctccaccctcccgggtcctcagacgctaggcctgccctctgcctcaccctgtgagaacaaggaggtgagaacaaggatggagatgctggacagaggtgcacgtggcctccacgggatctagcctccatcagctccaggagccagatggggaacgtgccagaggccccaggctgggcgcaacatcccggaattcctgcggcctctgtcctcccggcagttcttcctacccgagggagcctcggggactggctttgagaaccaccagggaacccccgacaccttggctgcctgctcctcaggggcccaggccacggctccggtggccaccaccctcccaggctgctgaggccttctctgttctgtgtctggagtcagggtgtggcctccagctcccaggtgcccccaggatgaggaaggcactgccagggaacgcccagcagcccacac

SEQ ID NO: 16172 - DNA, 1319 bp, Artificial sequence
  DNA replication origin
ggcctggtggcgtgtgcctgtaatcccagctactcgggaggctgaggcaggagaatcgcttgaacttgggaggcagaggttacagtgaggcaagaccgtgccgctatactccagcctggcgacagagcaagactccgtctcaaaaaaacaaaacaaaaccacgtggtgtacagtaagaaagactgcaattagatttccagaagagaagagagaggaaacagggtaaaagtaacatttggaaattgtagaagacgtcaggccgcggatgtgcaaagtgctatgcgtcccaaatagccatacccgagtggcctccaggagacagaaggtggtggaggggcccctcgtctctccctggcagcgtcctgggtccagcgccctgcacagcaggcatggctgtggacacaggaccagtgcccaccttgggccgccaggggcagagcacgtgtgggcattgcgtctgcatatctgccccgcagtgctgcccagagcagggtctccctcgttgcggatgagtgagtgggactcatgcactgagttgggaggactggtgaggacgcagacagcgtgactccggggactctggtgcccttggccaggtgcggtgttagtgggacacctgcagctgttggagtgagcgtggtgactggggcagggtcagaggaggacagtcagtctttctggagctcacaggagctcccagtcggagaatggggccgtgggattctggtggtgtgccttcctcctgctgggctcacctggaccactgggacgggtccaacgccactgctcagcaggaacacagggcccaggagcctgcccggcggctcaggcagctctggagacacccgcacagcacccacattaagggccctggtaacgccgcccccggttctagttacagaagcagccctgtgcccggtcaggagctgggatcagagcagacagacacctggtcgtgggcggcagctccaggagagccccagagggagggctgggggtgctggggcaaggcaggtgtgaggggcgccaggccacagggccccagcgaggaaggtgtacaacagagggttcgcgggagccgctgcctacagcccccgagggggtggggcgtgcccagaagcagcaggcaggcagtcacctgtgcccgtccaccccccacgcaggacctcctcgctgcggtggaactcgggcgccaaagagcgcatgctcatcaaggtcgctgatcgggagcccagcttcctcgccgcccagggcaatggctacgccccagacggcccacctggggtccgctcccgcagaccctccggcagccagcactc

SEQ ID NO: 16173 - DNA, 2064 bp, Artificial sequence
  DNA replication origin
cgtggctccagccgccttaaccctgtctctccccaggttggagtgggtggagatcatcgaaccgcgcacccgcgagcgcatgtacgccaacctggtcaccggtgagtgcgtgtgggacccgccggccggcgtccgcatcaagcgcaccagcgagaaccagtggtgggagctgttcgaccccaacacgtcccgcttctactactacaatgccagcacgcagcgcacggtgtggcaccggccgcagggctgcgacatcatcccgctggccaagctgcagacgctgaagcagaacacggagtccccgcgcgcctcggcggagagcagccccgggcgcggcagcagcgtcagccgtgagggcagcaccagctcctccctggagcccgagcccgacactgagaaagcgcaggagttgccagcgagggccgggcggcccgcggcgtttgggacagtgaaggaggacagcggcaggtgagggcgggggcagctgctatgggcggggccaggtgaatggagtgggcggggccaggtgaggcaggtagggggtggtgggcggggccaggtgagagcgggactggtgaaggtggtgggcggggccaggttaggagtaggtcgggtatggtgggcggggccaggtgagtggaatgggcggggccacgtgagagcgggactggtgacggtggtgggcggggccaggtgaggagtaggtcaggtatggtgggcagggccaggtgagggcggtgggcggggacccaggggactcagtgtccccgcgagtggccagagcctcgtccttggctgtagcagccaccgctgctgtccccagtgagcactttcttgtctctctgggcagcagagcctggcgctcagcctcagagggttctgggtcctccaaccctgcccctcactggcccagcccctggcaggtggtggttcctgagagcagtgtctgaggggctcgcccagctctctctgctgatgggagatgcagatgtggggatttgcgtgcgggcgtggggtgtgtggacctagggggacccaggtggagggtgtagatcagtgtggacacagctgaggggtctgagcaggcttggaggtggtcctctggagtcacagtggctccgaaggagcacagcctgtgttggtgggagcccaggagacccctgccctcagaaacagggagaggtcagggtagagcgcaagggcctcgaggtgagtgcaccgtgggaagcgagtccagagaggacggtggggaagagccgaggcaggcgggcaggacagtggggaagggctgaggcaggcggcaggccagcaggacagtggggaagagccgaggcagggacaggaggctggggcttcccagagcccaggctgtggcccagggcagacaggcctggccactgcaggggcggatggaggccactctggagaggatggaggagaggctggaccccagggagagaaaggcaggggattggtctcccccagtaccagattttcggtgcttggctgaggttgccaggggagctgaggcccaggggctttctgcagaggtgggaaggagcgtgttggactgccgggctcatctgaggcttcagaagagggattcagagtgaaccacagagctcagaggacagcaggcttccgtcccaccgtgccgaggtgcaggcacagagggaggcgggcagcaggttcatcccgtggacccggtctggcaggatgaaagggaggccagggatggggcctgctgcagagtgggcaggaggtggggcaaatcaggtgtggaggagccactggagcacaccgggaagacggtgttggtgtcggtattcagggcagggtgagcagcggaggctcgggcgtggcgtgggtgagcgagcggtgcagaaggcgggcacaaagaggaccagggcctacatttcacatcccaccagcaaatatgagggttcaaagttatccacggccttgccaacactacttgctttcctttttagatttcttttagctattgtagccactgtgaaatgtctcattgtagttttggtttgcatttccttaatgactaat

SEQ ID NO: 16174 - DNA, 1043 bp, Artificial sequence
  DNA replication origin
ccaggggctcaacagaaggggaggcaagtggtgagggcagaagggccagcggacaccaggcccagacacgggctagtgggggctgcctgcggctcccccaggtcaaggacagaaagagcccccctggcggccggcgcagactggctgcgggggcgaccttcatcccacgtcccaccctttgaaaccaggccagggacacggcggctctgaaaacaggctgtgatgcgcaccacacctgctcgtaggacaccaaggatccaggcggagtctgtccccgccacccccagaggccagctggggaagccgggccctcacacagtggcggcggccccagcagcagccctgggggttctgggtctgtttcttgctgatgcagatgagcagctgagaaacaggccttgccacccaagccctccttcaggccctggccactgggcactgtttgctcctctgtgtttggatgccacaggcagaaggcaccgagggacagtccacgtggggccatgaggtgggcgtgctcagggccttacgtggggaaggagctggctcaggggtctggctgcaggaggaggatgaggcgggtgggactgggcctgagtgcagacaccacagtggtgcactcagaagtccaatgaaggagggccagtgagagaaggggcaccctggggatgggctggtggtggagggctgcaggggaaggcagatgagaactcctgaggcccgcctgtggatgtttcaccgtcatccccgtgggaaggcgaggtggtgggggtcctgttgttttgctcagcttgagtacatctgccaacaactccccccaaacaaatgcctcggcttgctcggctcagaccctccacaggccccagactctgaacttccacctgcatgtctcgccacacccttggcgtacacacccactccaccgtccaccgtccagcaaaccacacgcaacaggggccacccccgctctggtccgtgctttcccttctcagcccggggtctcgccaggcaccaatagctgcccagcccctccctcccagccc

SEQ ID NO: 16175 - DNA, 3789 bp, Artificial sequence
  DNA replication origin
gtctatatgtttaaaagacaaaattatatcaggaagaataaaaagggggacaaaaaaatctctaactgaaagtaatgaaccaacggatgccagaaccataatgaagaaaagagaaagagctaatccaaacaacttaggaacacaggatgagccagtgtcgcattcctgggagacacgtgcacatgagggaatgcaaatgaaccctggctttttttagtgcatatatttttgtagtggaatgggtgaagcaattctgaaccaattttagatgaattatcagatgagcaagtgagtaaacacactggtgttcttgggagccagggaagaagagatgtgatggaagaggggaccacagagcaactctctgtgggagggacgggactggggcaccgtgtgtgctcagcatttctaggaggcgtttgtgcgcgtggaggcatgcatgcatgttcatgtacctgtgtgcgtgtgcatggaggcatgtgtgcgcacttgtgtacctatgtgtgcgtagagacgagtgtgcgagctcatgtacctacctgtgtgtgtgcgtggaggcgtgtgtgcgcacttgtgtacctacctgcgtgtgcgtgtgtgtggggggcatgtgtgcaagctcgtgtacctacctgcgtgtgcgtgtgcgtgggggtgtctgtgtgctcctgtacccacctgcgtgtgcgtgtgcatggaggcgtgcgtgtgcacttgtgtacctgagtgtgcatgtgcgtggaggcatgcgtgcacacttgggtacctacctgcgtgtgtggaggcgtgtgtgtgcacttgtgtacctgagtgtgcgtgttcgtggaggcgtgcatgtgcacttgggtacctacctgcgtgtgcatcgaggcgtgtgtgcacacttgggtacctacctgcgtgtgcgtggaggcgtgcgtgtgcacttgtgtacctgagtgtgcgtgtgcgtggaggcgtgcatgtgcacttgtatacctgagtgtgcgtgttcgtggaggcgtgcgtgcgcacttgggtacctacctgcgtgtgcatggaggtgtgcgtgcacacttgtgtacctgcgtgtgcgtgtgcgtggagacgtgcgtgtgcacttgtgtacctgagtgtgcgtgttcaaggcgtgcgtgcgcacttgtgtacctacctgcgtgtgcatggaggcatgcgcgtgagctcatctacctacctgcgcgtgtgtgtgcgtggaggcgtgtgtgtgctcgtgtacctgtgtgtgtgcatggaagcgtgcgtgcgtgctcgtgtacctgtgcgtgtgcgtggtgtgtgcaagctcatgtacctgtgtgtgtgtggaggcatgtgtgtgctcgtatacctgtgtgcatgtgcgtggaggtgtgtgtgcgagctcatgtacctgtgtgtgtgcgtggaggcgtgtgctcgtgtacctgtgtgtgcacatggaggcgtgcgtgcgagctcgtgtacctgtgtgcatgtgcgtggaggtgtgtgtgacctcatgtacctgtgtgtgcatggaggcgtgcatgtgtgctcgtgtacctgtgtgtgtgcatggaggcgtgcgtgcaagctcgtgtacctgtgtgcatgtgcgtggaggtgcgtgtgcaagctcatgtacctgtgtgcatggaggcgtgtgtgctcgtgaacctgtgtgtgtgcatggaggcatgcgtgcgtgctcatgtacctgtgtgtgtgtgtggaggcgtgtgtgtgctcgtgtacctgtgtgcgtgtgcgagctcatgtacctgtgtgtgcgttgaggcgtgtgtgctcgtctacctgcgtgcatggaggcgtgcgtgcgtgcgagctcgtgtacctgtgtgcatgtgcgtggaggtgtgtgtgcgagctcatgtacctgtgtgtgtgtgcgtggaggcatgtgtgtgctcatgtacctgtgtgtgtgcatggaggcgtgcgtgcgagctcgtgtacctgtgtgcatgtgcgtggaggtgtgtgtgcgagctcatgtatctgtgtgtgcatggaggcgtgcatgtgtgctcgtgtacctgtgtgtgcatggatgcgtgcgtgcgagctcatgtacctgtgtgcatgtgtgtggtgtgtgtgtgagctcatgtacctgtgtgtgtgcgtggaggcgtgtgtgctcgtgaacctgtgtgtgtgcgtggaggcatgcgtgtgtgctaatgtacctgtgtgtgtgtgtggaggcgtgtgtgctcgtgtacctgtgtgcatgtgcgtagaggtgtgtgtgcgagctcacgtacctgtgtgtgtccatggaggcgtgcatgtgctcgtgtacctgtgtgtgtgcatggaggcgtgcgtgcgagctcgtgtacctgtgttcatgtgcgtggaggtgcgtgtgcgagctcatgtacctgtgtgtgtgcatggaggcgtgtgtgtgctcgtgaacctgtgtgtgtgcgtggaggcatgcgtgcgtgctcatgtacctgtgtgtggaggcgtgtgtgctcgtgtacctgtgtgcatgtgcatggaggtgtgtgtgcgagctcatgtacctgtgtgtgtgtgcgtggaggcgtgtgtgctcgtgtacctgtgtgtgcatggaggcgtgcgtgcgagctcgtgtacctgtgtgcatgtgcgtggaggtgtgtgtgtgagctcatgtacctgtgtgtgtgcgtggaggcgtgtgtgctcgtgtacctgtgtgtgtgcatggaggcgtgcgtgcgagctcgtgtacctgtatgcatgtgcatggaggtgtgtgtgcgagctcatgtacctgtgtgtgtgcgtggaggcgtgtgtgtgcttgtgtacctgtgtgtgtgcatggagttgtgcgtgcgagctcgtgtacctgtgcatgtgcgtggtgtgtgcgcgagctcatgtatctgtgtacatggaggcgtgcatgtgtgctcgtgtacctgtgtgtgcatggaggcgtgcgtgcgagctcgtgtacctgtgtgcatgtgtgtggaggtgtgtgtgcgagctcatgtacctgtgtgtgcgtggaggcgtgtgtgtgctcgtgtacctgtgtgcatggaggcgtgcgtgcgagctcgtgtacctgtgtgcatgtgcgtggagttgtgtgcgctcgtgtacctgtgtgtgtgcatggaggcgtgtgtgtgagctcgtgtacctgtgtgtatgtgcatggaggcgtgtgtgtgcatgtgcatggaggcgtgtgtgctcgtgtacctgtgtgcatggaggcgtgcgtgtgagctcgtgtacctgtgtgcatgtgtgtggtgtgtgtgagagctcatgtacctgtgtgtgtgtgcgtggaggcgtgtgtgtgctcgtgtacctgtgtgtgtgcatggaggcgtgcgtgcgagctcgtgtacctgtgtgcatgtgcgtggaggtgtgtgtgcgagctcatgtatctgtgtgcgtgcgtggaggcgtgtgtgtgagctcgtgtacctgtgtgcgtgcgtggaggtgtgtgcgcgagctcatgtatctgtgtgcgtggaggcgtgtgtgtgctggtgtacctgtgtgcatgtgcgtggaggtgtgtgtgcgagctcatgtacctgtgtgtgtgcgtggaggcgtgtgtgtgctcatgtacctgtgtgtgtgcctggaggcgtgcgtgtgtgctcgtgtacctgtgtgcatgtgcgtggaggtgtgtgtgcgtgctcgtgtatctgtgtgtgtgcgtgtgcatgtacctgcatgtgtggaggcatgtgtgcacgctcgtgaacctgtgtgtgtacatgtgcatactcctgcataattttctag

SEQ ID NO: 16176 - DNA, 1772 bp, Artificial sequence
  DNA replication origin
ttcccacaaccctatgaggcaggtgtgctccgtcctcatcctcgtcctgcagacgtggggcccccagggcctgtggtggtctccatagcagtcaaggccacagcccagcctggtccacagtggacacagggagcaggacaggcccagagagcaggacaggcccaggccccaggcacgtcacaagggcttcccacccccacctcacattgccggaaagttccagtcatgagtgggcaacaggcgcttgcttccaacgtcccacgccgaatctggaacagaggatgctctgtgccagctccagacagggtctgctgggaaagcaagcgcggaaacagcatctgcctgggctggcgacgcccgccatagaccagggtgccagaggcccctcgctccgagaagcgcgggtccccatccccgctccagggccggcacgcagcatgcatgtgggcctgtgtgtcccagagggagagtgtgtgcccatgtgcgtgtgcgcccgtgtgcgtgagcccgtgtgtccctgagacagcaggtatgctcgtgtgcgcgtgagctcgtgtgtccctgagagaccgtttgtgtgagcctctgtgtccctgagaaagcgtgtgtgcctgtgtgcacgtgagcctgtgtccgagacagcgtgagtacccgtgtgtgtgtgagactgtgtgtccctgagagagcgtgcatgtccgtgtgtgagcctgtgtgtccaagagcgtgtgtccgtgcatgagcctgtgtacctgagagcacgtatgcctgtgtgcatgagagcttgtgtgtccctgaaaaagcatatgtgtccgtgtgcgtgtgagcctgtgtgtacctcagtgtgtgcccgtgtgtgtgagcctgtgtccgagagagcgcgtgcccgtgtgtgtgagcttgtgtccctgagagtgtgtgtgcccatgtgcgagcttgtgtgtccgagagagcgtgagcccgtgtgagtgagcctgtacatccctgagagagcgtgtgtgcccgtgtgcgtgtgagcctgtgtccctgagagcatgtgtgcctgtgtgcgtgtgagcctgtgcatctgagagcgtgtgtgcccatgtgtgagcctgtgcgtccctgacagtgtgtgccggtgtttgtgtgcctgtgcgtccctgagagcgtgtctgtgtgtgcccgagtgtgcgttgagcctgtgtgtccctgagcatgtgtgcccgtgtgcgtgtgagcctgtgtgtccctgagagcgtgtgcccatgtgagcttgtgtgtccctgagagagcgtgtgtgcccgtgtgtgagcctgtgtccctgagaaagtgtgtgtgcccgtgtctgttagcctgtgtgtccaagggagcgtgtgtgcccgtgtctgttagcctgtgtgtccaagggagcgtgtgtgcccgtgtctgttagcctgtgtgtccaagggagcgtgtgtgcccgtgtctgttagcctgtgtgtccaagggagcgtgtgtgcccgtgtctgttagcctgtgtgtccaagggagcgtgtgtgcccgtgtctgttagcctgtgtgtccaagggagcgtgtgtgcccgtgtctgttagcctgtgtgtccaagggagcacgtgtgcccgtgtgagcctgtgtccctgagagcatatatgcccgtgtgcgtgagcttgtgtgtccatgagagcatgtgtgcccacgtgcgtgtgagtacgtgtgtgtgagtgcatgcccactgctcaagcagccctgccatctgccgagtttgcatcccttgcaagagtgatggctccaaa

SEQ ID NO: 16177 - DNA, 1011 bp, Artificial sequence
  DNA replication origin
cgtgtgtcccgtgcccagttggcagcagctgtttgagatcattgtgaacctccttcctttctttttttttttttttttgagatggagtctcactctgtctcccaggctggagtgcagtggtgcgatctcagctcactgcaagctccgcctcccaggttcaagccattctcctgcctcagcctcctgagtaggtgggaatacaggtgcccaccaccacacccagctgattttttcttgtatttttagtagagacggggtttcaccgtgttagccaggatggtctcgatctgacctcgtgatccacctgcctcggcctcccaaaatgctgggattacaggcatgagccaccgcgcccggccagtggaccccctttcttgcattgtggcctggaaggtcaaccagctgaaaatgaagggtgacaccagagccccctcctgtgtcccccgcctgtccctggcagctgcagacactgggatggcggtcggatccaaacagcagaggcagctgcagccttggcctggctcctttgtgaggggctgggttccaggacagctggatccaggtgccaggtggtctgtcttctttttcttgtttttcatttctgctccctggtgtttttgcggggggatcctctccccaggggggacaaacatggccccgacagctgcaagccacgaaccttatcccagcaggagtttcagggatgtcttgtgggggctgttgtcccacctcagtgctgctgcctccatgctgtgcctttcttggggccagacatctggggagccccactcaagtgtcaggagggggaactgcagagagaggggtctctagccgaggaggggaggggagggaagctgcccagcagagccgcgggcgtgtccccggtaggagggcagaccttggtcttggagacgggccgtgggggtccaccttgtacgtggggaggtcaggactcaggaagagatgctggtggtgttggcagggcttttgctgggcctgctgcagtgcagt

SEQ ID NO: 16178 - DNA, 1206 bp, Artificial sequence
  DNA replication origin
cctagggagggcatggaagttccaggccctttccccacacctcaccctacgcttctcttcatctgtatcctttgtaatatcctccatgataaacatcaatgtaagcttcccaaaattctatgagtcactcttgaaaatcagtcagacccaaggagggggtgtgggaaccccgatttgtacctggttggtcagagctcgggtgaattatccctgggcttgtgatgggcactggaagtgggggtggtcttggggagctgagcgcttacccggtgggatctgagtctcccgctaggtagacagtgtggagactgaattagaggggggctgaggctaccgccaggtagacagtgtgaggactgacttacagggtggctgaacactcacccagtaggatctgaggctaccgccaggtagacagtgtggggactgaattagaggggggctgaggctaccgccaggtagacagtgtggggactgaattagaggggggctgaggctaccgccaggtagacagtgtggggactgaattagaggggggctgaggctaccgccaggtagacagtgtggggactgaattagaggggggctgaggctaccgccaggtagacagtgtggggactgaattagagggggctgagcacttacccggtgggatctgaggctaccaccaggcagacagtgtgaggactgaattagaggggggctgaatctcctgccaggtaagacagtgtggggaccgacttagaggacacccagctggtgtctgctgtgggactgatttgtggctggtatggagaaacccttcttggtgaccacaggtagataattcttctgtgttgattcttacggggtgagtgcagaagaaaaacttcttaaaactcaatactcagctaatgttagtggaggattagcaattaagagtgggaaaggggtaggaaaatgtaaactcacaattgaactgcctgggttagtttgttttgtttttactgagggactagggggaggagtacagaaggaacagaaaagatgacaaaaggaagaaactatggggtctgcaggaaccctacacaccaggccaagctcccgacagccccaatcctccctgcgatgcaggcgatgtgaagatgcccaggagggcgggacgcctggtacatcagagcagatgctaacacagacacagcattaccaaaccccattttcacttct

SEQ ID NO: 16179 - DNA, 2662 bp, Artificial sequence
  DNA replication origin
tgtggttggctgtggtttgttcagtcccgccaggtcttgtgttgaagtttaatccccagtgttggaggtggggcctggtgagaggcgttggagacatggggtggctccctcatgagtggcttggtccgttctctcaggagggacttctcactcagttcccttgagagctgtctctctcttgctccatctctcattgtgtgatctccacatgccagctctcattcctgtctgccaggaatggaaggttcctgaggcctcaccagaagcagacgctggtgctgtgcttcctgtacagcctgcagaactgtgagccaaataaaccttttttttaaaaaataaattacctagattcaggtattcctttatagcagcacaaacaggggctttagtgaccaagaggccaagtgaggaaggttaaccagggaggagagagtggtccaaggtggataatagggaggggggagtgggccaagggggataatggggaggagggagcagtccaagatggataatggggggtggggagtgacccaagatggataatggggaggtgaggagcggcccaaagtggaaaatggggaggactggtccaaggtgaataatggggagaagggagtgacccaaggtgagtaatggggtgtggggagcagtccaaggtggataatgggggtgggggataggcccgaggtggataatggggagtggggagtggttcaaggtggataatggggagtggtgagcggtttaaggtggctaatggggatggggggagtggcccaaggtggataagggggagggggaaacagtccaaggtggataatggggaggagggagctggccaaggtggataatggggaggcgggtaatggcccaaggtggataatagggagtggggagcagtccaaagcggataatggggaggaggagtgatccaaggtggataatggggagtggggagcggcccaaggtggataatcgggagggagagtggtccaaggtggataagtgggagggggagcggtccaaggtggataatgtggaggaaggaggggttcaaggtggataatgctgacggggagcagtccaaggtggataatggggaggggaggagtgacccaaggtggataatggggaggcgggtagcggcccaaggtggatgatggggaggggagagctgtccaagctggataataatggggagtggaacgtggtccaaggtggataacggggagaggggaatcgctctaaggcggatagtagggagggggagtggtccaaggtggataaacggggagtcggggaatggtccaaggtggataatggggaggaaggaggggttcaaggtggataatgctgacgggggagcggtccaaggcggataatggggagggtggagtgatccaaggtggataatggggagagaaagtgacccagggtggaaaatggggaaggtgagcggtccaagttggataatggggaaggggagcaagccaaggcagataatggggagtggggagtggtccaaggcagataatgggatgtggggaacggtccaaggtggataatggggatgagggaagaggcccaaggtggataatggggagggtgagcagtccaaagtggataacggggaagaggaagctgtccaaggtggataatggagatgcggaaaggggggcggggtggggggttgtccaaggtgaatagtggggagagggagcagttcgaggtggataatggggaggagggaacagttcaaggtggataatagagacacaggaggggtccaaggtggataatggagaggcgggtagtggcccaaggctgcagtgagctgtgatcacaccactgcactccagcctgggcaacacagcaaaccccgtctcgttcattcattcatttgtatggtggctcccacctatagtctcagtattgtgggaggctgaggcgggcagatcagttgagggcaggagttcgagaccagcctggtggccagatggcctcaggccttgggctggtgtgaggattgggaggggagaaaggggaaggctggttagaggctgttttcctctgaatgtgtttagcggcaggtgtggatggggagtgctgggttaaccacaggtgtttgccaggtaagcatgggcccaagagagttgagactatcacaggagtgagggtgctgttcctgttagaaggaaagagaccgaggccaggtggctggtgtgtggagcccacctctgcaggagtgtcacgcgcgaatgcgcaaagaggagccggggagaggctgagatgttgctcacagagctttgggagccttgtgtgtgtagagtggaatggcctcctcctgtgtgtagagtggaatggcctcctctgctccacactgcctgtgtgtgaaggggccatggtggtcccggagtgggtgaagctgctgggaccctgtgtaggactgcatgtgttttcacggcggtgctgagagggccgtctgcagccagactggactgcagcctccatctcctgggcacaggtgatcctcctgcctcagtctcctgagcagctgggactacagagtcgtgtgccaccatgcctattttttttttgagatggagtctcattctgtcacccaggctggagtgcgatggcacaatctcagctcactgcaaac

SEQ ID NO: 16180 - DNA, 895 bp, Artificial sequence
  DNA replication origin
cgcgaggcagtgccccctggcggcgggtagtgaccgccgcgggggcggagccggaggcggggggttgcgcttggtgacgggaggacgcgcggccgccgcgcactgggccggcggcggcggcggaggacgccgacagcacgggctgccgcggcagcagcggcggagcagcagagaggccggggagcggcggctggctcacgcgcgtcgcgcgggccgggatgagggactgtggcggcgcggcccgcgcgcagccggccggtgagagcgcgggcaacgggcggtgggcggcgcgggccaagaagatggcggaggggccggcgctgcggtccccgtggtcctggcccagcctcggcggaggctccaggcccggcagcgcaaggaatccaggcccgcggcgactgcagcggcgggaggggctgtgactgggccgtggagggagggggcgtgggtgtgcggggcccggccgggcggggggcgcggaggctcgaggggccgaggccgcgcggggcccgggtgcgcgccgacgggccgggctgggagtgtgagggtgggtgagttcgcgtgtgcccggcccgaagtgggtgtgactgtaccctgtccagagtgagttgtgtccctgccctaggtgggtgtgagtgtgcccggccccaatgtgggtgtgggtgtgcccctgtccagagtgagtgtgagtgtgcccctgtccacggtgggtatgagtgtgcccggcccgaggggagtgtgggtgtgtccggccccaggggggtgtgagtgtgctcctgcccgagggaggtgtgagtgtgcccggccctagatgggtgtgagtgtgcccctgcccgaggggggtgtgaggggaccccgcccgtggtgggtgtgggtgcacgtgtgcccagcctga

SEQ ID NO: 16181 - DNA, 2437 bp, Artificial sequence
  DNA replication origin
tccaccttagcctggaaaaacgatgggattacagctgtgagccaccacacaggtccccctccattagtggggactttagattttctttttaagtccttaaagagttaagtgtccttggccaggtgtggtggctcacgcctgtaatcccaacactttgggaggctgaggtgggtgaatcacttgaggtcaggagtttgagaggagcctggccaacacggtgaaaccctatttctactaaaaatacaaaaaattagccaggagttgtggtgggcacctgtaatcccaactactcaagaggttgaggcaggagaattgcttgaacccagaaggcagaggttgcaatgagccaagatggcgccactgtactccagcctaggtgacacagcaagactccatctcaaaaaaaaaaaaaaaagagttaaatgtcctctataaatattttgtatatttttaattagttaagtgtgtggtcaccagggtgggaaatgctcactgtaaatgtgtggtcatgggggtgggaagtgctcaccgctagtatgtggtcacggggttgggaagtgctcactgtaaatgtgtggtcacggggtgggaagtgctcaccgccagtgtgtggtcacggggtgggaagtgttcactgtaaatgtgtggtcacggggtgggaagtgctcactgctagtgtgtggtcacgggggtgggaagtgctcaccgccagtgtgtggtcacggggtgggaagtgctcaccgccagtgtgtggtcacaggggtgggaagtgctcactgtaaatgtgtggtcacggggtgggaagtgctcaccgctagtgtgtggtcacggggtgggaagtgctcactgctagtgtgtggtcacgggggtgggaagtgctcaccgccagtgtgtggtcacggggtgggaagtgctcaccgccagtgtgtggtcacggggtgggaactgctcaccgccagtgtgtggtcacggggtgggaagtgctcaccgccagtgtgtggtcacggggtgggaagtgctcaccgccagtgtgtggtcacaggggtgggaagtgctcaccgccagtgtgtggtcacggggtgggaaatgctcaccgccagtgtgtggtcacggggtgggaagtgctcgccgccagtgcgtggtcacaggggtgggaaatgctcgccgccagtgcgtggtcacaggggtgggaagtgctcgccgccagtgcgtggtcacggggtgggaagtgctcgccgccagtgcgtggtcacggggtgggaagtgctcaccgccagtgtgtggtcacgggggtgggaaatggtcgccgccagtgtgtggtcacgggggtgggaagtgctcgccgccagtgtgtggtcacgggggtgggaaatgctcgccgccagtgcgtggtcacgggggtgggaaatggtcgccgccagtgtgtggtcacggggtgggaagtgctcgccgccagtgcgtggtcacgggggtgggaagtgctcgccgccagtgcgtggtcacgggggtgggaaatggtcgccgccagtgtgtggtcacgggggtgggaagtgctcgccgccagtgcgtggtcacaggggtgggaaatggtcgccgccagtgtgtggtcacgggggtgggaagtgctcgccgccagtgtgttgtcacaagtttaaggtgaaggcagtcagcctggatgtgtgattttcttcagcagtcatggaggagaagggttgggctcgcccagttgggttttctaagtgaatacagtggagagggagcgggaggcgaaaaagcagagccctgtgtataagagtgaagagtgaagtgtgacgacggcccaacagggaagcgcgggcggcgagacagcccgacgggagatctcctgaggcgggagagtccctgcaaggcgactgagctgcagggcaggaggtggagctccacggatgacttttgacgggggcctttcagccctttgcggcttctcacagttgaggacccagggaatgtccaggactgaagggtgtgcgcccctgtcttctactatcgaagcttcaggctgtttagcctccgtttctccagaaatgccagtcagattcaatttccagaaacgcacctggcactaagagaatctagaaaaccaggctgaacgcagattagaaaacgccgaatagagcactagtcgagctgcagctgagtgaattaccgagtaaaagtgacaggactaaaaaggtgagaataacaggaggtgaagagacacgagcccgccacaagaaggactgaggaacagggcagcccacgttttgagaagaatggctgtatttctagagtcgaagaaaagtgaaatctcagactcgggaagcccaacgtggtttgagagggcaaaattacaccaaaccacaccgagacgtgtcagatggtaactgctctgcaccgaaagagacgggaagacaccgct

SEQ ID NO: 16182 - DNA, 1013 bp, Artificial sequence
  DNA replication origin
cagcctccctagtagctgggactacaggcgcccgctgccacccctggctaattttttatattgttagtagagacggggtttcaccgtgttagccaggatcgtctggatctcctgacctcgtgatccacccgcctcggcctcccagagtgctgggattacaggcgtgagccaccgcgcccagccgcctggccgtaaaattctttgagagatttgtttcccaatgaaagcaggttttgttctggtgttagttattaaacaaatactgatcacacactggtttaggcatcaggggtacagcactaaatggaaaaggaatgtccctgccctccaggagtttacatttagaaagtttgtgggaaagacaaataactaagcctgtcacacagtgctgccatatggagccaagtgcagtggggacaagtcaggcaaaggggggagggagacggggaggctgcagagaggaggtctttgtagacaacagaagagagggaagggctgagccaagcaaatagcgagggcaaaggagaaaggcagtacaaaggccctgaggcaggaatgtgaccggaggcctaccaagaggagaaagagcagactccacgttcagagagaaggaaggggatggcgagggtctggggacctgagtgagtggatgggtggggtgatgggacttgtgttttaaaggaaatattctggttgttgtgaggaataggctgcatggggcaggggccaggtggtggcaggcttgggggagcagcaagagctggagccaaaaggaggccagccttggtggtgcagcagtgtaggtggcggggagtggggtctgcagggtcaccaagaggttgggtaatgaacgttcactgtttccattttccctgctgcatgtgcatccctgggccctagcctatgcactggctcccgtttctgtggatgtcccagagtggaacggctcagcccaaggacaggtgcatttgtgaatttcagaaatgctcctagatttctttataaagtgcctg

SEQ ID NO: 16183 - DNA, 1281 bp, Artificial sequence
  DNA replication origin
ctaaggactcagaagccttcttgcaaagacaaggccacccctcccttgggggggttggggggtccaagatgtgaataaacatggagtgttcacaccatcccacggcctgcaaccccagtgagaaggccccagccgcgtttctctttggagtggcccatccatagcattctgcctaaaaaagcagggtcctggagttccagggcttctcactgcacagggcgtgggacacacctcttgtctcttgggaggtacccggagcccagcctctcaggcgctgggcgatgcagggggtggggactgtaagccctgggagatggggcagtgaggggcgctgtgaggcagggtggtgtgggaactgaaggtgggggcgctatggaggatgcggggtggtgtgttgtaggggagggcggtgtaggggatgggtggggcagggcagtggggcggggccttggggcgggcgctgtggggcggggtggtgtggggggctatgggaaggggcactctggggagctgtggggtggggtgctgtggggcaccttggggcgggccggtgtgggggtgctgtgggtggggcaatgtggagggtcataggttggggccttgaggcgggggtgggaggctgtggggtattgtggggtggggcctggcgctgtcaggggcggtggggctgagggacccgaggtcgaggcctcgtgaggcgctgtggggcaaggtgctgtgggaggcttagggggctggtgggctgggggcacggaggggaggctgtgtgggcgctcggcggcagggcggggcggggtgctggtgggctacgggacgggagggtgggacagtctgcggaccatgcggggctgggtgggctggatcagtgcccaagttgacttcgcgtcaccaactggcatgaggtttgggtaggaaagcgggcttctcacaagaataaaatccatcaaggtcctctgtctccactggagcccccagtcacagcgccttcctccgggctagaacctgtcgggggcccccagcctgtccagggccgctgtcttccaggaaagagagagctgtgcccagagaggagacagaactctttctccgtgaatcgcatccttttctgtgcgggatgatttacattctgggaacaaacggggccgtatctcacagtgctgcaggatgccagtggtgcaaacagtcggcgacccggccatttcccgagggtctcaggcgtcccacccaacggccgctccccgttccctgtccgtcacctcctcgttctcctacgaaggcgcg

SEQ ID NO: 16184 - DNA, 1622 bp, Artificial sequence
  DNA replication origin
cacagtgctgcaggatgccagtggtgcaaacagtcggcgacccggccatttcccgagggtctcaggcgtcccacccaacggccgctccccgttccctgtccgtcacctcctcgttctcctacgaaggcgcgaacgttccagactctcgccggtcctcgacagcactcattcagtctcccccctggagatcccaggctgtactctgggacagaaaagaaggcgggtacgaccgcggtgtcgggtcctaccttagccgctccttctcctgagggagccaggcgggagagaggggaaccaccgaggcctcggtcttcccgcgtcccagagcggccgggcgagtctcacttccggcctgtgacccgctgacctgtccttgtcccaccagtcgggcggtgaattggactgactggtgacccctggcaccaggcttccccatgggcaccggagcaggcggacaggggtggggtcccgcgagcgacacggaagggtcagtgtggcggagcggaccctgtggaggcggggtcactgtgctcctgagaagggtcctcgggggtggagtctatcaaggttgcgggggcgtggtcacggagcggagccaataaaagcggggcgtgcacggccgcgggccagtgcctatgaagggcgaggggtgtggtcacagggcgggatctacgaaggatgcaggggcgaggccgggtctctgcaggatgtgcggtcgcgggtcggagtctataaaggcaaggggcggggtccctgggttgggtgaggggtgtggtcatggggggcaggtctgtgtagggtgaggagcttgttccccgaatgagggtctgtgaagggtgaggggcatgttcctggggtgggggtgtttgtgaaggatgaggagagtttttccggcatgaggggctgtgaagggtgagagccatgttgccggtggtgcgggtctgtgaagggtgaggggagtgttcctggagcaggatatgtgaagggtgaatgacgtggtttcggggtgaggttagtgcaggatgaagggagttgtctaggagctgtgtcctctaaggtgaggggcgtggtctctgggcggggtccgccattttgtctggtgaaagttgggaagggacaagcgagactcccacctctggcctcatcctcagccctgcgttttccccacttgtactgccagaaagctgagtggtggcaatcacttttggagtcttcctgagacaatccaccaatatgaagtaaactcgaggaagtgagaggaaatcattcgttcattcattgattccactcaaggatcacccagggctcctctctcagctcttcttctcacgtccaatgccctacaagatatctagaagctgccctgctgtccctgcacggctcttgggccggaagcgtgctgggggtggtgggggccagggaatagcataaagagggaaatgtggagcagagcctggctctgtctgtgcaggactctcctctcaagcatgaatggccatgggatggtgatgacaggtggtacctctgacttagcaaacgtggagcactgagataggaaagggccactggaccccaacctgtgccctggaccacaggtttcctcccgtgtcctctcctgcctc

SEQ ID NO: 16185 - DNA, 1852 bp, Artificial sequence
  DNA replication origin
catttaggggatgtttgaggcaaaggatttctcgccctctaccctctcgaggcactcggccagaaatgaggtggaaagcactggaagaggcgcgcgccaggggctccggcggggacccctcacaagccactctcggcgtcgccccgcggactcattagcgacatccccggtgggcgcctcgcgttcccgccgtagaggaacgatcagcgaggcaaggaaacgcctggctggggcagcggggacgtggcccctccccacgcttttgtcttaaccaccccctcgggcgcaattcgccggccacgcggcaatgcggacgcccagactcgggcgcggggtgcagcggccctcccccaccgctccgggactgcgagcgcttctgggcacggccccgccacacgccgccaccattgcgcccactgccacttctaggggctcctccgacggtcagggatgtgctgaggcaacgccgggcgggcagcaggggcgagtccgcgcttccctggagccgaaaggagcactgcggccggtgaccccgggcggaaacctgttgggagcgcaccggaagtagccgtccacagaggtctgcgcacctgctctcggtctgctctgagacacccggatgaccgcccactcggtggttcaacggtccccgacaggagctccgggtccgggcaaggaaggggccagttgggctcttagtgtgaagcgactgtgggacatcctggtgaagacaggacctaaagccggcagatgctgctgtgatgtagatgcaaattggggcgtcttgatggtcagtgatgccactgagctcgcgaggtcgcccagagacagtgttgagtgagaagcggccctggtgcccctggggctgttgaagagggaagaggcgccctgggcatggagaccgctggggcggccctggatgggaggggagggacccaggggccagttgccacagagtccctcatggaactaggcccctgagacctcagtgttgctcaggactgttgagttccttggagaatgagaactaaggaccgaaggtaggaaaaataacttgacttctctgtaggaaaaataggtatctcgggaatgtttccaggtggctgtggttgatgatatccacagcaggagcccggaagcaacatgtcagaaccttagtcttttcacccatttggggaaaaagttatctcctggtcacaaagataaagttgcctttgaccattagcctactaaagtccactgtggtggtaatgagaggtgaagccagctggacttcctgggtcgagtggggactcagagaacgtttctgtcttacaaggagattgtaaaatgcactaatcagcactctgtagctagctagaggtttgtaaaatgcaccagtcagtgctctgtagagctagctagaggtttgtaaaatggaccaatcagcactctgtaaaatggaccaatcagcaggacatgagcagggacaaataagggaataaaagctgaccaccctccagccagcagggacaacccgttcggatcttcttccatgctgtggaagctttgttctttcgcgcttcacaataaatgttgctgctactcactctgggtccgtgccatctttaagagctgtaacactcactgtgaaggttggtggctccatttttgaagtcagtgagaccacgaaccaactggaaggaaccaactccagacacagtaacagtagctgccattcatggagcacctgctatgtgccaggtggtgccaagtgctctgcgtgtgccaggtaaggattgacatcaccatttcacaggtaagaaagctgaggttgaacaaattgtctatgatccagatccatctgtcccac

SEQ ID NO: 16186 - DNA, 795 bp, Artificial sequence
  DNA replication origin
tttcaccatattggtcagggtggttttgaactcctgggctcaagcaatttacctgccttggcctcccaaagtgctgggattacagcatcaaaatacatgaggtttccgggcacagtggtcacacctgtaattccggcactttgggcatttttgttgctatgtagttcatatgtcaagcgtaggctatttcagcaaaataaggttcctggcatccctgggctctatattttgtagaaagccctgtaggttggagtctagttgcaagtccatagttggacagaggcaacccttttgatcctagtttaggcgggggagtggagtcgtgatttgtgatcctagtttaggcgggggagtggagtcatgatttgtgatcctagtttggggagtggagtcatgatttgtgatcctagtttggggaggtggagtcgtgatttgtgatcctagtttggcggggtggagtcatgatttgtgatcctagttttgggggggtggggttgtgatttgtgatcctagtttgggggagtggagttgtgatttgtgatcctggtttcagggagtggagtcgtgatttgtgatcctagtttggaggggtggagtcgtgatgggagtcagcagcagggagggtctgtgttctcggtgttgaagttggagcgatgtcatcccccatgagatgggggctgtccaggtggatgaatggtgtgtccccagttggccatccccgtcaggaaggccttgtagtcccctgggagggctgctgtgtgcatctctggcgctgtttcaagtgtcaccctgcat

SEQ ID NO: 16187 - DNA, 994 bp, Artificial sequence
  DNA replication origin
gaggccggaagccagctgtggtcctcagtccagccttctagggccgcgccgcggtcgcctcctcccggcctctgcagcccgtcggtggctcccgcggcacccagaacaggctcctcctggactggccgccgcctccccgcgccctccccgcgccctccccgcctgcctgcccgcttggcgctccttcctggtccgacactgccccacctgtttgctcgacccggggaagccaccgaggaagcgccgaggagctgcgcagtcgcaccgagcccggaacggaccctcccacagaaccgggtccagagccggggagggggcgggctaggatgaagagggcgggccgggccgagctgcgcacacgcaggcttccccgccccctgcggggcctcagtacgcctccgagaacgccgggaaccggaagccagccgcggttccgcccggattcttccggggccgctctgggatgactggaggcctgcgccgtctatggtcggggagggggagagcccacggcagctgagcggagggtctggcgcggtgacgctgcgcatccgggccgcgccgcgctcgccccgaccctaaaccctcacctgaaccctaaccccgctgggctcccggctcccccgtcggtcaccatacatcgtgtgtcccgattcaccataaccaccagaaagtcgcttatgaagatgttacaattatcggggctcagaacacaacgccccaaaatgaaggcctgggaggcagtttccctctgaccttcccaggcctccagtctcagttcttttctcccgcgaggctcctcacagagtgaatcccttttacccaaggcgagtcccagaggccagacccccaaagccagccacaaaacctaaaaacacgactctgatgttccccccgcttttctgtgtgaaaactggcggtaaaggccgggcgtggtggcgggcgtctgtagtcccagctactccggaggctgaggcgggagaatcgcttgaac

SEQ ID NO: 16188 - DNA, 890 bp, Artificial sequence
  DNA replication origin
caaaatgaaggcctgggaggcagtttccctctgaccttcccaggcctccagtctcagttcttttctcccgcgaggctcctcacagagtgaatcccttttacccaaggcgagtcccagaggccagacccccaaagccagccacaaaacctaaaaacacgactctgatgttccccccgcttttctgtgtgaaaactggcggtaaaggccgggcgtggtggcgggcgtctgtagtcccagctactccggaggctgaggcgggagaatcgcttgaacccgggaggcggaggttgcagtgagccgagatcgcgccactgcactccagcctgggtgacagagcgagactccatctcaaaaataaataataaataaataaataatccatttatttgccttttctccaaaaatctgccttttatgagttggctttcagtgaaccttcagagggcaaagaggaactttccctttggcccctacacaataaagcatggttgaaaaaatagcacttgataaaggtgaggagaccagcttaggagcagggggagaaggaaaggaaagccaagccatcttgtcacccagaatatagtgtaggccctgtacactgtgttagaatcaaggcagaaattttatatctgaacttgagacgatcaacgaggatggagaatgtctagaagtctaaagcaccatgcaaagtcacacatgattaagaagatgccttacattattaatatcagtgctggggagattgtggagaattacgcactgctatgcttgaggaagcgtgtttagtacaatgttgaaaatgaattaagctgtacataaagagccttaaacacttcaattaatctaggaatctatcctatggaaataacaaaaatgacaaagagaagggt

SEQ ID NO: 16189 - DNA, 1300 bp, Artificial sequence
  DNA replication origin
tggcaagctggcccgggcatcagggaactatgccaccgttatctcccacaaccctgagaccaagaagacccgtgtgaagctgccctccggctccaagaaggttatctcctcagccaacagagctgtggttggtgagtatcaggcagcagttgaatgctgagggctgtgggtgaacatgctgtgagtgccggtggacagccagtggctagacttggtccctggaattcgattacctgttgttctaaaacttgggttctgtaagtttgagctcatcctgtagtctcagttgtcatcactgtacaacaggcacaacagtacctgctttactgctgttgaggcgttaaatgagattgggacgaagtcaccagggtcttggattctaccgtgggcttcctgattgctgcacttgcatgcagttggttaacagcctttttagagaaggcagggagagattgtggctttctcaaagacgcctactgagtgagtgaaaaaggatttgagtctaggttaactcactgtgctgtttgggaacatcttggaatccttgtgatgaactcagcctcgcacaggggaggctctgaggttgtgttcctggaataagtaaagctgagatggggcaggctgaatcaagtgtcttacgtcaggttgagtggccggcctgacgtctcacacatggtgaggggggtgcttccctgcgcttggagctcagccagcattctaggtgatggaggtgagggccttggcttgcctgcccattgtggattgaagaaactggatgtcagctcacagggtgcaaggggctccctagggtggaggcgagtgggctttttgctgggtagttggatgcagtattgggaaggtgcatgacaggagattgaggggaggtgggggtgctctgaccgactgggggttccctgaggtatctgatcccctacaggtgtggtggctggaggtggccgaattgacaaacccatcttgaaggctggccgggcgtaccacaaatataaggcaaagaggaactgctggccacgagtacggggtgtggccatgaatgtaagtaacccagaaatgcagggttgggtattgaagttacagtggccacactgttgggtaggcaagtcccatccacaggtgtccctgcaggagggggatctacggtgggaggagcagcaggtggtggtttgtagtcacgggactgttgatcctgctccagcactcctgaaggaggtgggctcaccctccttcaccgtttctccgcaagaaacggaggctgggaggggcagtgggggcctgagctgga

SEQ ID NO: 16190 - DNA, 1210 bp, Artificial sequence
  DNA replication origin
ggtaggtcatccttgcggccttgcggcatgggcagtatccgccgccatcctcttccgtgaggcgcgctgagacccggaccggccctcctgagaggatgccggtgcgggcgcccgcggagagggtagggagtggtgggcgcggcggcctcgggggcggggtcccggaaagccgggctggcgggggtacccgggccgcccggccgcgctaatcgtgagtcgcccccaggacccgtcgccatgggccgtgtgatccgtggacagaggaagggcgccgggtctgtgttccgcgcgcacgtgaagcaccgtaaaggcgctgcgcgcctgcgcgccgtggatttcgctgagcggcacggctacatcaagggcatcgtcaaggtgcggaacgctggccggggcgggaggggaagggacgcccggccggaacgccgcactcacgccgcctctgcccacaggacatcatccacgacccgggccgcggcgcgcccctcgccaaggtggtcttccgggatccgtatcggtttaagaagcggacggagctgttcattgccgccgagggcattcacacgggccagtttgtgtattgcggcaagaagggttagcatcgcggcggggaaggaaggtcggggtggggaggggtctgggtgttgcctgaggagttaacgtcctaagccgatatgggaacctcgcaggcagaagcttcaggtggggacatccgcgtggccagaccagtggccaccggtgggtgccgagagagttgtaccgggaggctggatgttgaatgctgtgctcgcaacttcgcgggttgcctagagcgagggggttcgcattgtttcttactgtgctgacggcctgatgctgcttccccttgcagcccagctcaacattggcaatgtgctccctgtgggcaccatgcctgagggtacaatcgtgtgctgcctggaggagaagcctggagaccgtggcaagctggcccgggcatcagggaactatgccaccgttatctcccacaaccctgagaccaagaagacccgtgtgaagctgccctccggctccaagaaggttatctcctcagccaacagagctgtggttggtgagtatcaggcagcagttgaatgctgagggctgtgggtgaacatgctgtgagtgccggtggacagccagtggctagacttggtccctggaattcgattacctgttgttctaaaacttg

SEQ ID NO: 16191 - DNA, 2122 bp, Artificial sequence
  DNA replication origin
ggcgcccttcctctgtccacggatcacacggcccatggcgacgggtcctgggggcgactcacgattagcgcggccgggcggcccgggtacccccgccagcccggctttccgggaccccgcccccgaggccgccgcgcccaccactccctaccctctccgcgggcgcccgcaccggcatcctctcaggagggccggtccgggtctcagcgcgcctcacggaagaggatggcggcggatactgcccatgccgcaaggccgcaaggatgacctacctgttcaccagcgcggccgaaagaggaaacacggcgtcagcgagcggccttatcttccggggcggggcccagggccgcgacaccttccgggcgcgccacggccagcctagcgcggtgcacgccggggcttgtagtcaccagcggccgccggccccgcctacttctcctcctccagggcccccgcgcaggcgcaccaggagacgcggctgaaggtgtcctggtgtgcgtgggctcggaaggagggtgcaggagtgctcggctttcaccggggtctccgggagggcaggtgttttctgagtggccgaggaggcgccaagtggttgagtgacctgtccagggtgtcacagagcgacccactccgggccacggggtctggggctcccggcttgcctggtgaggggcttccgtgtaggccgagggggttctcgctggtgcagagcaggagatgggcaggggagacgcgtggacccactcgtggaacgtcatggtttgcaggtggcaaatgtccgtctccctgatgaacgggcgcttctggacgcggggaccttatccactgtaggcccttggagaggtcgggcgtcgaggagaggagccccgggatccttgccgagggtgagggccggccggcccaggaagtggggagggccaagctggagggtcccgggtcgaggaagaaggagcggggatgggctgggtcacatgctgcggagtggacgaataatgggagactggaccgtaccctgaccagaaccctgtgcgggagaggtggggaaggagcaagaaatggaggctgggaggggctgtgggggcctgagctggaaagagtcagcccgactgggggtgtcctgcggtacgtgctgtggagaggggcttcgcggaatcgggcccctaacgggtgggaccccgaggccgcgggtgggggatggtggggaagaggttttccaggagagagtccctggctgagtgagcactgtcgagcacacgcgaggccgtgggtggggaggcagcaaggaggtgaaggcgggggtcccagtgggcgggagaggcttgctgtcggtactgggaggtggggtgtttcctagaccctgcaggggctgaggcagggttgacatcgtgagaaggagacaggagagggtggaagggtgtcctgtgcccgctgttgctcacaggggagaggaggggctgctgcaggaggccctcccctagggtcggcagggggatggaggaggagctgcccggtggggactcaggaagcagcacagcccacagctagggccaggggctgaggggcaggactggaccctgggggcagggtgaggggttctggggtcagcccaaaattggcccacaggcccagcctgtccgtcactcctgaacaaatctgcttctctggaggagcagaaggagagttgggtgcgggatagaggtgagaagagtgcttggacacacaggctgtggggtccccaagatggtctcacgggtctctgggatgagatgcggctaccaagaccctacgtgcagccaggagactgaccaggccgctttaaggctggaagagacatggccctgccagcatccacctgacagtcctgaggactgtgtgactgggctcagtcttgaccttcacgggagaccacacagcctggtacacagcaggggctatgcagttctgggtcacttgacagccactccagacgaggccgcaagcactggacatggggttttccagccttctggggtggagccatctttcttaggccaggattagtccctccccacacagtgcctctgcttgtgctagtggcctggtgacctcccttatgccatccgacgtcaccccaacctgctgt

SEQ ID NO: 16192 - DNA, 1201 bp, Artificial sequence
  DNA replication origin
ggcggtcgccagggccccagctaggggcgcgcctggggggttccgggccagaccgggtatcagtcccaggcccgacgggcgcggaagggcgtcgacgttctcggcgctccgtttcccccgggatcggaggcagcgaacgttcaccccttgcgcccactctctgcccccgggtggcctgcgggggttggggagcacggtgggggatcgactcccggacccgcaggaagggcggagcgggggcgtccggccagggtcggtctcatataaatttatgacattgtttagtatgacttttttttttttttttgagcctgagtctcgctcttgttccccaggctggagtgcaatggtgtgatctgggctcactgcaacctccgcctctcaggttcaagcgattctcctacctgagcctccggagtagctgggactacaggttcccaccaccacgcccgactaatttttgtatttttagtagagacggggtttaaccatgttgcccgggctgatctcggactcctgatctcaggtgacccgcccgcctcggcctcccaaagtgctgggattacaggcgtgagctaccgcaccgggccagtttctgggatcttgaagtgtctttgctgctccctctgatcactctcagaccacctctcctgtctgcacccaagggtggccattctgacttctaacagccctgtgacttctgtaaacatttgtatgctctttgtatttactaatttaatcctcatggtaatcctatcaaaatactactgttcccatactaaaatgaggagagcatagtgtccctgttatttgccaaggtctagtctctttttttgagacggagtttcactgttgttgcccaggctggagtgcaatggtgccatcttggctcaacattatctccacttcccaggttcaggtgattctcctgcctcagcctcccgagcagctgggattacaggcatgcgccaccacgcccggctaattttgtatttttagtaaggagggggttactccatgttggtcaggctggtctctaactcccgacctcagatgatctgccagcctcgacctcccaaagtgctgggattacaggcgtgagccactgtgcctggccaaggtctcatctcttaagtaacagagctgggatccaacccacagacctggctccaagtcacatattctttagccactaaactgt

SEQ ID NO: 16193 - DNA, 1408 bp, Artificial sequence
  DNA replication origin
tgccccctccccgggttggggcatttattggaccaacagtcatttcgtaaatagctgttgggtatttaactgtgagcgttccggtgctggggaccccgcagtgagcgaacagcccgcctcgcctccaggagcatgaattgtaatagaggtgaggcgttagtgtaacaggcaataacgcagcaaaataacttctggttttgacaagggcctcgcacagaataaaccaaggaaataaaattgtgagagttagggggttagggtagccttggcggtcaggggaggctctgtaaggagttaacatttggccgtgcgcaatggctcacgcctgtaatcccagcactttgggaggccgaggcgggcggatcacgaggtcaggagatcgagaccatcctggctaacacggtgaaaccctgtctctactaaaaatacaaaaaattagccgggcgtggtggcgggcgcctgtagtcccagctactcgggaggctgaggcaggagaatggcgtgaacccgggaggcggagcttgcagtgagccgagatcgcgccactggtctccaggctgggcaacagagggagactctgtcgcaaacaacagcaacaacaaaaaagagttaacatttgaactgaaacctgctggaggagagaagcagccacagatccctgaggagaaactcccaggcgggggaacagagagaaggctggcatggctgcggcgtagtgagccgggtgccccaggtccccgaggaacagggcttattctgcgtatggaaggaggtgacccctcctagtcttccagaccccagttaaatgagttcccccagtaacatttcttggtggtccttcatctaaaattagcaccctcctccccttgacattttctgtctcagcaacagcttgatctgttgtcatcatatcactgctccattatttttagctcagtgctgtttaatctgattgaaggtttacttcctaattccgaagatagaactaaaagcaggtttttttcccctctaaccaggtagcccctccctgaggacatgcactccctagacatgagcaaacacaaagcagcagtaacttaccgctcctagtccaagtcctaccctagtcctgggttgcagttcttaccagagtggagggtggtatgtgttgaggggtcggggatcaagtcttctggcagcctcataccctgagatactctggttgccttgttggggtgaggacaacacgtgtggccatcgcagtggcccaggtgggtcctgccacagactgccctggacagacagtgagtgggggctgggtgggggtggtgtggccctgctcttccatgcgtttgcagtctgtgccctctgtgcaggggtgattcacgaatctgtctgatccacccccatcgcccttcgtaccctaaca

SEQ ID NO: 16194 - DNA, 1784 bp, Artificial sequence
  DNA replication origin
acccttctctcctggcccaccttctgagctggcagggcttccttcctggcttctgctgggcagtgtattagggtcctctagagagacaaaaccaataatggagtttaggagaggggatttttatttgtttgagacagagtcttgccctgtcacccaggctggagtgcagtggctcgatctcggctcactgcaacctctacctcccaggttgaagtgattctcctgcttcagcctcccgagtagctgggattacaggcacccagcaccacacccagctactttttgtacttttagtagagacgggggtctcaccatgttggccaggctggtcttgaactcctgacctcaggtgatccacctacctctgcctcccaaaatgctgagattacaggggagagctaccgcgcccggccaggagaggggatttattaggcgaactggcccacacacttatggaggctgagaagtcctcccataggctgtctgcaagctggagacctagagaagctgtaagtgaggctcagtccaggtaagaaggtggttgaaccaaggaagccagtggtgtaactctcattctgaggctgactggccgagagccctgggaggcctctgtggcaagcctgagtccaaaggccgaagaacctggagtcctgatgtccaagggcaggagatgggtgtctccctccagaaaagagaatttgcttgtcttctccctttgtgttccatctgggtccccaaccaagtggatgtgcctgcccacgctgagggcagatcttcactgagtccactgaaaacatcctcacacactcagaaacaatgcttcgccagctgccaagtacagtgtgtgtgccttagtcccagctactcaggaggctaaggtgggagaaacgcttgagcctgggagctggaggctgcagtaagccatgattgtgccattgcactccaggctggctgacagagagatcctgcctcaaaaaaagagatagatagatagatagatagatagagctccaccagccatctaggctttttttttttaaacagggtgtcactctgtcaaccaggttggagtgccgtggtgctatcatagctcactgcagccttgacttcccaggctcaacccatcctcccacctcagcctcctgagtagctgggactacagcgtacaggcacagaccacgatacctgacttatttttaaattttttgtagagaagtttcaccatgttgcccaagctggtctcaaactcctgggcttaagcaaacctcccacctcagcctcccaaagtgatgggattacaggcaggagacatggcagccagctaaggctccctgtaccctgttagtcggctttacagcacctggaattgaccgccacacggagcctggcgctaaggcctggctgtgcccaatggttctgcacgaagacccgggccggcctgtggggagctcagctgcatatgcgtctgtggcgccccctgtgccctgctctttggggactgagcatagctgcccctccctctctcccttctgcccgctcctggacatttccggaaggccccaggaaatggtggctgatagtggttcctgaggccacaccacgggctgcctggtgccctttccctccccagtgcccggctggagcaagaagccgagctcctgatgggagctggccctttctttagactttgcttcaccttcaggacagggggttctgaatttctgcgctagggccccgccggcttgggtgggcttccagcgtgaatcctcggcctgtcgtccccg

SEQ ID NO: 16195 - DNA, 1412 bp, Artificial sequence
  DNA replication origin
gaggttgcagtgagccgagatcgagccactgcactccagcctgggtgacagggcaagactctgtctcaaacaaataaaaatcccctctcctaaactccattattggttttgtctctctagaggaccctaatacactgcccagcagaagccaggaaggaagccctgccagctcagaaggtgggccaggagagaagggtgtggccggaagggtagccggtgggggtgctgcatcctcttggccccacggggagcaccctgtcacccctaacagatgaagagaaggtgaggggggattgagttacctgcccactggtgtgtcaaactccatgatgggggtgggaacatgcagacctggcccctccaaggcccactgctccccgggctgtgcgccccacagtctgtgccaggggctgcagaaagagccatgggaagcctggccctggtagggcaccaagatggggagggctggatccaccctccagagaacaagaatcctgggcagtagccgggacatggtgggggaggctgaagggttgtccctgagcatccccaacatggagctcggaagtctgggccatgggcaggaaagcacgaaggtcagggccagcctggggaaccaagagctgtgccacgatcccttccacctggggcagctgcccacatgcccgccactgggttccatcacctgagactcctggcaggtgcctctctgagtctttgtcctgtgctggaaactgggatgtgcagcacacatcttcacacccacagcacggacagcgggaataacacttcctttggggatccagggtttctggtgtctccagatttttcaggcgccaccatgttcctctcatccagacgtcagcacccaaggtggaagcaggtcatggcatgcccggcccagctgcagtccgagtgcagatcccatggcgagcgtgggatccagcccaaagcacaagccacgcacagcccgccaggttgagtgggcaggtacctccaacagccagcccaggttgagtgggcaggtacctccaacagcctggagccgtgaggccttgcgcaggggcgttgccggccgtggaggtctctggctggcaaagtggcaccgaaagagtcctgtgtcataaccagactcacttgtagcttctgttgctctccctagctatttgcaaagcatccaggataggttcatctaaagacattctgactcatcttggacacgatccacttactctgtggaccctgttcacagaacctggagtccctgctcaccttccccaaccccttattgctgggtcatgttcacaagtttctgtctctttttgttcccagtcccggtaccagctcaggtccaatcagcttctgaacctctactgtgcagcgcctgagacagggtgggagagacaccgaca

SEQ ID NO: 16196 - DNA, 1551 bp, Artificial sequence
  DNA replication origin
cggagatccaggggatcgcccggttgggccctgcgcaccccggatcaccagcttcgggcgctggttcccaccgaggctgttcaggcgccgctcccccgcgtccctgcgacaggaggcgcctgctgggcgcgctatggaccccgcctcgcggagacgcctggctcgggccttgtccccagtgagcggctggagcggccgcggggtcgcagagcctccgggaccccgaggaagggcgcccctcggagttgcccgaggccgggcccggcgtccactcgccactcgcctcgcccctccccggccccgcaccgccctccaccccgcctccttcgggttccttctgcgtccggcagagcctgcgcgcctcccccggacggccacggactcgcagcctcggcgaggacgctgcctgcgtcccgactgcctggacctccccgcgtggctcccggcgaagcccagcagccggagggtgccaggtccgcctgacgcgcccctccccacgggaagaacggggcgggggtccaggagggacgtaagccgggctcccccggcgtgttgatccgaacccgcgcgggaaaacttgcgcaaaccaaaggagggaagagtcaggcagcccccagccccccagggaggcccaggtgaaaaacagacgccggcctcgcctctcccggtgcggatgatcccggcactcccacccccgcccctgctgccccgagttcggctccctcagccccacatcctctctggtcatctaagtggactgcagctgctcagggagcatgtcgcgaaggatagggaaggacagggggtctgcttccccagccgccctccagacccccagggctggtaggggccggcaaccctatgccccaacctggcctgctgcaggtgaggggggcacaccagggtaacacaggagcaggagggggagaaagcctggctagagcatccacctcataggcaccttccttgtgtccagggtgcagatgccagggctctgaggccctgaggtcctgtctggggcgagggggcttcctccatccactgcatccactgcccggctgagtctagaggccactgagcaagcagaccctccaaagccaggcacactcaggccctcacatggtcacggtgcttatgctctgggccagcctggattgctcatccctagctgagattgggattcacagggtcttccagttcccccttttctttctctactgattgagaaacacagagtcctttgattgctctgggacctggccattgcgtgttccctgcagccttgaacccagttcaatggggccgggcacattccctgataaagctgtttaggttgcttgaaaacacaatcaaccctattgctaaacacgtagaaactggccctgccctgagtccaatcccttaaactctcatctaagctccatagccagagtcccttgctgcaaatgtacctgggtggagcatcccttgcctcatcatcgatcccaagaaagctgaagctccatgtgaaaatttccggaagaaatgctctggactgatcaccctggcgtt

SEQ ID NO: 16197 - DNA, 1441 bp, Artificial sequence
  DNA replication origin
tccatggtggtcatacaaccctcccccctcaagagcctcaattaggccctggtttgggcaggggtttgctcactaccttggggttgggggcaagggggccttcctaagcccagcaagggccaaggtagggtctgggcccagggccagtgggcagagcaggaggtgggccttcacaggacatgcgaggggaaggaggcagtcaagcttcctaccatgaggctcagtggtgggtgggcatccacgtgttctggccgagagacctgttggcaattatgaaaggattagaggtcaaggtgccagaagcccaacttccaggctaatcaagggggtactgtgctctctgctcctttacctccagccccagatttctctagcagggacatggggctgggctgaagcagccatggcacttgagtgaaggaggcccactgaactcttgttcctctttagagtgtatgtgtgtgtggcatgtgtgactcactccacaaagccgtaagaagtggatgccacgtgccaggcactgagtaatggggatacagtagtggacacgaggaccctgccttcacgaagcagtctggcggaggaaagagttaaataaccacacaaataagcacactgcaaccacgacagcgctcaagtacagggaactatgaaagccacttagactagaacgttcagtgtaatgggtcacttccccagggacctcggccaaggtaatggaggtggagagagcactccaggcagcaggaatagcatgtgaaagggcctgaagcaagaagaaatggggttggatgaaccagtgtgggtaaattcccggcagcaagggaaggcagtgagcgactggaggttggggaaggcagtgagcgactggaggttggagaaggcaggagcaaaaatgacaaactgtagggaagacaagagtggacatggaaacccctgccctcaagtacataaattccagtctccagctcacctgtcgccaggatggaaccaggcacagggatgtaatctgatataaatcgttcacctcaattaagccaatgaccccagaccctctacctgcccaggcattcccccgggaggtcggaatgggaaaaagagtcttcgtatggcagcttctggcccagaaagtggtttgtgggtggaagccccaggtcaccggcacaggtaggctgatccccccacctggctcctgacagtaggaatgcccggaatagcaaccagaatttagagaagacaaacagcctaccccacccaaggcaccgttccttcctccactgtcacttatcctaggccttccggggcaataaatagaaagagaaaaggctctagaaggaggtgatttcgcaggaggagtcagggccccgggagtagacccaggcctgaagaaaaggccgcagctggagctcgccttactcaggccccggacaccgtggccgcc

SEQ ID NO: 16198 - DNA, 995 bp, Artificial sequence
  DNA replication origin
aacagcctccttcttagagatacacacatgtgcgccccttctcagtggctgacaggtctacggcccttcggttctggagaacaactcccacaggggaacctacctgcctttggaggcttgtgatggaagtaggcatgtcaagaggactgcagagatttatatatctatataaggcagctgaggctgatacacccgacccgccattgtggtgccaagtgcgacagagaggcttaatcctgttaccagaagaaggagatgtagagctggcttagcgtgctcggaggaggaggaaatagggagagcctcaatggtttggttgttaggcaaaatgtcaacgtttggagattgaaacaccagggtgtatgtttgtaacccacctgccggcagacaaagataagtttgtttcatacagaaagaaaaggggggttgggggggttggcaggcaaaagttgtaagtgaaggtagcgagctatgagaagatcaggggtgaatcctggacaaaggttttgttccaactttttgtttttccaggttgaatagctgttaacaagggtaacccctgtgagggccggataggggatgttggtgggggaggaggtgaaggctgtttggttttggagagagacagaaataggttttcgttaacaagtagctactgcagtacgggtagggcagaaggatataggttgcagctgagggaattgtgtgtgcattttttccagggagcgcccttgagttggttacacggagagcagtgctggcagagaggggaggggttgataagaggtgttctatggaatccaacttgtaacatgtttagatgttaagaggcaaaggagagtgacagccctgtgtgtgacggtgtgggtggatatgatggattgcggggaaaggtgtttagccgaacaagattataaacaggttttgggaatgaattggccaagtaggtgagatgcaggtttattttgggccaagtttctgcagttagattaaca

SEQ ID NO: 16199 - DNA, 1409 bp, Artificial sequence
  DNA replication origin
gcagatggcttccagctcagtatcactacagcagggggtaccacaggctgcagatccagggtgggtcacagcaggagcatctctcacacgggcctgggctgcaggggtccagggggatggtcctggaactgagagctccatctctgcctcctcacggcgagttctgaggctgggcatgacaaggacctgaaaaccggcaagaacacaggtgagtctacagacaggctagctctagggattcatcctcccatcaggccggggtctcttcctccacccctgcagcccaagacctgaagagggcctggtgctgccaggtctcaggggctgatgctgtgtttcctgatcttggacctaaaaagagggagtcagccatggagacacagactcaaaagccagggccacagtacaaaggggcaagatgctgaccctaaggtaaagtgggtcatggtgcccagacctgccatgataggagggcagcccccacagggtctgtgtcctgctgtggggcctgtgtactgctgtggggcctgtaccctgctgtgggcctgtgtcctgctgtgggtctgtatcctgctgttgggcttgtgtcctgctgttgggcctgtgtcctgctgttgggcctgtgtcctactgtgggcctgtaccctactgtgggccataccctgctgtgggcccgtgtcctgctgtggggcccgtaccctgctgtgggccatacccttctgtgggcctgtaccctgctgtgggcctgtgtcctgctgtgggcctgtgtcctgctgtggggctgtgtcctgctgtgggcctgtatcctgctgttgggcctgtgtcctgctgttgggcttgtgtcctgctgtggggcctgtgtcctgctgtggggcctgtaccctgctgtgggccatacccttctgtgggcctgtaccctgctgtgggcctgtgtcctgctgtgggcctgtgtcctgctgtggggctgtgtcctgctgtgggcctgtatcctgctgttgggcctgtgtcctgctgttgggcctgtgtcctgctgtgggcctgtaccctactgtgggccataccctgctgtgggcctgtgtcctgctgtggggcctgtaccctgctgtgggccatacccttctgtgggcctgtaccctgctgtgggcctgtgtcctgctgtgggcctgtgtcctgctgttgggcttgtgtcctgctgttgggcttgtgtcctgctgtggggcctgtgtcctgctgtggggcctgtaccctgctgtggggcctgtaccctgctgcgggcctgtaccctgctgcgggcctgtatcctgctgtgggcctgtgtcctgttgtggggcctgtatcctgctgtgggcctgtatcctgctgtgggcctgtatcctgctgtgaccactcttctcactccttgttgctga

SEQ ID NO: 16200 - DNA, 622 bp, Artificial sequence
  DNA replication origin
gagctggggaccccgggcgggggcggagccgcgcggggggttgtgggagcgcggggggggcggggcgggggcagctcggcctgggctggaggtcagagcctctgggggctgcctccggtagggggtctccggggagaccccggggtaaggtcgccgcgaggggccgagccaggactccgcccacaggctggtggcgttcccgcctgtcggtgccaccattcgagctcgggcggagcgacggggtgaaggggtggcctgcccttccacacctgtgggatatctcatcaggtgggacgagagactgagaaaagaaataagacaaagtgtagagaaacaacagtgggcccaggagaccggcactcggcacactaaggacctgcaccggcaccggtctctgagttctcttagtttttattgattattattttcattatctcagcaagaggaatgcagtaggagagcagggtgataatagggagaaggtcagcaaaaaaaagcatgtgagcaaaagaatctgtgccataattaagtttaaggggaggtactatgcctggatgggcacgtaggccagatttgtttctctccacccaaacatctcagtggagtaaagaataacaaggca

SEQ ID NO: 16201 - DNA, 1514 bp, Artificial sequence
  DNA replication origin
ccgggctccgcgggacgcgcagggagtacccgggcctggggccgccgctgcctccccagcaagatgtcccagggcctggagaaaggggggtagcacgagggtcaccgagagccgccaacaatgcaaggcccagccacccgcgcgtcttctccacaccgctcaccgccatgcgccgcagtcgccaccggaactacgcggggcgcagagtccgacgccgaattccgtccttcaagaacgcgcctgcgactctaggttccgcggggcgcgggcggggcgcgggcggggcgcgggcggggcgcgggcggggcgcgggcggggcgcgggcggggcgcgggcggggcgcgggcggggcgcgggcggggcgcgggcggggcggggcgcgggcggggcgcgggcggggcggggagcgggcggggcggggcgcggctggggtgggatgaagctgggacggggcgaagctgggacgcgcctgggacgaagctgagatggggctggggcggggcctgggggttcggggaagaggctgaagaggggtctcggaagaacccttgtgagcgagtgatcgcgggcgctgactacgtgcccggcacctttccggataaaagttcaaagctctccacgagggtgtgtcttctcaaggctcaccttttggtggggagggaaaagcaagtaaacagcacgtgagcagctacggcgcaagagggtggtcggcaaagaccctgggaaatggggaagagcgagggtcagggcgcggtcgtttgagaggccggcgtctcgggacgtggaggctcgggtgaggtctgagagttgggagggcccccgtcatgggcttacttccgttctaacgcagtgggaagtcgctgcaagatgtaaatctgaagagtggcataatcgtagacgtatgttctgcagatctctctgctcttgtgtaacgagtggggcacatggggtggagggacgtggaggggtttcagaagcagacgcgggaagagccttggacaggatatggacgtgagggagggtggcggtatgggggagagggagagccccatcccaccacctctcttcccctggatgcttccctcccactataccttgctagagacctggggtcacacacaacactcgacccccgccgatggaggcatgacaaccgagaggaattgcgtaggggttgaggtgaggctgagtagggtttcaggggggcaacgggctatgccaggagggtgggttgtgttgcttgagaaggtaagagtccgagatgtctgatgattcctttcggggacacaggagtggaaagcggtgtttcctgagacggtggggtgggaagtgttagctgcctggtctgcaaggtctcgaagggttacagtttggtcatcactgatagttatttactgcagtgtgatacattactcccaaaattcggcggattggccgggcgcggtgactcacgcctgtaatcccaacactttgggaggccgatgcgggcggatcacgaggttaggagtttgaga

SEQ ID NO: 16202 - DNA, 1046 bp, Artificial sequence
  DNA replication origin
gaatgctgtcctgtgtccccgcttcctccagaagccacactcacccatcccacctggcttggtcctcatgtctatcccagaatccattaatggggccaggggactatgacacaccacttggcttagactgaggagctctgtgggcagccccacctgaagctctgggactaagcctgcgagagagatggattccccaagggaaatggggccattgcttgagtaaaaaggaaatagttgctgaagaggaaaaccacgtgcttactccacatagggcagactcctggaagaggggggcagggtagggaggtggatatgcaggttgccctggcagggtctggaaatgggggctgcaggcttggagggaggcctcagtgtggcttggaacgtggtgtatggtggtctgccgcgaaggccggcctgcacaggggtgggaggggggtgcttctgcatgggaagcacagacagcgctgcctctcccttgcactcagctcttggggcatgagaggctgactttccgtgagcctgtgggccaggcctctttgaatggggctgagggagctttgccctggttcctttgtgtccccacggtgccacgggaggctccctggcagggtgtggggcaaggcagtgagtgaagagttgggatgagtgagttagggcccacggattactcaagacaggacttcaagttgattcaggcgtgttagggagctgtgattggattttgagcagggcagggatgggacagaagagtttggggaaggttcctcaggcatccgtcacggaagggacaagaagggagagagagtggatgccagggacacccagaagctgttattgtagtcaggatacgacaggggtgaggctacagacaggggacttgcaagcagggagggcagggtgagacattcagaggaaacgacgacaggaaatggtgacagatagggaacgaggatgaagggaagggagagccagtgacgactggcagtggagtggggagcaccgccacctctcctcctccacttgcccctcctgtggcactggac

SEQ ID NO: 16203 - DNA, 1095 bp, Artificial sequence
  DNA replication origin
cccatccctgcaacaccgagaaggaggaattatagtagataaatatgaagcatggagatcctttaaaaatgtttttaataataaatgagaaaatgaaaaggagagggttgggaaggaaggagggaattcaaatgccagggaattgttcagtttcgcttttaaagatgttaacactcatttatacatctgcaagacactccccttaaagaaaagttctatgagtgtgggtctggttgcatgaataaggataaaattacttttttagacgatgtttcccacatacaattcagagacccctgaaattaggtatccctcttgtagatgtccttgagatgctgctggacctgggaaagaggaaactgggatatgggtctatgccaaaaggtgcttctagttataggacagagaggaaaggggcagagggagaaaaacccgaagtctgagaatctggattgcagaagactaccgaggtcgtgggagaagggagagaaaacaaggatgaaaaccgaaaggggaagaggcatgaaatgttgccaaatgtcaaaaggcatttggagagaagttgggaattgcattaagaaaaccactgcaaatctcatttcagaccatttagagatatgccccctgggaactgcgagctcaggctgtttagcatcaaacaaatggatccactccatccctaccctaattaaataaatcattcagtaattccactgggttaaagaaccaaaatattaaaaaccttcagggcctactcttgccaaatatgtcagggatcgtgtgtgtgtgtgtgtgtgtgtgtgtgtgtgtgtgtgtgtgtgtgtgtgttctgagacaccactactgttaaataggcagagctaagacttaggggactggcagattattgcaaaagggcacggggcagagggactatgttgtgagcctgcgaaagaagtttgtgtggggactgtgggcagtgaacgcgttgggaacaatatggaaaactgggagccgccttggaatctacagggccgggtaagagaatgtccgaaagaaaaatgagcaggtgcgggatgtggcagagtcggagaagagtccagggcgcccggagtg

SEQ ID NO: 16204 - DNA, 1254 bp, Artificial sequence
  DNA replication origin
ggccggtcctgctgcggctccggggccggagggaatccgcagccggccgggggcctccgccagcctggctgcgcgccgggactccgcctcgcgcccggccccctctccagcaggtcggcgccccgcgccctgcacccgcccgcccggggaccgcccgcccctcctctccgcgccgccgctcgctgactcccccggcagggattgcttctgcctcgctgccaggttttctcccgcccaccttctccgctgccagaccgcccgagctgccctcagtttctccccaagtgggactcactgtcggggtgtcccacaagcccgatcccagagcctgctggcccgaccccggcgacgcctccacccgcgctcgccgccctccggggcgcaccctccgccagaaaacagccggcgggcggcgagacttcgtgcagagtgcgggctcctctccggcgccaggcccgtcccgtctccctgggagtgcgcagcctacacgcaccagtttctctttagaacaaggacggggagggatttgcgagggggctgaaaccttttgccatcagcgaacagcctcagccaaaaacaaccctggaaaggcgagctaagaatggttatctcctgccagcgctgaaatcggaggccgggcgctgcgtgtgtgtgtgtgtgtgtgtgtgtgcgtgtgtgtgtgtgtgtgtgtgtgtgtgtgtaccctcccaccccgaccatttgttgaagggaatcaccactgtcagacttcaatccaacaggacccactcgagccatccacacttgccccagcctcctccaaaacagcacactttccggtatggacaattcttttttttttttttcacttatttgtttgttgtggtggtagcaacagcagcaacacagacgacacgtatttccctattcttctcgcccttctcaccctccctacccagctcctgccttagaaacaggcttggcctacactgtatctgtccacactgtctgaactcttccctgaattaatcgttttcagtaggagggggctgaatcccttattaatgccctaccaggagtgaatgaataaagccaagttaaaggagaactgggtaccagatactgtgctaggttcgtttgcatgtaccctttcattctgctggagctaaagattttctgcctcctctccataaaacgcacccaaactccaaaaccaggaaattctccatagaaaataggagtgaagagagaaaagactaacaggataaaactcaa

SEQ ID NO: 16205 - DNA, 1114 bp, Artificial sequence
  DNA replication origin
gcctctgccgagtgcgcgcgacggcgccgccggactcccccggaccgcgctcccgcgcacgcctgaccggagcaccccgcttcacgggggcgttctgcgcgtccttcctccccggtgcgatttccgttctttttcctctcgcggtccccaggagcccaggcacccctcgacgccgctgccggcggaaccgggaaccctccccggggctccctgcgggcccgaagccgccttcccgaggcggcggagttgggcagctccgggccccgcgccgccccgcgccgccccgcggagccggagtttctctccggagtctggacacagctctccgcttcgtcgccgcgcactggaccccggtagcgtggagcctgcccgggaagctgggctgcgccggcctggggcgaaggtccaaggggcgcgggggccgggacgcggggctgtggcgacgaccggccctctgcgaacgctcaggccggcgggtccggggccacaggctgggagtggagctggcggccactggggagtagagaggacgcccaggaacaggtgcaccagggtcccggcggctgggccgagggtcgcaagcagaggggaccggcggctgccagcaagtcccaagcagatgcctccggcggggcagccgcattttacagcgcccattccgcgtacatcgagtatccaaaacgagtaaaatcggtttatacgttggaatgtagcttatgattccaaaatctcatctccaggctgcctagatcacacggccccgtttcattcatttttactgaataacggtcgttggacaatttagagaagcagcagaaaccacgagaaaaacagtggagtcaaacggcggtaaggaccgacaaggctggcggggacattgagcaaacggcggcttctgagttggcacctgtccttcaccacgttgtgtgggaagtgtggggagtcgggattcccactcctccccagccttccggaaaaatgctcggaaatttccttccacattgacacctgattacagtctaaatagtaaccttattctgattgttaatgtaaccctctcgtaatctctacaaaaatactttagtttttctagctgtgttttcatgtaatcact

SEQ ID NO: 16206 - DNA, 1237 bp, Artificial sequence
  DNA replication origin
ccagctctttggctcccttccctgcgcagctctaggcttagctctcagccatttctcaagaagacgatcccgagggtcgaaggccgcccttgacccttgaccacggactctccgtgtaactcggaagagccgtgattttaaaacccggcctcggggttacagaagcccgagatctgggaggcgtccgggacctccctcccagaaccgcagggacccggcctgggatccagggtgtggcctctcgctctgcgcggtcgggaaggcggccgggtccggtcaccgcgccaagcactgcgcacccctgggacgcgtcgttgcggggggctggggggctggggcgcctccacgacgcctggtctgcccggccagtgcttggtgtcgttggtgggttcgtggctgcgacgggtaaacgtccgttccgcgagccgggcaaggcaacccctgcgggtcgcgcccgaaggccggacccctccaagccgcctgggagcttccaaacaggtggacccgaagctcctgtttgatcggagaataacgttcaatttactccgccgctgaactgatggtttaaatattcatctttggatatggtttcacattaggcaaaagttaggagcttggaggcggttccgggaaggggcctgaccctcagtcacccacgttcgtagccgggtgatctgccctcgggcaagagaaggaagatgattgggagggtgccaagaaagcctggagaaagtcccttctgggttcagcggctgtagccgctctcccaggacgtttgttggcaataaatgaaggaaggtcggcccggagacgttttcgcacaacggacagaggggagttggagcgtaaaccagcgagaagctggcatgacataggatccctctattctcagtttgtttccaaactcttagactgccccagccctgccggatttgctaaaagtggtctcttctggacgccggtggggctatggggctgacggctgcctgtgcaaagaagagggaagaattggaagctggggtctgggcagctaccaaagatggggcttgggaacttttcagaacgtcctcagaaccgcaggagccaagaggaaatctcccgtaggggatctcaggtagggcatgccaagaaattccaagagacgggatggagaagagaagccggagaaaaatcggccaattagactcctgtaaaaatgtgtctccatgtttgtcctccctcctgaaataagaaattc

SEQ ID NO: 16207 - DNA, 954 bp, Artificial sequence
  DNA replication origin
cgcggccgacaggtgcccgcccagcaccgcgcccttggtgggagcgcagccgttggcgcagtcctcctcctgatgccgctgctgttgctgcaaaattgtccgacaggcttgacggtcgctggagcagggggcagtagctccacgcggtcggggacaaactctgcgcagcccctgtacccgctcccctgaccccttgcatgatactctcaatgctgaaagagatgcatccgcctcccggtggcgacgccagacccttgccctcctcccaaggctgaggaccaagtgagggctgcagcacgggaagggtgccggggtcgccaggtccgcgccttctgctttcttcggtgccccggcataggcgggggccgagagcagtaggtagcgaggaggatgcgggtgcagcagagcgtaagggcgtctcccggggccggtgttggggtaggcccccgggactggctgcggcggggcaggggccccaagcagagggcctgggcgggggttgtgcagggcggcgtgtgcagcaggtagagggaaggggtggggcaggtgggctcccggggtcggttggtggcgctggaaacgcttcctacgccggagaaagctgccattgtcgaacatgtcctgggaggcggggtccaggctccagtagttgcccttgcctgggcggcccggctcgcgggggatcttgacgaagcagtcgttcagcgagaggttgtggcggatgctgttctgccaggcggggaacttgcggcggtagtaggggaagcggtcactaatgaaggcgcagatgccgctgagcgtgaggcgcttgtgcgggctttgcaggatggccatggtgatgagcgcgatgtacgaggaggggggctttgccggctgccgggcatcttcagaggccgccgcagaccttggcggtgccctgaactcggtgccaaactctgaggggtcgctcgggcc

SEQ ID NO: 16208 - DNA, 2144 bp, Artificial sequence
  DNA replication origin
agaagatccgctgcagggcaggggtcagggtgcatgggatggggatgcttggggacttctgatgtttccttaggattcttttttattattctgcttccttatcaggacttcccttagatgagactgcgtgcgttcagggtggtatggctgtagacaggacttcctttagaaaagtcatgtctttttctttttttggaggagaggtgttatgtaaacaagtcaaagattgtttctgtgtattggcccctcggttgtttatttcttcactgtcgactggtgctgatcccttggctcatacctaactcaaattttaccatgcccagtcattaacaaaaatagctcatataagcagattttcatccatttagtgcctgcctcctttgcagaccccataaaatctcgatggacagctgtttcctaatgataagatagagccttgcagatacagggccctaagctgctacagcccttggagctctctgacccagagactccctactgtgctgtggagcagcctcacccagatctataagcttctgccctaatcctcctctcccctgggagttcccctgctcctctggatggtcccctcctcactgcaggcctatggctgttctcatgctgggaggggcttccgctcttatgtaaccctgtccaagtgctgctcaatgaagcttgtatgtcactgctttttatggtcctatccttttcgttgatcagccctcaaatctctcaacccccccttcttattttaaaactgaggaaattaagacccataaaattggaaaaacttatctaaagtcactaagtgactaaccacagagaacgtggtggtgatgggagaggtggtgatggtggtggaggtggtggtggtgatgatggtgacaatgatgatggtggaagaagtgatggtggaggtgaaggaggtggtcatggtggagctaatggtggtggtggtggaggaggtggtgatggtggaggaggtggtggtggtggtggtgatggtggtggtggatgttgtggtgatggtgaaggagctgttggtagtgggggaggtggtggtggtggaggtggtggtgatggtggaggaggtggtgatggtggaggtggtggtgatggtgatggtggaggtggtggtgatggtggaggtggtggtgatggtggaggtggtggtggtggtggaggtggtggtgatggtgaagatgctggtggtggtggaggtggtggtggtgatggtggaggtggtggtggtggtggaggtggtggtgatggtgaagatgctggtggtggtggaggtggtggtgatggtggaggtggtggtgatggtggtggaggtggtggtggtgatggtggaggtggtggtgatggtggaggtggtggtggtgatggtgaagatgctggtggtggtggaggtggtggtgatggtggaggtggtggtggtgatggtggaggtggtggtgatggtgaaggaggtgggtggtggtgatggtgaagatgctggtggtggtggaggtggtggtgatggtggaggtggtggtggtgatggtggaggtggtggtgatggtgatggtgaaggaggtggtgatggtggaggaggtggtggtggtggaggaggtggtggtggtggaggtggtggtgacggtgaagatggtggtggtggtgaaggaagtggtggtgatggtggaggtggtggtgatggtggaggtggtggtgatggtggaggtggtggtgatagtggaggtggtggtgatggtgatggtgaaggaggtggtgatggtggaggtggtggtggtggtgatggtggaggtggtggtgatggtgaagatgctggtggtggtggaggtggtggtggtgatggtggaggtggtggtgatggtgatggtgaaggaggtggtgatggtggaggtggtggtggtgatggtggaggtggtggtgatggtggaggtggtggaggtggtgggaggtggtgatggtggagaaggtggtgatagtgggcatgggactaatgagaatggtggtggctggtggtagtagtagcagtaatgatggtactagtggctagattagggatatggaaggagaggagcagcaacaataactgctatttatattactattgttaaggtagtttgagggagacagca

SEQ ID NO: 16209 - DNA, 1292 bp, Artificial sequence
  DNA replication origin
gcggccctcagtgcgcctgcgcgccgctgcaactccaccaggcccgcggggcaccttcgtgcaccttcgtcgccgcgcctggcccgcgggcctcgccgcggcgagaactaagcagaagaacttcctccaccgcggttcgctccttctgccaacccgtatttaccacgtccatcctcgcacacacacccgcaaggggagaagaaatccagcccccgtgagacggtgcggtgctcccatctccggctggggcgggggttctggcaacgaggctggcctgctcgacgtcctcccccagcgcctctgtacctcctctccctccccgggtgagggggaccggagcgtgcagagctctgtttcctgcaggtgcctcgtcagcacggtcgccccggcggccagaaacctcccgcctccaagggcacctcccttgtgacctccgtgcattcgccctggctcggctgcaggacagagtcctcggcggaaaggggaggatgcgtgttcagaaggttgcaggtctctggggactccacagaagacccaacgcctgcctcgggggctcaggattgaactggcttcctagttcagtcccaaatactcgatttggagcaatccagtaggtccatgagaaattagtagggattgagaagctgtgacttcagtctttttcaaattgaaggtggcttgaacaaacagaagaggagcttgggaactgaagggacgactttataaaaaccaggtattactcaaaaaacaatgttagctctgcagtcaactgattttcttaagggagagagtcctcccctcacccccaagctctctagcaccgcacacatccagcagggcgttacacacgctcagtcttttttgtgagtgtgcaagtgaagagccatcaaacttcacaaggcgacatgcttgcctctggggagaagacgctgcttttccacagttcacagcgaagcacacctgcaaattcctgaacttgatggctcctgactgtttagggaataggcaaagggcagccggaagatatgtgaaggcaggaaagctcattttgaatctcagcgcctttgccagctcactgggtggcagtaagcaaactctttcctcctcctgggccttgctttttcgtctgtagagtagggcatttggatgcagtagatattttctaaaatcccccaccaccaccaccccgccccaaatgtctactcttctatgaaaaggagaattgtttgcatggtgataagggatgagatatcagaggcaggaagactcctgcattttaaaagtgctcgtcg

SEQ ID NO: 16210 - DNA, 942 bp, Artificial sequence
  DNA replication origin
gcccccgcgggctcccgctcgtgcgggtgaacccggcggcctcggggcggtcctgggggggggtccgagaggtggcgtcggccccgcggccgtcggagtttggcgcgctctgcagcggcggcgctcggccggtctggaggagggagaggcgcgccgggcacggagcagcgagaaagttcgggccgggccggccggcgggagggtgcgggcgcctggctaccccggcccggcgctctgtccctcggatgcctctgggcccttccctagcccggggcggaacgggggaccctctctgaagcggctctccgtggagttggatgttgcccttcgcgggagggagtggcggtcaagacccctttatcctcggccccagaggggcaggtggcctcgggtcgccctccgccaactccgaggtggcttcggccggggctggagggcggggaggcgggggaggggcgtgggcgctgcggcctctggggcggcccaacccggcgcgggcagcgtgggtttccgaggtcccgcggttccaggtcgagggaaggtgtaggggccctgaagcgggctggtccccgaatgttgcgttttctgtgccgctttgggcaacacgcagtggcgctcgcggcagccacggctccttgaccgttcatctccttcacccgggtcccgtggaactttcagaggcaactgttcttggtggctcttgcgggtcagcacgagccgtgctgcacgagcgtgacctagtgaaggccttgggcgagttggcgttaacaatttatggcgtccgccagcgctcgctttccgcacgtggcctctgcggagggtcagcccatcttattaaatagtggattctattagaccctgatacccgaggctaataaggaagcttaatcatccagatgtgtaatcgtgcagttcctttcctcaccgtcattgccccccacc

SEQ ID NO: 16211 - DNA, 834 bp, Artificial sequence
  DNA replication origin
acatggtctttgtacagattcttccactgtaattcttgattgtgatgtctgcaattgtctcagtgacctaggccatgggggttcgtgacagtggtgttgcagttttgctggggctgggggcactgggttggttgtcaggtcagaggaggggtgtgtgtgtgtgtgtgtgtgcgtgtgtgatgagctggcaagctgtgcagtgagctctgcagaagggcagggccaccactaggctgggtgctggcatgcatgccagggagctgcgtggggctctctctggaggaacagggttgcatcctcttggctgcatgtttggctgagggtaggtacatgagagctgggtagctgagtagctctttggcaagtagggggcatctctaggctggctgtcatgccaggggcaggcacatgcaggccaggctgctgtcacggcttcccgactatgcaggtcctcctgtttccctggggaatagggtttctcattggttcagatattggggttttggtcattcctccaggcctaggctctgagcagttggagtattggtgctgtaagtaccatgtgaatgtagtgggatgatggcagggcctcaggaatggaggggggttagtggctactggcccctaggacaggatgtactccagctgtgggtctggtttcaagatggtgttgtgccctaccagcttagatcatggaggttgggagtgccaagagtgttcctgttccggggcaaggtagtggtgtggactcctggcaagagtttctcctggatttaaggactgtgaggactgggagaccctcctatagcaatgatttctggtgtttgtggcagt

SEQ ID NO: 16212 - DNA, 992 bp, Artificial sequence
  DNA replication origin
cccagacgatgggcggccaggcagagacgctcctcacttcctagacggggtggcggctgggcagaggctgcaatctcagcactttgggaggccaaggcaggcggctgggaggtggaggttgtagcgagccgagatcacgccactgcactccagcctgggcaacactgagcactgagtgagcgagactccgtctgcactcccggcacctcgggaggccgaggctggcagaccactcgcggtcaggagctggagaccagccccgccaacacggcgaaaccccgtctccaccgaaaaataggaaaaccagtcaggtgtggcggcgcgcgcctgcagtcccaggcacgcggcaggctgaggcaggagaatcaggcagggaggctgcagtgagccgagatggcggcagcacagtccagcctcggcatcagagggagacggtgcaaaggggagacgaggaccgtgcaatggggagggggagggggagggggagggagattgagatttactttcttaaaatatctctgctcttgtgtggtggtgtttgaagggaactgggtgagagattgatgggaaggtcgtgctgttgtccaggtgaaagggagagctgcttaggctggggtggtggcagtagagatggaaagaaaggctgggacgggaagtctatactgggggtacgttgaagtgtagttttggtgggtgttgtcaatggtattcccttctgagagtggctgctacagcgcagccagcactaggtggttggggttttcctagttaggtgaggttatgtacatcagcgtggtcaggtgaataacggcctcccaaaagatgcctgtgccctaatccctgcaacctgtgaagttggtaccttacatggcagaagggactttgcaaatgtgattgagtcaagagtcttgagatgagtgagatgatcctggattttccggatgggcacaatctaatggcatgaatccttaaaagtggagagctccctgggt

SEQ ID NO: 16213 - DNA, 1102 bp, Artificial sequence
  DNA replication origin
ggatctggggcacttcctcctcgggacaagccccttttccagaaaacctcaccagcctcccgcctcctcctttgctgtccctgaacaaagcccagccgcggggaaagcaagcggatttgcgcgcttctgggaaagcgttcggattcaggggcccgggagtaatgaagggaaacggcccgcgcggccgacaccccaggaacagggggcgcgaactttgcctggaggccaggccgaggcgccctgcggaggcgcgggaactgggaggaggggaggctgaggggcgccacaccaggacgaaagtaggcccgggccctctcctcactttcccaggagcctcctgggcggggcaacttccggagtgctcggggccccgccccccagacacgccccgctttcccctcccagcccggcctcgcgggccgcggctttcaactgtggaaaagttccgtttgctggttttttggaccggggccggggtggggactggaggggcgccgagggggaggaacttaaacaggtggtggagtggaggcgacccgctcccgagggcaggcgggtgggggaggggtaagggggcgactgttgaaggtgagaatcgcgagcggttggcagtggcccagcttcaaaggcgcagggcctagaaaaggctgtggatctaaggcctcgtccgcgtgtgcgcggagggcgaagggagagccagggccctacgccagtttcccggacaaaattccagagtcagcggcgcgcgggcaggctgccacgaccctaacccgcccggcggacggggcccagcagggaaagccaatgaatatcccctacccctccacaggctgcccgtagggtttctctgtaaagcgcgacgacgcgttctcaaaagcgccattaatgcgactcgatgcaaagcgtcaaaatgcggtgcgatacacgtatacgtgggaaaccggttcagcattaaagttcaagtggagcggagggggctgcatatttttatttctatttatttgttgagacggaatctcattctgtcgcccaggctggagtgcagtggcgcgatctcgactcgctgcttccctccgcttcccgggttcagacgattcttgtg

SEQ ID NO: 16214 - DNA, 2199 bp, Artificial sequence
  DNA replication origin
tgcactatatcaaatgagtatttagatctcagcccccgatgtgcaccggagtgaaacgggcccccgggaccaaatgccagactgtttgagtggcaacgagatagggtggctaggtgaccgacgggggaaaaggggtcgccttggtagtgaaagtgcccccacaaacctggtgcagagctcttctgctttccttttaaaaatttattcatactcaagttctttatacttcctcgtttcactgtttgaagaaaatcggaagaaatttggttttgaaaaaagtcgttggtccccacgtttccaagagatccggaggtttcagcgcaatagttttcagttaaggtgtcatttgaggccctctatatcgcagcacgttaaatgactcgcgtccagctccccatttcctagcctcgggcctacagggctgggggcgacctctgcctcccgtccccagagcttacaaaattccttccagttgtattttagggcttgttttcctagagaaggttgagactagaggaaggattaaagtggtgggggaaggggcaagaccgaggggtccctaccccacgcggctttggaggatggcctcccagggttagcactcgaatgctagagcttcttgtccacactctaccaggtcagtgtcccgcgatccccacctcccggacgcgtatgaaacgggaacagctaagggcttcaagggaaacacacaactggggttcggttttcaaccctcctctccgcaaatcagccttctgggcagagggttggctgctagaacgcctggaggtgcttcccttgaattcatggcaaacaccagaggaaagttttcaggttgcttgcttacttccagggcagtacagagaaaagcggcctccccgaggggacaagggcctctgtgcccatgaggggtcggacattgcagcggacttgcctacgctctcatctagcatttgattccccaccaggagatgggcttggtgcacgctctcagaagcgcatccaccgaaggctctggaactgccccgcttcgcatagagctattgtgctgccctgcagtgtatccacttgttttgtttgtttgtttgttttttggtttttgcttgtttgctgatgggcagtggggaggtgcgagggtggagggccttctttgtgcatatatagcgatagtctgcactaggccaagcccgctactcctgggagaatgggaacacgcaaataatctaaacaaagttttctgctgtcatcttgtgaaggaccctctcccccaagacatctatgactggggtctatgggttaaggaggtgaaaaagtggccccatcccatatccataactgaatcacagaatccgtggggatttgaactgagtggctggcgcaagacctccgtttgcttccagtagctgctgggagcgagggaagaggatatcggtaactttgggggcgccaatgtggcttctgtgtctgccccttgaaagtttatacccggcgcttaacaaatcctttacaggagcacgtacgtccctgacctttcaggatactgttttatattaaaacatggacaggagggtagaaaagtaaaattcgcctgcaaaatggcttgtcatccttgggccggcagatctccaaaaccattttcttctaaagcaacaaaagagaaaaaaatacgttctaaaaggaaattacgaaaagagcctaactttcctaaaccaacatcacttcactcccctatcctaaactccacccaggtccggggtgcaaccgcaacactcccgtaggttcgagttctcccggagctgagcttctgcggccaaatgtcgggataaaagcggccttgggctcggaaaaacgcggccagatctggactggagggaggagaagagagagaagcggagcggccacctcactcgcttacaggcacccccaccctcactcccgctggtcctccccttctccgccccgcgagcaccgccgcgttctggagcgccgcagtctccagccgcgggctggggtagcggagagggcttggaggagggggccgcgagcgcccccgcgagagtggcctggctgcaggtggcaaggaaggtgaagtgcaggcacccgaggggcgcaaaggaggaggaaggcgtggggcggggagtgcaaggagacagggaccccaggggcgggggtggcggtgggaaggaggaggggttgggg

SEQ ID NO: 16215 - DNA, 1698 bp, Artificial sequence
  DNA replication origin
cagccaggctgccaactcattcgggagcccggggcatgaacggctacggctccccctacctgtacatgggcggcccggtgtcgcagccgccacgggcgcccctgcagcgcacgcccaagtgcgcgcgctgccgcaaccatggcgtcctgtcctggctcaagggccacaagcgttactgccgcttcaaggactgcacctgcgagaagtgcatcctcatcatcgagcggcagcgggtcatggctgcgcaggtggcgctgcgccggcagcaggccaacgagagcttggagagcctcatccccgactcgctgcgcgctctgccagggcccccgccgccgggggacgccgtcgccgccccgcagccgccgccagcctctcagccgtcgcagccgcagccgccgcgccctgctgccgagttggccgcggccgccgcgctgcgttggactgccgagccgcagcccggggctctgcaggcgcagctcgccaagccaggtaagagcgtctgaggtgcgggagtttggccgggcgcgggggcaacttcggagtgccagctgcagctccacttgggaggactggaggcaaagttttgggacgtgggcctgtcggggctttccttcctactctccgccaggccggggcttcctctcccgggagaagccggctgagtctggacccagcgcgagtggcactcgcgcccgcagggaaggcgcctccgggcagccaaacgacgggactgtgcgtcagtatcgccaggtgccttcccaggttgaagggttcggaacgtgtcagattgagcagggagacaacggagttgagacaggacaaaattaaaacccacgtgcgcacactcactacggtggggtcggattttcctggctgcaggctttagaggtccttgccatttgggggttggaatgggtaggtaggtgtagggaaggagccaaggccaacactcggctgagtcgagctggctgtgcttctcggccggcccggccctgcccagggcccaggaaaatttgagtgaggacaagtatccaactctcagaaccctggcctttctagctttgctccgtggcctccagactcttgtaactggtgaaataagttccatttagcaatgatagtaaaagggtccggaaaggcttgtgagctgatagcgggaaaagaatctgatgcgcccagaattcactcctttgcagaacctcctagatcctttaacactgttccccaggctgccctcagctgtcttcgtggtttaaaggaatacaaaaaatctgatcccccaccacccatccgtttccatccaggcctcctgagcttggcaggcctgagttgagtctcttagtctctctcttcctggggaatttctagcttgcggttctgcccagctcaagagctcttttgatggctcttggaattcagtggatatgtgtttggtgtttctccttaactggggcaaatgtgcaaaggaacacagcccaccttctcccggaagggggcatgctggaattaggagtgggaaggtccagagccctcctgtaagtagaactgtggcaaaactggtacctacactgacctgccaactccctaaagacggtacccctagcttcggagaaaggctttcaggagcccaggactgctttgtctggatcctgtggagctgaggaagtgaggcggactcacctgtttcatggtgagtca

SEQ ID NO: 16216 - DNA, 1352 bp, Artificial sequence
  DNA replication origin
tagaaactctcccccttctaaatgtattgaattttcccattccgtgtgaaaaataattacaaacgaattaatatcagcaccccttaatcctagggcaaggagctggaacctcagctggtgagctggatcccctgctttccgcagcatagtcactctagactctaatcactctagatatacgcagacctatggccagaagtgaggggacatcccggagggaagtgaaaaagtgaaatccctttcaggggggcacccgacctcaagagatggttgcagccaggctgggtcctgggagcccacctgtcggatagaaggtgcccaaggcctgctgtgaagcagtgaggccgggcggatttctccctgtggcagggcaggcagggtggggtgataggggaatgaagagatgagggtctcctgggtccggctgcaaactccaaatttgcgctttgcggacacccaccctcgcctctgcagtcacctatcccaccagctggtgggattctgggccctcccacgcccgcgtcctacccagcatatgctacagagaacgcgtgggaacgcagggcaggcgatgacccatgcgggacgcgggaggagaccaagcccaggaccaggtgcccatggcgtccagcgcgctctcctgggccctcgagaggctttccagtggggttactgccttcagtgtgtctggcgatccactccccagctcctctccgccaaaaagtaaaattgaaagtcttccctggtcctgagtctgggaggaggccctgtgaagcctcgctcgctgaactctccctgtccaggcgcacatggaaacaaatacaaaatcgaaggttcaagagcgtctctcggaaagaaagccctggctctcctcgcagctggagtcctccgatgggaagcagcagagaccctccccttgctcttaggtagtttgcagggacagtagcttcggattgatgaccttgggctgcaggcatctaatttctcatgcattttgtgtctcatccataaaatgagtgttctagatatctcaaacgtccaggtgacagctgaagcaccgagcgcatgcgtgctgcgtggttctttttctccatcatcaccagtacagcagtgacgagcctggagctgcacgccgtgctgtggatcaaccactctccccccaagcccccgccctcaacaccacgaaaatgcactttaaaatgcaaaaaaataaaaacattgattttctcgcgatgttccaaatgggcctaaacactttcaaggcctctctgcctgctttttaagacaaaaacatttcccaagttccccagagatgcctgctttttccctcccgaccctgctcgccagtgcaa

SEQ ID NO: 16217 - DNA, 1590 bp, Artificial sequence
  DNA replication origin
gctggggtttgtctcacagtggaggcaaggaattgcaacttttttctattattgtacatcttgaaagcgaggttaattaagtcctgttgtggggtttgagagccggaatttaatttttggagctttatttaaagtcgagagcggattgggtaataaaatgtatattgagaataagacggccttttgaccttttagggtctagggctgtaaagcgtctcagggttgctgccaaacaagtcatgaactgggctggatttttatatttgatgaaaaagagcctaaatgctaactgatttgggagaggtcggataaagaaaaaggagctttaaccttgactatgcctttagctccagccatgtttttaagaggaaattgctgggcaggtgggggagggccagtcaaggaacgaaactgtaacccagaccgggtgtgaggaggggaggtgatgaacggattacagggtggaggagcggaggctgaggaagaattgggacctagctcggcctggcgaggagcagcctggggaggaggggagaggtcagatgggtctgtagaaaaggaagattagaaagactcagcgacgcctggggttgggactgaggggacaggtgagagggaagggaggaggatttgggacgagtcgcactgggaacagagactagggaggggacaatgtgtaaaagaatgtctggacgtcaggcacctcagactgtttgcctattttaggacaagaattatttagatcttgtaggatggaaaaattgaaagtgccattttctggctatttggaaccactgtcgagtttgtcaagcggcattgcagaagaaaataaggcgtttgggtttaggtcaggtgtgagttgaagaggttttaagttcttgagaacacaggctaagggagaaggaggaatggagggtggaagcctgcccatagtgaaggaggcaagcccagagaaaagagagagtagagacgcggagagaaggggtggggagtgcttgccccgcaggaaagtggagaaggggtagagacacagagagaaggggtcggggggttcttgccctccagaaaagcagaaaaggggtagagacaggagagaaggggttgggggtttcttgccctccagaaaagtggaaaaggggtagagacggagagaaggggtcgaggggttcttgccccgcagaaaagcggtagttggcactaagggtgaagggacaaggcaggtgtccccatgtggtcagacacccctgaagcgcgggtgaataatcaggcaggcatcccagcgtaattaaacaccaaggaagactgtcttcccaagtctgtgaccagcgccggagttttgggttcagggataaaacacatctcctttgtctctaccagaaaaggaaaggaactgaaattaagagaagggtgagattgaagtgtggcgccaagattgaaaggagaaagaggttgagggatagtaagagaggttggagaagagagtaaaagcccgcttacccgatttaaaattgctgagatgttccttgggctggtcggtctgaggacccgaggtcgtaggtggatctttctcatggagcaaaaagcaggagg

SEQ ID NO: 16218 - DNA, 1167 bp, Artificial sequence
  DNA replication origin
tggggtttgtctcacagtggaggcaagtaattgcaactcagaaatatgttgccgcttggctgcctcttctctgttattgtacaccttgaaggcgaggttaattaagtcctgttgtggggtatgagggctggaatctaatttttggaggtttttctaatgttgggagcagattgggtaataaaatgcatattgagaataagatgaccttctggaccctatgggtctagggtggtaaagcatctaagggttgttgccaaatggaccatggactgggctgggtttttatatttgattaaaaagagcctaaaaaccaactgatttgggagaggtcggctaaaaaaaaaaaaaaaaaaaaaaaggagcattaaccttgactatgccttcagctccagccacctaagaagaaattgttgggcaggtgggggagggctagtcacagaatgaaactgtaagccggaccaggtgtgaggtggggaggtgatagaaggattatagggtgggggagctgaggctgaggaagaattgggacctggcttggcctggtgaggagcagcctggggaggaggagagaggttagatgggtccatagaaaaggaggattcaaaggactcagagcttggggtgaagactgaaggaacagacaggagagaaagaagaaagatttgggatgagtggcattgggagcagagactagggagggacaaatgtgtaaagaatgcctggacatcaggcacctcagaccatttgcacatttttcgacaaaaattatctagatcttgtaggatggagaaatcaaaagtgccattttctggccatttagaaccattgccaagtttgtattggggccaagcggtgttgcagaagaaaataagactcttaggttttaggtcagatgaaagttgaagaggttttaagtgttttagaacacaggctaagggagaagaaggaggaatggagagtggaaggttgcccatagtaaaaaggcaagtttagaaaaaagagagggtagagacacggagagaggggaggtggtagttgccaccagggggaggtggtacctgacaccaagggcaggtggcacttgccaccaaggtgaaggatcaaggcaggcatccccgccgtgatcagacacctctagaatgtggtgaataatcaggcaggtgttcc

SEQ ID NO: 16219 - DNA, 1660 bp, Artificial sequence
  DNA replication origin
tcctccccacccacccagccacctccccgggctgcagcagcagtgcaagccgagcctgcgggcagaaaataatgcaggcgctgcagaggaggggaggcaaggggagaggagggaagggagagggggtggggagccgagagcagaagagagcacagaacggagaggagccggtagcggagcacccgcaccggcggcggccggagagcggggtgagcagcggggagggggccggagggggcgtggtcaacgggaggcgcggcgggcgggcgggagcgcggcggcttcggccctcctttccctcgacgcgctcctcttgcacgcgccgggcagccgggtgcccgcgcggggagcgtgcgagtgtgagcgtgcgtgagtgaccgcggtcgtggtcgtggctgccgccgccgccacccggaccgctctaggggcccggctgctccgcgcgttcgcctggggctcacgggggcccggggcgaccgctggttggctcgcgcgccgccctcgcctccaatcccgggtgcctgtcctaatttcctgatccagggaacctgccgccgcagcggctgtgcgctccctacagtcattactgtaccctcccggcagcctccggcagaacacgcagcagcagcagcagttagcgctgatgcaactatcgttgctgttgccaccgcctccccactgacggggcgtgcacctggggggtacttgcagtttccaggggcaacaagcatctctctaccaccctctcctgcgcccctgagagaggctggtaggtagcatcttcttcgggcctcctctatccactcagaaagtgatgaagcggaggggctccaaacgtttgggctgctcaaaagtggggtttgggatgccggtctcaatcgcacgctgagatgccgttttgccgaaaactaaatgtgtctttaagtgagagagtgtgtatgtttgaaagagagtgcgcgcggttgtggctggtcctctgtaatagaacaagactgaaataacccagcctgggatgaggagaagggaaattgctagcgcagctttgcatttgctcatcaacgattatagttaattgctaattgcacaaaatgatagtttgagggcctgtaattaaaagcttaaccttttcttgtttggaagagaggggccccatacgtttattcctcttgatatactttgtaacattcaattacaagaatcgaggaaagaataaaggaagcaaagacaagactcctagaaagggttggttcttcttttgtgcctgacagtacctgagtctataatttgctttttgtgtacttcagttttcttgcacacttagccctggttgaggtgcattgtctgctgtggtctgttgagcatctaaccagagtgggagggcacatcgagcgatttcactttcttaaataaaaggtttttggtattttgaaaaagttgtttttatcttaattcaaacttggaaggtttcaataatatcatattctgactctattctgttggtgatctgaagagcagcgggcactgcctcactgtcttctccttgccctggttctcctggaaatttgtcaaggctagcaatcagaggagatgtttattaggaacttactatatccaggagacacacaggagaggaaaattccagtcaggataggtttctgtg

SEQ ID NO: 16220 - DNA, 865 bp, Artificial sequence
  DNA replication origin
cagaaccattgttcaatgctcagaagcccacgcacctcggcgcccgtcaagagggcgagaaacgaggcgaagcagcggctctgggggaggcggagtgaggggcagaagactagttcaggcgaggcgtcggggcaccccgaaccccgctgttccccaagcccggctccctttagcctcggcgctgacagctcagaggcgccaccacggaggggagggagggaaggcgaggagaaccgagaggcgcctcctaggaggcgggtgggcaaacggagacctacgcctcggggtctcccggtgccccggctgggtcccgcccgccggcggaggggcgcgtcctcactcaccggttccggtggcgccgctctcccggggcgcccagcacagcgcgagcagcagccagagcgcccagagcgcggacgtgcccatggtgcccgcctggatggtgccgccgccgccgccgccgccgccgttcgctccgcacgacaagttaccagtccttccgaaaggaggaagaaggtgggggcggggaggggaaagggggagaaggaggggaaggagttggcgggggaagggagcggggaagaagagggcaccccctcccctacaacttgcacagtctcctccccacccacccagccacctccccgggctgcagcagcagtgcaagccgagcctgcgggcagaaaataatgcaggcgctgcagaggaggggaggcaaggggagaggagggaagggagagggggtggggagccgagagcagaagagagcacagaacggagaggagccggtagcggagcacccgcaccggcggcggccggagagcggggtgagcagcggggagggggccggagggggcgtggtcaa

SEQ ID NO: 16221 - DNA, 1465 bp, Artificial sequence
  DNA replication origin
aagggagccgggcttggggaacagcggggttcggggtgccccgacgcctcgcctgaactagtcttctgcccctcactccgcctcccccagagccgctgcttcgcctcgtttctcgccctcttgacgggcgccgaggtgcgtgggcttctgagcattgaacaatggttctgcctcctctgccaggcgcagtgttgggaaggaggcagagggccaagacgtgtgcggcagcctcgggcgcaccctcgaaccccggggagtgcgggagcggacggggggagaaggtgagcgcctccggggacgcggagcgccaggggccggccgggcttcagagtcttccggcggccgcgagctggcgcacgttcggtgggcggcggccgggaggctccgcggagccgagggcacccggactgcgactcccccggcgcggggccgcctctccggcgtgcggggtaggggagcggcggggctttacgcaggactctgctctgggcgcttctcctctcccttttccccgcctcgggcggcgtttggaaaccgctcgggtctcccgtgtagctgaacgcggagggggagtggaggggagacttaatcaggttagtttgctgaccctccttcccggtgacgtttcctcgagaggaattgagtcctaggctagtgactgtaattagccttcattctacacaatagctcaaaggagcagcgcgagagcgagcgtgtggccctgtcttgttgggaagggcggcggtgactactgtcgggtccccagactctgccgcgggggcctgggggccccgcctggtcgtcagccacgttcccacttggggcctcgtaactttcctggacaggcgacaggaagcctttctgagaggactcagtcggaatcctagcgcgtccccgaagtgatcttcagatgtgacgccgaggggcttgcttgccagctgcagggaattgggactgaaagccgcccaggcccttaacacccgttccagagtccctggctcccgtcgccgggtggcttcaggggccctgccggcctgcagtcacgtgctcctgaagtgagagcgaactttaaagcatgtggtcaaggagcctgtcgggcagcgcctggggtttttacgtctccgaatgcccctgccctttggttgccactgtccggagcgtgtgaactgggactggcctttccgccctctgcgattggttagcggtgcgatcacgtttaggttggtcacatggttccgcggactcttaagtgggcagcatgggcagtgttattttcaatggaaagtaggagactccacaggctcttacgggctgttctctcaaatgccttcccctgcctggactctttgaagaggacgaatgtgtagtgaacatggaatctgatgtgtaacaagcctgagagcctagaaaagctctgcttacaagagtttccaaacgctagcattaatcattaatagatgagtaa

SEQ ID NO: 16222 - DNA, 1052 bp, Artificial sequence
  DNA replication origin
gggcgtgcggctcaagtacacgccacgctgctgccgcatctgcttcgaggagcggcgcgacgagctgagcgaacggctcaagatccagcacgagctgcgcgcgcaggcgcaggtcgaggaggcggaggaactcttccgcgacatgcgcttctacggcccgcagcggcgccgcctctggaacctcatggagaagccattctcctcggtggccgccaaggccatcggggtggcctccagcaccttcgtgctcgtctccgtggtggcgctggcgctcaacaccgtggaggagatgcagcagcactcggggcagggcgagggcggcccagacctgcggcccatcctggagcacgtggagatgctgtgcatgggcttcttcacgctcgagtacctgctgcgcctagcctccacgcccgacctgaggcgcttcgcgcgcagcgccctcaacctggtggacctggtggccatcctgccgctctaccttcagctgctgctcgagtgcttcacgggcgagggccaccaacgcggccagacggtgggcagcgtgggtaaggtgggtcaggtgttgcgcgtcatgcgcctcatgcgcatcttccgcatcctcaagctggcgcgccactccaccggactgcgtgccttcggcttcacgctgcgccagtgctaccagcaggtgggctgcctgctgctcttcatcgccatgggcatcttcactttctctgcggctgtctactctgtggagcacgatgtgcccagcaccaacttcactaccatcccccactcctggtggtgggccgcggtgagtacctttgccctgggctttcccatcctcttccccagcccagtgagctgctcctccctcccctggttatcagccaccaggctttggcttctgatcctcgtcttcccccccacccccaatcgccgcatacagctaacaaaacggcgatggatgtcaaaagtggtggaaagagaactcagcagatcagtaagtaagtgaatttgacttagtcgtagaaatctccaaatctagatttcgtcttcaaacctttaaaaga

SEQ ID NO: 16223 - DNA, 977 bp, Artificial sequence
  DNA replication origin
cagccacactcggctcgcacacacgaacacacacacgcacggacacacgcgttcacacgcagccacacgctcccacacacatgtagagaccgaagaatattcaccttggctgtggattattgtggtgttgttggtgggtgatggagatggtggtggtggggaggaggaggaggaagaggaggaggaggaggagaggagtagttgttgttgatgggtaacagtcgccaggactacggtgactatggcgcttgattcacaaggcaacggttgctataactcacaaaagagagagagagagggagagagagagagagcgagagggagagggagacactcgcacggggaggggtgggggagggaagaggggaggaggcgggcccggccaagccgccggaaggggagggcgcagcgctgtgactgacggcccccaaacccgggtggggtggcggggcggcggggtgacggggcacgaggccgggattccaccgcaggactccgaagaggtgcgcctatgcttggctggggctgaggtcaccaagagtcctctcggagggacgttactacacgcgctggcgaggcccaggagtcgtggtgcgaggggtactatctgtgaaacgagggctgcctgtcccagcagccagctttgtacagagacgtcccggagccacgagagagtaacggctaacccgggggagggggtggcgagggtgattccaggcactttgtgaagaaacgagctatggcgagggaagaatccactttgaagagcggcccccgccctgcccgatacgttacttccggggcggggcgggcagaggggcccggatgtgccgccgctttttagtttctgaggcgccggcggtgttcctggtagcgtcagcctcctggcttttccttttcctggacgcttcagggctccgcggcctgcgctagactggagggtccgcgtcactctcgccctcctgctttccgcgctc

SEQ ID NO: 16224 - DNA, 988 bp, Artificial sequence
  DNA replication origin
ggcccgagctccgggtggtgaaggtgcgcatgggcatggtaagggggtggggggcctgggggcggcggcagaggagggagcggaggcgcggggggtaggtctacggtgctgcccgggaactcctccaggcgttcggtcttgaacaggccggccgactggctgtcggggcccggcaggccatgctgcaccaccatgtggttgaccaggcctggctgcaggccgccgtgctccagctgttgcatgcgctcgtgctccagggccccgtcctcgccgtaggccggcagcgccaggcctccaggggccaccagcacgcccttctggctgccgggcaccgggcgcggctggggaatgcagctgccgcgcacgcccaggaaatgcccgtagacctccggctgcggggacaggttggccggcgaagccctcgacccgttgatgtaggccaccaaggacgtgggcgacgtgcggatgatggtattgaaatctatcccgatgccatcggacagcggggacaaggacagcgctctcttcttggagcgggccgagtgggacctggtggatgagtgccgaggactagggtaaggagagtggctactttccgtgccaaaaaggtaggatggtaatgagttagagacactattgctggacatggatgtcccgggaggaaggctaaggagatcccctagatcaaggccattctgagagccgtggttggagagcgaagggagggccctgtagccctgggaccactcctgcttcatgcttgaggccgactgactttccgtcagactcaaggtcgtggacgccaaagactcacgcgaaataagggacctggaacagcagccagaaaggaagaaaaaaaaaagataaacattttagcaggatacggattgcttaagagctaaaagaacactgcattgacaatcccttaagtatttcccctaattacattctgtgctaaacacacattcttgggctaagataaaatcca

SEQ ID NO: 16225 - DNA, 1028 bp, Artificial sequence
  DNA replication origin
acagaaattagccggtggtgacacatgcctgtggtcccagctacttgggaggctgaggctggaaaatcacctgaacctaggaggtggaggttgcagtgagcccagatagtgccagtgcactgggcaacagagtaagactgaaagaaaagaaaaaaatgagaatagaggagaagagaagaaaatggaggggaggggaggggaggagagggaaggagagggcacgggagggaaggagagggcacgggaggggaggtgaggggagggaagggaaggggaggggagggaaggggaggggagggaaggggacgggaggggagggaaggggaggggagggaaggggacgggaggggagggaaggggacgggagggaaggggaggggagggaagggaagggaagggaagagaaggggacggaaggggaggggaggggaggggagggaagagaagaaagaaaatgctataggtgactaatgaaagttccatttctgcttcatgtcctgtagcatttgaagtggggaagggtactaatggaatagattcttttaaagatgtaatgttataagactgaaacccccttttataattggaacaaatcacgcctccgattgagtaatacttggaaatgcatcatcaatttgatttatacaaagcatcaataaatcatacaaactggaccctgtgtagctcagagagtaaacaaaagtaaacattgtgtttcacctgacttgttggcaagacaaaatgaaaactctggctacctcaactggaataatgtctttggtctctggctgtttggttatttttggaaacttttatggaatattaacttcatttgctctaattctgcaggaagccacattggaagtgcaagaaaatataaatgattaaaaagcagaagtgaaaaaaaaataaccacggattttgccccaaccttctttaggtaatatattaactgcatctcttcaaaattgcgggaccccaatctccactattatcccagttctaacatggctgcattcaacacggta

SEQ ID NO: 16226 - DNA, 1442 bp, Artificial sequence
  DNA replication origin
gccgagggtccagccaccccgcctctgcctcctcctccccctgccgccgctgccctcgcagacgcgcgcgcacacacggcacttgggccgggtttccgcgctccgtccccccgtttggatgggggttttcatttccgaaggaggcacagcccgcggagcgctctgaagggctggagccccaagttactcctcgccagcgccggccgcccgctgtcactcgcgctggccggccgggggaagggacccgcacgccgggctttgttgtggaaatcccggttacctggtaagtggatgccataggaactttgctcgcaggcgagagacgaggagaaaccgggcgcttgagagtgtgggggagttaaagctcagagacgcaaactagggattacaaatagttttctacgctgagccggtggcgttcgcgcgggtttaaggatacgcgcacctcaactcccggcgtcacaggtcactgagagacctgcgctgactgagactgatagcaacaattagggttcaaaccatgtttctgtcagtggcctaagagcgcccagtgtagaagacagataacggggctttaaagttgcgctaattcggaacagtttttgtgttttcatttcaagtagagcgggcagaggggtacacaatcagggcacgttacaggacgcacgggcatggggcgcaccactctggagtccccactgaagggaaactttggcgaagtgggaactgatggggtgacgtgaggtctctcgcgcacacgcggggctgtagttgtcttttcaagttccacgtgtttgtggagtttcacgaaggctgttttccacgcctgtgtctcatccaagccggtgtccccatgattgcgggaggtggtcgggctgagggtacctacactcctcgcgggtaccggcccggcgatccgcagccgccaggtctggaactataacctcccacgccgccaggacgcagacacagccagacacgaaccctccccgccgggttcgtcacctcgcgtttacattttttatggggcccgacaaaatgtcagcactgtttggaaaatgtctcagtctcggagacgttgtcctgcgcgcggctccagtccctataaatgaccctgtgtgtattttgaagtcggcccgggtcgctctctggaaagcgtgagtgagccgccggctctctcctagacacacaccttgccccgagcgacagttccaagttactcactggagctgacaagtcacctcggggaccgggaagtcactcaagtgtctggaaatcttggccctggctgatttgtcatcctatggatgattcaattaggtacctggcgggagaaactttggggaagggtttctggctccgcgttcgcgccctccgacttgctggaggtgtttgggaggcgagaagcgaaaggaaaccacagggtgaggacactggctcgg

SEQ ID NO: 16227 - DNA, 1554 bp, Artificial sequence
  DNA replication origin
acttggggctccagcccttcagagcgctccgcgggctgtgcctccttcggaaatgaaaacccccatccaaacggggggacggagcgcggaaacccggcccaagtgccgtgtgtgcgcgcgcgtctgcgagggcagcggcggcagggggaggaggaggcagaggcggggtggctggaccctcggcatcagctcattctcccctgctacacacatacacacacaaataatgtttctaaaaagttcagttgcgactttgtgcctcgcctgtcctgttcatcctcgtcctgggccggggaatgcttctgggggccgaccccgggatgctggctaattgctgccggcgggttccgtcgccggtgtgaccctggacggcgcggacggcgtacagggggtcccgggaggggcagtggccgcggcactcgccgccggtgcccgtgcgcgccgcgctctgggctgcccgggcggcgcagtgtggacgcggctgcagggagaggggaagggggaagagggagggaggaaggcagccgggcgaggagtgtggatgtgtgtgcggccgcgagggccggcctgtagccagctgcttcctgagtgtgagcgccggagggggagggggaagagtgggggcgggctcgcgggtcactaggctggccaattcgaaggccgagcttgtgtctccctcttgacgcattcacacacacacacacacacacacacacacacacacacactccccgtgcgccagaagtcgaggaactccagaacagggtaacagcagggagacacttcgccttcttcctggccttatttgttaaactgacttattttaacatgaaaaagtgttagtgtttagacaggatttgatgtcaggtcataaaaaaataaacaaacaaccaaaaaaatccggtagtaatacggagagaataacacagtgaaaaatggcaaaagggttgctttgaaatatcggatcggatgcacatgacagcttcgaaactggataggtgaagcactaaggaaggctttggcatcctttccaagtataggcagggaagagaggaaggtgatggaagtgttagaagggtataaaattctgaacacaggctgttaagaatggaggtatattccctgcgtatgttacgtctataaagtggcactttatccttatgaattcaacatcctcagcctcataccccacctaagctctgactcgccaccgcttctgcttgtgttgaccagagccctcaaaaggttgttacaagaaagtctgctcctagtagttcatcacatgtattgccacagatgcaaggacttccatcttgggaatctaggtatgtaatgcacacaatatcctccaggtaggcctttctgcagttgacagtattattcaccatcatgaatgaaatgagtgaggatgccaccagacacttagaatttcacaagtccttatattctattctactgttaccactccaatataaattagcaatcaggtagtagatgctttgatcaagacagaagtcctcaaggacacaaatgacttaccccagaaagccaaaa

SEQ ID NO: 16228 - DNA, 1370 bp, Artificial sequence
  DNA replication origin
ggagtgcgccagcgccaagcccaccctcagccgcacgcggcctgggcgcagagagcgcgtgagggtgcgcgcatcgcccacccgccgcgccgctcacctagcaccaccgcggccacggtggacagcaacacccagttattcttcaggaagcgcttccactcgcatcctttcctcgccggtttccccatggctgtcgccgctattgtgcgctgggctcggccgtgcgcgcgtgggctgggcgacccggggactgctggctgctcggcggcgcggcgagatgcgggtgcacaggggagaggtgagagccggccgctgcagtcgccgccgtcaccaccgccgttgccgccgccacccgggatcgcgcaccgcgcccgccgccctgccagcccggtagttttgcgtggcaggcgcgcccggctcctcctgctgccgccgcgctctgcggcgcctgggccaaccagcgaggaaggagggaggagcggcaggcccgggaaggagggtgggtgcgtgcgtgggacgcccggggtccctagggagcaggcgtggtagggcgcccagcgctgcggcaggagctggggcggcctctccgggaaccctgagtcccgccccacagccttccactggagtctgtctcgctttccacgcctcactcatgctagggctttgggttaagggttttcttctgtccctaacccagagaggcggagccactgccctcctgggcgcggacttcatcctgcacgtctccctctccgttctccacaccagctatttccagcgccggcacctgcagaacgggtgccctttcaagtcgggggaagctgatcctgccttgggtccctcttgctcggctactcaggctgggatgtgccagcagccgcgaaagcctgaagcttctgggaggagagaaaggagtcctggggcagaacatggctttggaaactttcacgcggagcctccagtgcccccacagggattattctcctcttcgagtcgctggaggtgatttgtctgtggacactgggcttgggagtgttccctgcacaaggagatggtgatttctcttagaactttacttctgctccttgggacttgctctgtgaccacaggccctggagcatggaggcttggggcagtgattagaactgagaaccggacccgggagccgctctggggagaaagtgggcggtccatcccctaaggtccaacggattggaaaggcaaacacaggagaaactaggttagtggtgccaaatatatttggtgttgctaagtgaatttctgatgctcttccatttttctacccaattttttcactctcacgtatacaatctctttccctccctttaccaaatcagtacctccgcagc

SEQ ID NO: 16229 - DNA, 794 bp, Artificial sequence
  DNA replication origin
cagcagcttcataaggggtcgcacgctgccccacgacgagctctctcccgcgcacacccccagcttcttggacagccacaggtcgatggccagcagggagcgcagggcgatgcccaggaaggacgggttcaagtccatgcggtcctcctcgggcagcggaggcgcgggcgactgcgaggggcccgccgcggccagggggaaggagccgcggcggtgaactgggctctccgatgcacggagccgggcgcaggtggggtccacggccgtggcgcggctgctgagcagggactggaactcaaacctgctgccgccgccaccgccgccatgggctgggctgccggggctgctgctgctgctcgaagcggagacgcccagcggccgtccctccatgctcctccggggacttggcatcgcagctggcggcccggatcccgggacctggccggaccaaacagaggcttcccggccctgcagcctcttccgcttccgcactaccatcccggaggggcggggagaggagccggcgagagcgcgattgtgacacctggtggagacgtgggagggagttggaatttccaatgtgaggagagcagaggggaggatgttggcgttgggaggtacaggtgagggagtgaggtgatggggaaaatgtcagtgtctgtaggagcttaagagaaatagagccccgtgtaacaaaacaaagcaaagtctgttttctctcccttgtttgttgttttctttctttttaagatttcttgcccaggagtgttcctgcctggcaaacaagatgtgta

SEQ ID NO: 16230 - DNA, 860 bp, Artificial sequence
  DNA replication origin
ccagcccatggcggcggtggcggcggcagcaggtttgagttccagtccctgctcagcagccgcgccacggccgtggaccccacctgcgcccggctccgtgcatcggagagcccagttcaccgccgcggctccttccccctggccgcggcgggcccctcgcagtcgcccgcgcctccgctgcccgaggaggaccgcatggacttgaacccgtccttcctgggcatcgccctgcgctccctgctggccatcgacctgtggctgtccaagaagctgggggtgtgcgcgggagagagctcgtcgtggggcagcgtgcgaccccttatgaagctgctggagatctcgggacacggcatcccctggctgctgggcaccctctactgcctgtgcaggagcgacagctgggccgggcgcgaggtgctgatgaacctgctcttcgccctgctgttggacctgctgctggtggccttgatcaaagggctggtccgcaggcgccgcccggcccacaaccagatggacatgtttgtcactctctcggtggacaagtactccttcccctcgggccatgccacaagggccgccctgatgtcgaggttcatcctgaaccacctggtgctggccattccactgagggtgctggtggttctgtgggccttcgtcttgggcctatccagggtcatgctggggcggcacaatgtcaccgacgtagcttttggcttttttctgggctacatgcagtacagcatcgtggactattgctggctctcaccccataatgctccggtcctctttttactgtggagtcaacgatgacaccatctcattgattatggcaccaggaagtctgaaggtttccacattcg

SEQ ID NO: 16231 - DNA, 871 bp, Artificial sequence
  DNA replication origin
cgcgctgtctgggcggccccaggggctgtcggctcacttccgggaacgccggggaaccgcagtagccgcctgctagtggcgctgctagccggccggcgcaggctgccgagcgggtgagcgcgcaggccaggccaaagccctggtacccgcgcggtgcgggcctcagtctgcggccatgggggcgtccgcgcggctgctgcgagcggtgatcatgggggccccgggctcgggcaagggcaccgtgtcgtcgcgcatcactacacacttcgagctgaagcacctctccagcggggacctgctccgggacaacatgctgcggggcacaggtgggagctctgggcccagggccggccgtgcgctgtcacccgggtcggacttcgcgggcgaggggccgaagctgggcacgcgggtccctggctgcgggcgcggcatttccctcccgccgcccgggacagagacctcgggctgctgagcgactgcgccccaaaacctccggcctccgtgggccgcttcgggcgggttatggggtggcggtgggggaagggactggaaagttaggtcgagctcgaagttcagagatgaaaggaaaccaccgggctttgtttcagaggcccaagtcctcccagtggcagccactcttgggggtccatcgagctgagccgcagcttgttcaacgtgctggtgcctttggaagactgtcattagccctgctagagtctgctcgttctgttttgttttctttgtttctttcttttctctttcttttttggtgtggttaagctctatgagatcttgtagttctgacctttcccccatattcccaaggccaagtattatttacccttgttgcagtcataaaattatctcattt

SEQ ID NO: 16232 - DNA, 1035 bp, Artificial sequence
  DNA replication origin
tgtctcaccctgaagtcatttctatcttctttgaaatcagttctggacctctgaggagaatggtaactgtgttttattttcagagagccttctttctgccttagcatagtgtccgggacaaagcaatgatgataaatggacaaccattattgaacattgaccccgtagctggcattgcactaagtactacattattttaactcctccattctactcctctatgcccattttacaggcaaaatgatactcactcgaacgtttttgtcctctgtttccattcttgaaacatgccaaacctccagttttagggccttttcctaaaactggacataggaagggcccatgtctctctcttccatattctaattaagcactcagcacacatgccatctcttcaaagcttttccgaccgcctatctacaacagcctgcctccacagtttcacacactcttttacgttatttataaaagagtctcactcaatggaagctggatttcctctcctgtaaaatgaggtaggccctctcggctcaaggtcactccctgtgattctacacagagagggagtgggaagagagggcgctcggcagcagaggaggaggaggaaggagggaagggcgaaggcgggagtgggtgcagaagcggggggtctggcggtccaggggggtagaagggaggggcggattcgagtgggcgccaggtggaggtggggccagggttgtcaagggagcacgaaaggggtcgcggtgtgtccggcaaggactgggtagggcagcgcctgctatggactaggggcgagggctacgaaagggttgttggaggggtggatgcgggtggatcccgaaaccaagcggctccgaggggcgactagaggtggggagggggcgcgcaggagttgccaaggtcggacagaggggagcgcggtctatccggctgggaatgggccggacagggcgcggggttccggggtcgcggagaggcgcggaggtagatctgagccgagtggagggcgcgtgggggtgggtgcagaggggc

SEQ ID NO: 16233 - DNA, 1116 bp, Artificial sequence
  DNA replication origin
tagctgagggagtgcgcctgagtcgccatgtgcgcgctctccgaagagacgtgagcagcccgagagcggcgacttcggacagacgcgggactcgtgactccgatggtggtggtggcggcgacaccgacggcggcggctcgggctgcctccagcagcccagacgcgtccacgtggtttggaacaggaagacggagagactagacaccgggtcagaggggagcggggcggagccagtggccacctccccgcctccccgcccgaccggggcggcccccgcttcgggccacgccgctattggcccgcgccggatcagggcggtgcccgcgccgcgcctccattggcttccgctgaagctgggcggtgcccaagccgcgctgccattggtccgtagtggagctgggcggtgcccgggccctggcaacagcgcgcggctggagggaacgcgggaggatggccagggaaccccggcgcgggagttgccagtcggggcagtctcctctgtgtacctcctggcgtggtagcaaggggagatggcggactgagattgatgcctacgacgtgccggattcttagcattactacttacggcaactactggggtgaagatgctattatctacccctcctctttcttactaagagagacaacaagggttggtgcactcaccctatcgcagggatgccgctcagcgcactgccggcgcagtcccgcagctccatgctgtaaccctgcaaggtagagccatcctgtcctactcatggataaaggctcgaggaatattgcaaagctgacagtggcagcctatactgagacccgaatcctcccacagcaggccgttgcttattttattgagacacctctttgcccctttctcacgggtcccttcgtttatcgtcattgcgtttcatggcaattcaggccctcctacctcgcatgcttcaagatagatagttgtaataacttcacacacacacacgcgcgcaatgctttttccctctttcccgtcctcctccaatcctgcacaagaaaatcttcccaaacgttggattatttcacttctctactcaaaaaccttccaaaatgtacagttaactaacaaatgactacacaagtaga

SEQ ID NO: 16234 - DNA, 1054 bp, Artificial sequence
  DNA replication origin
ccgccccgctcccctctgacccggtgtctagtctctccgtcttcctgttccaaaccacgtggacgcgtctgggctgctggaggcagcccgagccgccgccgtcggtgtcgccgccaccaccaccatcggagtcacgagtcccgcgtctgtccgaagtcgccgctctcgggctgctcacgtctcttcggagagcgcgcacatggcgactcaggcgcactccctcagctacgcagggtgcaacttcttgcgccaacgtctggtcctgtctaccctgagcgggcgccccgtcaaaatccgaaagattcgggccagagacgacaacccgggcctccgaggtaacttggtgtgggcggcgcgcggcgtgggcgcgggggctgaggggagaccgagctgatgccgtgggggcccgcgcggtgttggttgggcggctcggcgtccggcgagcgcgtcggggagggcaggtggcgcgtcgcctccaaagccggaggggcaggcacagtgggggaggcggggtcggggcccgaggggagcgctcagctgcaagctgcgctcggcgtctccggggcgctggtagtaaacagctgcacgttttccagctttacgtgtagcaacaaatccctggcgtcgccccttcgcgtcccttcggcccctcttgccctcgccataaacctctcaaaggagaaaaacagtttgttggaccgaaatatggtgaatgagccgggggagagacattgggagagaaaagtaccttgggttggttctctgccctgtctcaaagcagttctcagaagcagctgcccccttggacaccggctgttcctgtcgccatgatttctcggctgccctcacacttgtccttgggtgtggataaagaaatttttaaaattctgtgtttgttttcagccgtgactgtgattgatgtgcgcaggacaggagctttgagatagacttttaacagtcatgggcctaattgccttgactttagaaaaggggtcggtgacaatcgctaaactgcaggcttccaagctcacttcttgctctgcaatggtaggtt

SEQ ID NO: 16235 - DNA, 855 bp, Artificial sequence
  DNA replication origin
gagagtgtgacaaggatggtaaagatgtgccttcacaggggagcatcataactgaagataagaaaaaggctgtgttccagcagtaaggtccttgctgaaggtgtaatgttaacacagtgccagctgcatggccatgtggctatatccagtggcagttggcagcctagagggaggagtagagaacgtgggaggaccaatttcatccaaggttggatgcaggttggcaaggtgggtgggtcctacaggaggacagttggagggtgggtgctggagcattgggaagtacattcctcactgaggattgtcacaggggctcaccagcctggacaaagcaggtcaagggatgagaaactttaacaggcttaaagatcagatctagtggaaatagatacatgtactgtgtaggacaagagattgtgtttagggagttttgttttgggatttcagatattaaaagtggtaaaattctaggtgctgacaggatctgggtgggagcaggtgttggaggccgtagagcaagacaggctgtgggatgactttcctggcgggagtgtgacaaggagggcagaccagaaagcctgcttgtcagggcgggggtgggtgcttaaggtcgggttttgtgttctcaggaggtttggcaatggtattacttggaggaagaaaggtgtagcgtggactgtcttttcagaggcctcgaatagcttgaacagtaagtggtgaagggcagggagtagggtgggctgcagagccatgtgcagagagagtgctggttaagatagaagctcaaacttgggttgctgcctgaagttctttttaaggatcatcaaaaccacaggaatacataataacaaagcc

SEQ ID NO: 16236 - DNA, 1564 bp, Artificial sequence
  DNA replication origin
ggcctgcagtctccccgaatggcaggagaccgggccggatagaggctgggggagagccggacgcgcgtcctgcagtgcgcgtgcgccgctcggtgctggtcgcgggaccggcaggcgcgggccacgcagggcagctgcctctcgggaagccggcgagcgcgcgtggagattcctgggacggcccctgggcgtgagcgcgcaaggaagttaaggcggcggcgcctcgcgaaacgctggtgcccggctggagctaggcgccagcgctgggcccggccctcactagatgggcgggtgtgtgtgtggccgccgccctccagggaagcggccgggagtgactcaccctggctggctccccagcgcgcagcctgcactggaggaggccgggctgcctccgcgcggagactcccctcccgcacacttctccgctttcggcttttccttccacctcccgggtacagcagacccgtccttccccagtccaggctgctaggccgaggggaagtggcgccgggggccggggacaacgcgctcacacacgctgtttcgtggcaatgcgccctcgagagcctgactcccatcagccaccttggctggaaaggggtgagggtgggatgaagcgcccagccgcctgcgggttggcaacaaggcctagcgaatgtttctcctagaggagaaacaactttaccggcgtggcctggtgtagcccgggagagggtggagacaacggctgtgacgggcttcccggctgccaaagggcctcattcattcattcaaatatttactgagtgtctactaggtgccgggctgtaggtccccagagataccaggtgaacacgaccccacacactccttgccctactggattgtattctgatggaagcgacaaaacaacaaacaacgctttaaatgcataatgtgcggggtgtgtaattgccactaagaaaatgcatagttttctgctgccatatacataataacaaagaaaaggagtagaaagtgaggagggggtgtgctattttacggtggccaggaacgatttcctagaataagtgacatttgagcagagatctgaaggatgagaatgaaccagtcccatgactatctgggaaaagaatttcaggcagagggactcctgaaggcaaagaccttgagaagggaaagtgtttggcaagttcaaggatcaggaaagaggtcactgtggctggaggacacggaaggagggggcagtggtaagaggtgaggccaaagaagtagcctggcaccagatcgtgtagggatttttttcaagtattagccctctttctgtcaacctaaatgaagtgacgcattcatagctcctgtttccccatacacaactgatgctgctcttcaggtctgtcttgcacttaatggtttctttaaataaacctcaccaaagcaactcctgcatttcttcttacataagacccattgcaaaaggtctttaagcaaatgatagcagcataggaaattacttgaattcaccctgaatcttttaaataatgaactagagctgtataagagggagggatttacaggaaaattg

SEQ ID NO: 16237 - DNA, 1510 bp, Artificial sequence
  DNA replication origin
ggatgcagccggaagcccaccgttcacttctcctccgtgcagccggtagcccacgcgctcgtgctggtgcaggccgccaaacgtgctgctgcctccgccactgcccacagggccgctgctgggcgggagggacgaggggcatgagcccccgcccagcatggggccaaagcccacctggcccagggaactccagagctcggcttaggggtgcaggctgccatctgccatgtagaagggggcgggacaggcgctgctgggcgtcttggcggatggataggcggcggcatccctaccgtactcctcacctgagctgggcaggtacgccgaggatggaagaccaggcgggaccttcccgaccttcgtgggctgcgtgtccaggccgctgtccgcctctgtccgccagagctgctggcgtaggaggggtagtaccgggaggtccccttcatgcctgagggggacaggggtccggggctgctgagggccagcttgcccggcaggaagccagcctgagtcaggctgcgcacgcctgcgtctctaccaaaggaggaataggcccgcgctagctgctcttgcctccgagtcccggtcccaggaatgtgaatggagagtggctgccgtgcgactcagcaagttgagcgccttcgctgaacgtccagctggggtcaaaggaggagctgttctggtcgccgctgccccaggagcctgagctgggccagttctcaagacctgaacctctgaattgcgccccggccagggaggcgggccggcccttcccgttggcaacgggcagcgggaacatcatgctgaagtccaggttactgagctccttgtccgtgtccacggatgccatcctctgcggctggttcattctcttggggccagagcgggcatctcagacatggaaaccctgctgggcgcggcggcatgaagcgtcccccccaccttccccgaacaaacgggcgatgcagcagggcccccaggcgtcgcgcgtggcccgggcccttaccactcctgcatggccagtccgcagagcaaagaaaataacacgggtactatagccagcagttaaggaggtggcagtaagagtaatagaaagggctcaggcgttggtatatgacagtatttgtggtttcgataataaggtctttagagtaaaagcctgtgaagaaaggcatatctgtaagtgcaaggctaccaataataagggaagaggaagtgaagggtaaagtcttgaatagtcctatttttcaaatatcttgttcatcattgagattgtggatgatggagcctgagcatataaataatatagctttaaaaaaggtgtgggtgcacatgtgaaggaatgctagatgtggctgattaatgccaattgtgactatcgtaaggcccagctgacttgaggtggagaatgctatgattttttaaatatcattttgtgttagagcgcagattgctgtaaataaggtggtaacagcccctggagataatgtaaaggtttgggttcagaggt

SEQ ID NO: 16238 - DNA, 1184 bp, Artificial sequence
  DNA replication origin
ttggcccccggagccacgtaggcggcgtctccagccacacgcctgtcggcggggccgacaacctcctgggctcccgagggaccacagccagcagctctggggacgccctcgggaaggcctggcctcaatctactctccggatcactcaagcaataacttgtggtccagcccctccaccgccgtgggctccccccagggcctgggagggacgtcgcactagcctggagcaggagtccctggtgccttatcacccagctacgacgggggtctccacggcctggagagtaagatagaagaccacctacctgaacgagggcatccacgtgctctgcagccacgccatgggcacggctagcaacgtgcacacgctgctacccggccaccgggcgctggccttgggcttcgccggccccatgctgctggtgggggcagcacgcaggcctggttggaggcgaacaccctgaggacggccctgcgggcagcgccagcctcatgcacatccatgttgccctctccagctagccaggcgccctccccgacctctcttggccttccgactcctgcagtgggctagggcgagcaggccactggggaaatcaagcgggaggaggaggatgaggagaacacgtcggcggctgaccactcaagaggagaagaaggagctgaaggacccccgggaccggaccagcccagacaaggacgaggaggaagatgaccttttccccccagagcagaaggccgagtgggagaagcaggtggccaataacgccagggagcggctgcgggtcccttaagagggctcttaaggagctggggcgcatgtggcaactgcacctcaacagcgagaagccccagaccaaactccttatcctgcaccaggccgtctcggtcatcctgaatttggagcagcaagtgcgagagcggaacctgaatcccaaaacagcctgtttgaaacggcgagaagagaaggtgtcgcgcgtgttcggaggcccccagatggtgctttcagctgcccacctgggcttgagtgaagcccacaaccccgctgggcacgtgtgaaaggtacgcctccgtgggacgagccacccgccctcagccccgtgggctgggcccagaacgcccacttgaggccctgggcttcatccacatccacacctcacacaactgttgtcagcattgagcca

SEQ ID NO: 16239 - DNA, 1048 bp, Artificial sequence
  DNA replication origin
gggagggaaggggagggagagtagggacacagagagggcgggaggagcgcggaggcccgccccgaccccgccccttcctcaggccgcgcgggcgtcaccacgccgcgccgcgtgggtcgggccggggagggcccgcgcgcgcgctctggagactcctgcggtctccctagctgtttcttgaagctctgcataagcctcgcccgcggccgccgggttgcgtccgcacttctgcgcgctggcccctcccttgctcctctccctagcagtctccagggttttaccgggaggacctaggcaacggcctgagactccgaggcaagtggggcgagtctagggataacgcagcagcaaggctactgggccggtggaacacgccctggcctggccaaattggacctcccttccggattggcggggtctcggtgggggcgggccggttgccggggggagctggagtcacgtgacggccggcgcggtttcccactttgggctgccggccgctgtggctgtggtgggcggtaggggcttttaccgtgtgagctcctttaatgccggggtctgcagtgagagctggtgatgaagctcctgccggtgtggagcttacatccctaagggagcgtttatttaatcagtaaataaaccactcaccatgaaagtattgagttctgtctcctgcctttcaggagttctaaatctatgtctttgaaatccatttccattcgtctcagccttaccagccataactttagatgagaggaggctatctctttcgtgctgcaaaaggcttggacttagttttagaactggaagggactggtgatagcgtaggtccatatttagcttttggaccccaggtatcaccttagctgtaactttcaacggattgacccagtggtaacgtctgaatagaaggagggttgaggggatatggtgtggaatgggggaaggaggagtctgaaatagaagaaagatttgcttctcattgtctaccttttttagtacagtttgaatttttccatatgtttgtattactttttcaattaaaaag

SEQ ID NO: 16240 - DNA, 1043 bp, Artificial sequence
  DNA replication origin
ggggcggttgggctggcagctgaggctcgtggccatggagtggggttctgagtcggctgctgtgaggcggcaccgcgtcggagtagagcgtcgagagggagcggcggccgcgccaccgccggagagggaggcccgagcgcaggagcctctggtggatgggtgcagcggcggcgggaggacgcggaagaggagccccgggggtagcggcggcgcgagcaggggcgcggggaccgggctgtctgaggtgcgcgccgcgctggggctcgcgctctacctgatcgcgctgcggacgctggtgcagctctcgctgcagcagctcgtgctacgcggggccgctggacaccgcggggagttcgacgcgctccaagccaggtaccggccgctccctcctggcacggcccgcgcgtccgtttgcggctcctgcgcaggctccggggcaccgcacctgtgtgcacccgcccctgccggaccgctgggactcgctgacccctcccaggctgcacgtggggtggggtgaccttgcttgtccttcttctggggtctgaattgccgggacttggggcttgcctgtccccggttaagctcgtggtgcagattggggttgccaggtagattgaacctgctttccactgtctgcccttcgtgcagatggttggttgtgagtcgtctccccatattctggaacagcttcccctttttaccttgcttagcccttctgctttccagatggaaatttgtgtacctagactgttgtataaattcgctttgggggcggggagttttggaaggcgctagtgcactgttctaactttctgagggttacagcccccacatctgaaggctatagaaactctttctggaacaccgcccagtcaaaatttggtatgcagtctgataaattctcagatccctgcagtttatctttaggccccttggattagtgactgtgtaaggtttgacttttttttttttttttaagacctttaagaatgctaggaaaggtgattaagtcaaagatattgtaacccaggtgtgtcaaagct

SEQ ID NO: 16241 - DNA, 1683 bp, Artificial sequence
  DNA replication origin
ccgctgcggccccctccggggaggggagaggagaacccccttcctcctcgccccctcccagccccccgctggcccgggagggggtggggcgccgaggccgcggcgacccggcagggcctggccggtgaagagcaggcgggcggggtgcggaggggtgaggccggcgagggccgtgcgcgcgccgccgccgggggggaggggagaggagggcacctaggctctcctcttctctcccccctcctcgcgcgccatgtaaccccgccccgccggcggtgagctcaagacccccgcgcgcaccgagccgagccggcggctgaggagagccaggcccgatgtggcgggggctacgcgccgcggccgagccgtgaggaagcggctcgcgctcacgcgtcccccagcacctcgagcggctgttccacaccgcccagcctaggcctgccggggcatgagtgtgcccgggacgccgggagcgatggagccggctggggaggaagagcggccgccaccggcggccgaaggagaggacgacgaggaggaggtggcagcggcggcccagacctcagggccggcccacggaaggagtgcctcctcgctggaggacgcggacgatcaggaggaagagatggaggcgatggtgatcggaggcggttgctgcaaggagcaggagctgacctacgagctacagcagggctaccgcatcctgggcgagttcctgcaggagaagcaccggggcctcaccgccccctttctgcagcccttggggggcgttgccaccgcggaggaggaggtggcggaagggccgcgcagcgggggccggggcggtcgcgccttcccgcagcagcccggacagggcatgtgtctgctgcagatggaagagaagttcgccagcggccagtacgggggcatcaccgagttcgtggcggacttcaggttgatgctggagacgtgctaccgcctgcacggagtggaccactggatctccaaacagggccagaagctggagatgatgctggagcagaagttagcgcttctctctcggtaagcgagcccggtccccggtgggactgacagactgacacaaacacacactcacacgtgcccgaggatgggctgggccaggggcctgggggcggcgctgataggtgctgagtcggtgctggagaagcccgggaggaggagcggcgctgggcggggaccggaggggtgtggtgggtgtgggccgaacccggcttgcgcgtagactgagaaggaaacccgagtctgcagcgctgaagagctgggtatagtttgcagatgtaaaatggaatgggtcccgtaggaagaattgcacgtgtaggcagaggaacagtttttgtgggatggaagttggacctgcaacttttagacagttttagcatgacatttaaaacagcgtttaggatgaaatatctctagaaaaataattttggcttatgtaaaaaggtgtcttaaaccattaaaaaataattttatcatttactacccatgtcggtcatcgaagatttatggagtgttactaaatggttaatggttacttttgcatactactgatcttttctctccgtttcatctgaggacacccaatttttgcaataatagggaatgcatcaacacacattttttaaagtttatacatttatgtttattctaccagaaatcataggc

SEQ ID NO: 16242 - DNA, 1042 bp, Artificial sequence
  DNA replication origin
cacagtggaggcaaggaattgcaagtcagaaatacgttgctacttggctgcctctactctattattgtacaccttgatggcgaggttaagtcctcttgtggggtttgagggccagaatttaattttcagagctttatttaatgtcgggaggagattgggtaataaaataaaatgcatactgagaataagacggccttctgacctttcagggtctagggctgtacagtgtctcagggttgctgccaaacgggccataaactgggctggatttttgatgaaaatatatgctctttttcatcaaatataaatgtgggagaggtcagataaagaaaaaggagcattaaccttgaaagcaggttaaaaggagcctttagctccagccagctttttaagaggaaattgctgggcaggtgggggagggctagttgcggaacgaaactgtaagctggaccaggtgtgaggagggcaggtgataaaaggattatagggtgggggagcggaggctgaggaagaattgggacctggcttggcctggctaggagcagcctggggaggaggagagaggtcagatgggtccgtagaaaaggaagattggaaagactcagcgaagcttggggttgggactgagggaacaggtgggagggaaagaaggaagatttgggattagttgcattgggaagagagactagggagggaccgatgtgtaaaagaatgcctggacgttaggcacctcagaccgtttgcccattttacaacaagaattatctagctcttgtaggatggaaaaatcgaaagtgccattttctggctatttggaaccactatcgagcttgtattggggtcaagcagtgttgcagaagaaaataagatgctagattttacgtcaggtgagagttgaagaggttttaagttcttgagagcacaggctaagggagaagaaggaggaatggagggtggaaggttgcctatagtgaaggaggcaagtccagagaaaagagagggtagagacacagagagaaggggttggggggtgcttaccccc

SEQ ID NO: 16243 - DNA, 1531 bp, Artificial sequence
  DNA replication origin
ccatttaaccctgagtggacacagcacatgtttcagagagcacagggttgggggtaaggtcatagatcaacaggatcccaaggcagaagaatttttcttagtacagaacaaaatgaaaagtctcccatgtctacttctttctacacagacacagcaaccatccgatttctcaatcttttccccacctttcccccttttctattccacaaaaccgccattgtcatcatggcccgttctcaatgagctgttgggcacacctcccagacggggtggtggcgggacagaggggctcctcacttccccgtaggggcggcggggcagaggcgcccctcacctcccagacagggcggctggccgggcaggggctgaccccccacctccctcccggacggggtggctgccgggcggagacgttcctcacctcccagacggggtcgcggccaggcagaggtgctcctcacatcccagaccgggcggcggggcagaggcgctccccacatctcagacgatgggcggccgggcagagacgctcctcacttcctagatgggatggcggcccggaagaggcgctcctcacttcctaggtgggatggcggccgggcagagacgctcctcactttccagactgggcagccaggcagaggggctcctcacatcccagaccatgggcggccaggcagagaggctcctcacttcccagacggggtggcggccgggcagaggctgccatctcggcactttgggaggccaaggcaggcggctgggaggtggaggttgtagcgagccgagatcacgccactgcactccagcctgggcaccattgagcactgagtgaacgagactctgtctgcaatcccggcacctcgggaggccgaggctggcggatcactcgcggttaggagctggagaccagcccggccaacacagggaaaccccgtctccaccaaaaaaatacgaaaaccagtcaggcgtggcggcgcgtgcctgcaatcgcaggcactcgtcaggctgaggcaggagaatcaggcagggaggttgcagtgagccaagatggcagcagcacagtccagcttcggcccgtggaaagagggagagggagaccgtggggagagggggagggggagggggaccatatctcttgtgaatttatttcctgggaaagcatgtggagtgcggagtgtgtgtgtgtgtgtgtgtgtgtgtgtgtgtctgtgtgtgtgtggtggagggtgaaagtattttacttgaggataaagattgatgcaaataatattcagatagagttcaatagggttaaaacaatgttaagtgtcttccttgccagtttgctgtcttaggttttgctttacctacgtttttctctgatagaggaaaaataaaataatcaattcccagggttaagtgactgagtccccaagaagatcttaaagaagacagccatttgcctaagtagttaaatcccagttaaattttagtagcatgatctatctctatgcagagaggtaaagaaagaaccaaatgatgtcatttc

SEQ ID NO: 16244 - DNA, 972 bp, Artificial sequence
  DNA replication origin
cttggcctcccaaagtgccgagatggcagcctctgcccggccgccaccccgtctgggaagtgaggagcctctctgcctggccgcccatggtctgggatgtgaggagcccctctgcctggctgcccagtctggaaagtgaggagcgtctctgcccggccgccatcccacctaggaagtgaggagcgcctcttccgggccgccatcccatctaggaagtgaggagcgtctctgcccggccgcccatcgtctgagatgtggggagcgcctctgccccgccgcccggtctgggatgtgaggagcacctctgcctggccgcgaccccgtctgggaggtgaggaacgtctccgcccggcagccaccccgtccgggagggaggtggggggtcagcccctgcccggccagccgccctgtctgggaggtgaggggcgcctctgccccgccgcccctacggggaagtgaggagcccctctgtcccgccaccaccccgtctgggaggtgtgcccaacagctcattgagaacgggccatgatgacaatggcggttttgtggaatagaaaagggggaaaggtggggaaaagattgagaaatcggatggttgctgtgtctgtgtagaaagaagtagacatgggagacttttcattttgttctgtactaagaaaaattcttctgccttgggatcctgttgatctatgaccttacccccaaccctgtgctctctgaaacatgtgctgtgtccactcagggttaaatggattaagggcggtgcaagatgtgctttgttaaacagatgcttgaaggcagcatgctcgttaagagtcatcaccactccgtaatctcaagtacccagggacacaaacactgcggaaggccgcagggtcctctgcctaggaaaaccagagacctttgttcacttgtttatctgctgaccttccctccactattgtcctatgaccctgccaaatccccctctga

SEQ ID NO: 16245 - DNA, 1389 bp, Artificial sequence
  DNA replication origin
ggagcgggctgtcaccggcccccgcatccctcccctgcggccgcggccggccgctccctccccagcttgacagtcgctgcagtcacggacggagcgtctctgccccagcgtcgccgctcgcccggacgcccgcacccccgtgccccacgcggaggggggcagtgccgggaagacctctccggaccctccccccgccctggcccccagactccggaaaagcggttacctggcgcgcgggttggggcgagagcacgactcggtggaggaggaagagaagacagtggcctccggcccagggagatttgggaaatttgggagacttgttccgcactaggtgacagctgttcgctgcgcacgcgcacaggaccccggccgcccgatcactgcgccgcgcctcaccctcccgtcgagggggtgggtgggaggcagcggcgaaggcgcgcgcaccgccggctctccctgcgcgagggcgcgcgcgccgtcacgtgaccgctggggcccgcacttggtgagtcacgtgggcttacaaacagcttaaaggtgcccggcacgctcttgctttgggctcaacttccgcgctgtggttaacttaggcttgctggcgcgcatcttcttgtcctttggacacaggcatatcccattctttccggaggggaaagatactcgcgtagaaggagaaaacaggtgcacagaaccttgcccggaagcgctggctggggtcccgcagggctggacctgatgtagtccacgcgccacacgtcctcctgggcgccgacgcgcacctatggcggcctccgacgcgcggacgtcagcgtggcgttaccggggtggagcctcggaatgtactggagagcctggcgagaaagtcggggctcgcagctctccggcgatgacagcgctgtgttcccgttctcccttcacccggtggccgggaccactgagcctccttcccacaatgggagatcccgaataggcgaagagtatcttcgtgtcccaaccctttaacaactaccgcgcaggagcgtgtcagcctctggaagcaaaactgtccggtgttgagtcacctacacccagcacgtcccgccccgacccgcccaagtgtgctcttaagatagggaggcacaaaggtgaccccaataggaatcctgggctggcggtccctcagaaactagagttgataacagtttggccagaactgaagtgactagaaatgcaggtgcctccagcgtctgagactagataagttaacttcctacaacttgttgcttttcctctgtaactccgccttccgaggtgtcagaaggaaccaaccagaccttaagcccctgtactgccaaagacagatggttgagcatcagatgttttgcaaagctgaatgatttttttttt

SEQ ID NO: 16246 - DNA, 1124 bp, Artificial sequence
  DNA replication origin
caaatctccctgggccggaggccactgtcttctcttcctcctccaccgagtcgtgctctcgccccaacccgcgcgccaggtaaccgcttttccggagtctgggggccagggcggggggagggtccggagaggtcttcccggcactgcccccctccgcgtggggcacgggggtgcgggcgtccgggcgagcggcgacgctggggcagagacgctccgtccgtgactgcagcgactgtcaagctggggagggagcggccggccgcggccgcaggggagggatgcgggggccggtgacagcccgctccggcccttaccgaggttcggtacccgcgctcgccgttttcccgggatccggagtcggggtcgcctccttggggcagaggagcgctcgggcggtcctgggatgcggacctcttaacgccgccagtcggctgtggcggactccaggaaggccgggcctggtgcacccctcggggccctcccttccctgggagtgtcacgacccgcggggtgagggtgggagctcctctcctgaccacccgttgcaggcagtcatcccgtcattcggggtcgtcttcagccctcgcggctgtccttttggtgtttctttcccccggcatggggccatttcttcctgcagtgcctggaggaaccatgatgcggtgtagacggcgggtgcttaaataaatgcgagttggattagggcgcgtggactgccaggcacagaacgtggcgtggagtggggacgtggaggagggagccagacaggccggggctgtaggcaggagcttggggttttcctctgtgctccgccagtaaagccagcagccgggattcagatgctttccgcgtggacttgatgctgggctccccctttgctgcgcggtgcaagcctgcgctggctggctctgattgtgggcaatactaccgggaggggttttgtcaggttccttcttccggaagagacaaggtaaacttttttttgcgcttgataaactaaccccgagaggtgatttataaagcactgttcggaaatgtaggttagaaaagcagagtcacttttatcctggtgaaagttactagtaggttccggccacttaggttcacactaaactctgccctat

SEQ ID NO: 16247 - DNA, 1032 bp, Artificial sequence
  DNA replication origin
cttcaagcatctgtttaacaaagcacatcttgcaccgcccttaatccatttaaccctgagtggacacagcacatgtttcagagagcacagggttgggggtaaggtcatagatcaacaggatcccaaggcagaagaatttttcttagtatagaacaaaatgaaaagtctcccatgtctacttctttccacacagacacagcaaccatccgatttctcagtcttttccccacctttcccccttttctattccacaaaaccgccattgtcatcatggcccgttctcaatgagctgttgggtacacctcccagacggggtggtggccgggcagaggggctcctcacttccccgtaggggcggccgggcagaggcgcccctcacttctcagacggggcggctgccgggcggagggtctcctcacttctcagacggggcggccgggcagagacgttcctcacctcccagacggggtcgcggtcgggtcgaggcgctcctcacatcccagacgatgggtggccgggcagagacgctcctcacttcctagatgggatggcggccgggaagaggcgctcctcacttcctaggtgggatggcggccgggcagagacgctcctcactttccagactgggcatccaggcagaggggctcctcacgtcccagacgatgggcggccaggcagagacactcctcacttcccagacggggtggcggccgggcagaggctgcaatctcggcactttgggaggccaaggcaggcggctgggaggtggaggttgtagcgacgcgagatcacgccactgcactccagcctgggcaccattgagcactgagttaaggagactctgtctgcaatcccggcatcttgggaggccgaggctggcggatcactcgcggttaggagctggagaccagcccggccaacacagcgaaaccccgtctccaccaaaaaaatacgaaaaccagtcaggagtggcggcgcgcgtctgcaatcgcaggcactctgcaggctgaggcaggagaatcaggcagggag

SEQ ID NO: 16248 - DNA, 1673 bp, Artificial sequence
  DNA replication origin
attccacaaagccgccattgtcatcctggcccgttctcaatgagctgttgggcacacctcccagacggggtggtggccgggcagaggagctcctcacttcccagtaggggcggccgggcagaggcgcccctcacctcccggacggggcggctggccgggcagaggggctcctcacttcccagcaggggcggccgggcagaggcgcccctcacctcccggacggggcggctggccgggcaggggggctgaccccccccacctccctcccggacggggcggctggccgggcggggggctgacccccccacctccctcccggagggggtggctggccgggctgggggctgacacccccacctccctcccggacggggcggctggccaggttggggggctgacccccaacctccctcccggatggggcggctggccgggcggggggctgaccccccccccacctccctcccagacggggtggctgccgggcggagacgctcctcacttcccagatggggtggctgccgggcggagaggctcctcacttctcagacggggcagctgccgggcggatgggctcctcacttctcagacggggtggttgccaggcagagggtatcctcacttctcagacggggcggctgggcagaaacgctcctcacctcccagacggggtctcggccgggcagaggcgctcctcacatcccagatggggcggcggggcagaggcgctccccacatctcagacgatgggcggccgggcagagacgctcctcacttcctagatgtgatggcggctgggaagaggcgctcctcacttcctagatgggatggcggccgggcggagacgctcctcactttccagactgggcagccaggcagaggggctcctcacatcccagacgatgggcggccaggcagagacactcctcacttcccagacgggttggcggctgggcagaggctgcaatctcggcactttgggaggccaaggcaggcggctgggaggttatagtgagccgagatcacgccactgcactccagcctgggcaccattgagcactgagtgaacgagactccgtctgcaatcccggcacctcgggaggccgaggctggcggatcactcgcggttaggggctggagaccggcccggccaacacagcgaaaccccgtctccaccaaaaccagtcaggcgtggcggcgcgtgcctgcaatcgcaggcattcggcagactgaggcaggagaatcaggcagggaggttgcagtgagcggagatggcagcagtacagtccagcttccgctccgcatgagagggagaccgtggggagacggagagggagagggagagggagagggagagggagagggagacggagacggagagggagagcaacagtgtgtcacttctgaaacagggcaaggaaagacatgtggcttccttcttgcgatctctctcggatcacttgctctgggagaagccagctgccatgacatgaagagcagtccatatgacaaggaactgaggaccccatcaaaagccatgaaaggggagcactcttgtaagagaatcttccagccacaattaaatgctcagatgactgtagcccagccaacatgctaactgcaacctcatgagaccctgaggcagaatctgaaggtcagattcctgaccttca

SEQ ID NO: 16249 - DNA, 964 bp, Artificial sequence
  DNA replication origin
ctctccgcccggcagccaccccatctgggaagtgaggagcgtctccgcccggcagccaccccgtctgggagggaggtggggggggggtcagccccccgcccggccagccgccccatccgggagggaggttgggggtcagccccccaacctggccagccgccccgtccgggagggaggtgggggtgtcagcccccagcccggccagccaccccctccgggagggaggtgggggggtcagccccccgcccggccagccgccccgtccgggagggaggtggggggggtcagcccccctgcccggccagccgccccgtccgggaggtgaggggcgcctctgcccggccgcccctgctgggaagtgaggagcccctctgcccggccagccgccccgtccgggaggtgaggggcgcctctgcccggccgcccctactgggaagtgaggagctcctctgcccggccaccaccccgtctgggaggtgtgcccaacagctcattgagaacgggccaggatgacaatggcggctttgtggaatagaaaggcgggaaaggtggggaaaagattgagaaatcggatggttgccgtgtctgtgtagaaagaagtagacatgggagacttttcattttgttctgcactaagaaaaattcctctgccttgggatcctgttgatctgtgaccttacccccaacccggtgctctctgaaacatgtgctgtgtccactcagggttaaatggattaagggcggtgcaagatgtgctttgttaaacagatgcttgaaggcagcatgctcgttaagagtcattaccaatccctaatctcaagtaatcagggacacaaacactgcggaaggcctcagggtcctctgcctaggaaaaccagagacctttgttcacttgtttatctgctgaccttccctccactattgtcccatgaccctgccaaatccccctctgtgagaaacaccc

SEQ ID NO: 16250 - DNA, 1124 bp, Artificial sequence
  DNA replication origin
caagcatctttttaacaaagcacatcttgcaccgcccttaatccatttaaccctgagtggacacagcacatgtttcagagagcaccgggttgggggtaaggtcatagatcaacaggatcccaaggcagaagaatttttcttagtacagaacaaaatggagtctcctatgtctacttctttctacacagatgcagcaacaatctgatttctctatcttttccccacatttcccccttctctattcgacgaaaccgccatcgtcatcatggcccgttctcattgagctgttgggtacacctcccagacggggtggcggccgggcagaggggctcctcacttcccagaaggggcggctgggcagaggcgccccccatctcccggacggggcggctggccgggtggagacgctcctcacttcccagacggggcggctgctgggcggaggggctcctcacttcttagacggggtggctgccgggcggaggggctcctcacttctcagacggggcggccgggcagagacgctcctcacctcccagacggggttgcggccgggcagaggcgctcctcacatcccagatgatgggtggccgggcagagacgctcctcatttcctagacgggatggcggccgggaagaggcgctcctcacttcccagactgggcagaggggctcctcacatcccagacgatgagtggccaggcagagacgttcctcacttcccagacggggtggcggctgggcagaggctgtaatctcggcactttgggaggccaaggcaggcggctgggaggtggaggttgtagcgagccaagatcacgccactgccctccagcctgggcaccattgagcactgagtgaacgagactccatctgcaatcccggcacctcgggaggccgaggctggcagatcactcgcggttaggagctggagaccagcccggccaacacagcgaaaccccgtctccaccaaaaaaaatacgaaaaccagtcaggcgtggcggcgcgcgcctgcaatcgcaggcactcagcaggctgaggcaggagaatcaggcagggaggttgcagtgagcggagatggcagcagtacagtccagcttcggctcggcatcagagggagaccg

SEQ ID NO: 16251 - DNA, 984 bp, Artificial sequence
  DNA replication origin
aggcggaggaggaggaaaagggggtaggggtggagggagggcggggggacgcgctgccttggatgctggatttcgggtttttggactcactcgctgactctcttccacttcctcgctctggactgggctggccgcacgagggctgggcggcggcggcgaccaggggggcttcggcggcggcggccgctgctccgcgggattaaattggccgcccggaggcggcggcgcggccgtggcggggcgcgaaggcgctggaggaaagtgttggcggcggcgcgggaggcggtggcggcggctgcccggggccaacatgaccaggtgagtccctggaactgaccccgtccgccccgcggtgtcttcccctcttgctgctccggaatcgccctgcgcccggctccggctgccggcgcctcccgagccagagcgacacgctcgcgtttccgcgagcccggcgcccgggcaccggagcgcacagtttgctcctctggacctcctcgggcagaggtcctctcctgctgggttcacttctcgcctgaaacctcagacccgggagagaggcgactctagagaatgggggtgtccgggtatgtgtatttgtgcgacccccgctctctcctcctagggtgggcgtagtattgggggcaaatggtggagcggtggggcaatccacccttacccagggatcctgccaccgccttttttaaaggcagggattactgttttaaggagggctgactacggtgagggggcgatttctttttctttctttcctctgaactagtggggagaaggagaaatagcaggaatcaaagtctacgcagctgccatagaggagggggattgtttgggagaccttcccgtggcagaatcaaagctcgtagttcagctgcgggaatctggtgtacttaacacacacattcattccgtagggaagggaacgcatcttttataatgaagagtcaaagttgtaagaaacaatttaaa

SEQ ID NO: 16252 - DNA, 1343 bp, Artificial sequence
  DNA replication origin
cgcctcccgcgccgccgccaacactttcctccagcgccttcgcgccccgccacggccgcgccgccgcctccgggcggccaatttaatcccgcggagcagcggccgccgccgccgaagcccccctggtcgccgccgccgcccagccctcgtgcggccagcccagtccagagcgaggaagtggaagagagtcagcgagtgagtccaaaaacccgaaatccagcatccaaggcagcgcgtccccccgccctccctccacccctacccccttttcctcctcctccgcctcctcctcctcttcccgggccgtcctcttggcccttctgagcccgcggcttccgcggcggtttctcctcctcccgctcctcctgctcgccctgcgcccgcttctctcgctgccgccgccgccgctgtttgtctcctccccctcctcctcctcctcctcttcctcctcctcccgctcctcgatgctccgccgctcgcggctggggggtccggggccgcgtctcctctcctccctccgcctctcctctttcctccttcctgctgcctcttcttttaaagcggattctttggccacaaatagcaactcggctgcccccctcggtgcctccctccccttctcttcttccccccaaaagtgaagcgcacgcgaggtaaccagaaactgaggctcgtggggggagaggggtgcgaggcgacgcctgggaaagggcccgagcagagtcgagggccgggaggtggggtggccggtgcagcccagtctttggacctggcttgaacctggtagttacggctgcagaagaggtggtttggggaggggggaaaattaaacgaaaaagcccaggaaagtcattggaaaggcttctctctttgtttccttgtgtgggtgatttctaaaatcctcgtaacgtgctggggatcccacggaattgctgtgctccagcgctgggggattgtgtgtgcgcgttgcctgcgcgtgagtgtgagtgtgggtgcgcccggacgcggggagagctgggcccgctgcgcccgctggcgaatccctgaatctggaccactgacccactgaaagggccagagagccggataaaggaggggcaggcaggagaggtgggtgaaggaggcaacacacacacacacacacacacacacacacacatacacacacacagacacacagacacacacacaccagaggagggggcggggtgacgtcactccccagcatccatccaccaggccagaaaagaccctctccaacagattcactcatctcctaagagatgcacacccgggcgcttcctgctctgcgtcccagcgcaaaggaggaaaaaatgctggtc

SEQ ID NO: 16253 - DNA, 1180 bp, Artificial sequence
  DNA replication origin
gcggctcccggctcctcggagaagcagccgagacggcaaggaggaggcgaggctctgtcggggcgaggcgctgcccccacgcgctccggccgccggctgcgggcgcggctgggcggggagccgaggcggccgctcccgcactcgctcgctcgctcgctggcgctccctcctcgtctcgctcgcactcacaggcacacaccccacgtctccagcagctgccgctcggcctcacgcactcacctgcatttccttaacgagccacttgatggctgccagcggcgtgggccccgctccggcgggcgggggccggggcggggagaacgcggcgcgggatgctccgagcgcccgctggggagagaagcggcggcggcggcggcgctgcgggcgcgccagatggggcgggaggaggggagacccggcacccaccggcccagagctgcctgacgcggcctgggcggaccccgccgcccgggtgcctaggcacgattccagggatccagggtaaagcggttcgcgcgggaacaggaggatatgtcaggcacaggctattccccatcactatagccacagaggactggtccagatgcggatcccgatctgtgcttcttcaggtgttcgcgtgctttcggttattattattattattattttccgagggaggctgtcggtaacacctaaggggtagtgggtgttaatagctgggggacgtacatttgatttgcaatggaatcgatgcttatgaagagcagacttagggaggtgaagggcaggggcacaggggttgcttggcggagggggtgtacttcggctgagctggatggagttttcagtcggggcgcttggcagtctggctgggcttgagggagggatagagctctgccaaggtggtagctgagaagggaaaacctgtacaagagttgctgagaatatgcctcgctgcagaggagaggacatggatgcagggagcggattcttccccacctcctccttaccccaaggtagagtggggtatcggagtgcatcagatgtggtgtaccacagactcgggagacaggggaggaggaacttagacccccagcgaaactagaaataaggtttggagctggggggagaagaaggggcaggatgagagaaaaacagcaggaagctttttgtcattttactatctttcatgtctcat

SEQ ID NO: 16254 - DNA, 1008 bp, Artificial sequence
  DNA replication origin
ttccaaccttcgcaccctgggacttcgaccggcccaggatttccaccattttatcgaaaatgctaaatattggcagtgccaaggacgtctgaagatggtaaaccattcctccacaaaaccacagctcccctgcgacccaggtgctggtaaagggtaacaacgtaggaggcccaatcccctcgcgcttctcagggtccccggctttccgcccctgtgccagacgacggcgtcctaacggccaccctctcccaggaacctccaacgacggcgccaaagccacaggagccgcctcccacctgaggcccgcacgccatgttctcccttttcccgacccgtaggggcgccccactttggccatgcgcttcccgcccgcactcgccgcgcagccatgaggggcgggcctcaactcaccgtggccaatacggaccgctggcgcggggtctctgagggagcgaagcggcgagcgggctgcaggccgagcagggccatgcggcggtagtggcggcagacaggacagagccctggcaggagaggcacagcacgtcaggtgagacaaagacagacgtggccagggggacagcacacgtgaggtgaggccacgtggtgcgagctccagggctggtgaggcagctggtttgcgcaggcaccccagccacgaggtggcgccctgccctcgccctgccccgacccttccgcccagcaccctctgctctgctctgccccttctgctcagcaccccctgctttaacctgctttttccattcagcgtcccctgcggcctcccagccctcattcacctcactttccacccgcaatgtcctacccactaaaaaactctcttgccaccctaccctgggcccgaaccccaccccacactaattatctcttttctcccgggtaaggtgagggacttggcacccctgccccctccctttgtcttcctctttacctatgcttcatatgcctctcaacatgccctggcattggcagagtttatagcacactgtt

SEQ ID NO: 16255 - DNA, 1382 bp, Artificial sequence
  DNA replication origin
gtcgcgttgtccgaaagtacacagagtggagccagccgactgtgctgtctttgcaaaccgtgaccgagcaaagtccgcggtaaacaagcctcgcagcagctgcctccggatgagcgccccctgctcattcctccacccagcatttcccacgcgcccagcgctccgctctgcagcccctgccgtcctctctcccagccccattctcagatcgccccatcttttggcccagcccaggtcccagcccccgcggctggcgcaccacactcaccatctcttgcctgaggaggtgaagcttggtttctagcctctccagggcgctagagtggctacctcgtggggagccagaggttggggaggacgaagaggaggacgacaaggagggagggaagctgcagtagctgctgctgctactgcagccgccgccgccgccgccaccaccaccgctccccccgcaggggtccctgtccctttccctgggaaccggctcctccccacggagagagcgcactagactctcgggtactttgcgccccagcttcagctcgatgtctctgaggtctggcagcgggctgtcttccatgacttttccggaacggcgataatagtaataaaacgcagcagatgaaaggcagccacggcttcgaaggctgctgcgaaatcagcagacctctccgggggccagggtctctatcctccgccgctccggtgtaccgtcctttccataaccgcctatgcggtatcagccctgaaatccgcacaggacgcggggggtcgcagctgcagttcccagtccgctgcgactcctccgacactaagatgatcaagatctcctcattctctctctttttggccacctcactgcaaagttgagttcactgatattgcagacagagggggaataaagagggggaagtagtgaaagaaaagagagggaaattaaatctgttttagctttaccaagggaaaattttcacattataaaaccgtccgttcacatccctgcgccgctcactgactgcccatctggtactacgcgacacaaaataatgatgcagccagaaacgatgtcctgggtcgtttcattttccagccatatgcctccaagctttcgggatatcctgggttgtcagaaataatctctggtcagtgaaagaggagttcggtcgtgtgcatggacccataaaaaagagctagttagcttagcaggagtttaacggcttccttgatgcagcaaaaatgtccttcttcccatttaggctgtttgatccaagtcattgtgttcctctgagcctcggaaactttaaactccgctggcaggtggaccaaaccaggaccaacccttctaccgtatatcacagacaagaagagcaaccggaattttc

SEQ ID NO: 16256 - DNA, 1463 bp, Artificial sequence
  DNA replication origin
ggcgcgcgctgggggagggggcgcggcggagcgctaggctggcgtcgggccaccgcgggattaagtttctcagtcacgcgtgagtgtctgtgcgttttgatccgaagctcctcgccgggtcgttacttcagaagagaagacagtgagcgtgggcgaggcgaggcatccagaggccccggcgacccctgctccccagtcctccgccccctcgcgtcgcggccctgggcgggcgccgcgagccgggtaagcggcgcttgagccccggcccagaggccgaggcgcgcccccgcgccctgcgcgcgcgccggcggggaaggtgcgcgggcgccctgggctcggcgcttgggggtgggggtgggggcggggatgggggtgggggtgggggtgggggtaggggtggcggcgggccgtggggcggtggggcggtgcgcttgccccaccccgcgcggcccggcgcttcgcggaagccgctgctgtggcttttttaaaaggatggggtctagaagtttcctttgctactcgcaagtctccactccccccagccccgcggtggataatcctagacctttcagcacccccgccacccctttcttttgctctcgctgactaagaggtttaaaagtttttccttttccttgacccagaggggcacagtcttggtgtcggggggctgggggtggggtgttagcctgggggcccggagcgcagaccaggcctccagggcgcgggagcctgttgctctcccctgcaggggccgctcccggacgccccatccgccgttacgtggtcccgggatgtgcgggttgcggtagagagtgggcagcaatgctcctggtcctgcgttctcgccttagccgcggggaccccgaggcgagccgctaattggtaccggtgccccgtccctcacccctggcaccggcgcccttttaaccgccgctcccgttggtgggagcacgttggtcttgtctctcccttagtctcctcaccccccgcgctgatgggcgtctttgtctgcgatttggcagccccaggatgccggatgttaccagggaagcgatgtttgggagacgctttgtgtcttgcggagttgcgcgtttgttgggtggtgatggtgtacatttttgtttgcgttctttgcagaggcacaaaggctgggctattcttgcctgcagtcacatggaaatcaagcggagactgcgggggaggagaagtggccaggcgccggcgggaggtagaggccgctccgtagtcactgggggcgagtgggggcccctggagacctctactgcgcggtgcggcttttgaggtgctccgcttgggaagaccccggcaatgggcactgactgcctttttgcagtaggggctgcggttggaggctagtgtttcctaggtatcatcagatagataagaggaccatgacttcaccagcgtagaaggaaaacttctccatgttccttgatgtc

SEQ ID NO: 16257 - DNA, 981 bp, Artificial sequence
  DNA replication origin
tatatgctccaggccgagctgagaggcgttggggtgcacacagggagaggaggacaggctggcctgagagttaagggcgccggcctcgcagggtcaacacggccagcggtcacgcagggaggcggagtgggggcaggcgacacagggcaggaagaggggagggcaaaccgggtgcacatggggactgtggcgacggcatggaagagacagccggttagagtctaggccctcttaggcgatgaagggcaggtgaagaaatcccgttctgtcttcctgcagtcctcccttggggagcccccatcctatcctgctctggaccggggcagctcctggagggcccgcgatcgagatgaggcctccgagccgcccagaagggactccgaagtgcgcgtagcgaaccccgcggttcccacgcaccccctagggtgggtgggcgagctgggcgcctccgcgctgtagctgttggaaacgcggttggcggcagggcacagcttgcgggggatccacgtccaggtcccagcggaggggccaagccgcgggtttctaagggcctggctgcgtttctgcggtcacaatcaggggtctttgctttcacccatcccctcctggagaaataacacagcttctaatgccttgtcttcagttgggaacctttcttgggaaagctccgcctgccgttgcccttgtacctaccttctcctctctcccttttcctgaagtgactgcccgtctcttgcatcgtgttgtgaatgctttgagatcttggcgctgcagcggcatcggagattggatccagcccatggagtggtccccagagtccatttgtctgtccccagggcagggacctcggaagagcaagggggaggagctgacctagccggctgatctttgtggcttagacaaaatttagagcttacttgtccttccaaccatgctctcagatcaggtagacaagattagccttacacttaggagcgttct

SEQ ID NO: 16258 - DNA, 1487 bp, Artificial sequence
  DNA replication origin
caggatcccaaggcagaagaatttttcttagtacagaacaaaatgaaaagtctcccatgtctacttctccctacacagacacggcaaccatccgatttctcaatcttttccccacctttcccctctttctattccgcaaaaccgccattgtcatcatggcccgttctcaatgagctgttgggtacacctcccagacggggtggtggccaggcagaggggctcctcacttcccagcaggggcggccgggcagaggcgcccctcacctcccagacggggcggctggccgggcggggggctgacccccccacctccctcctggatggggcagctggccgggcggggggctgacccccccacctccctgccagatggggcggctggctgggcggggggctgaccccccgacttccctcccggatggggcggctggcctggcgggggctgacccccacctccctcccggacggggtggctgccgggcagagacgctcctcacttcccagacggggtggctgccggatggaggggctcctcacttctcagatggggcggctgccgggcagagggactcctcacttctcagacggggcggccgggcagagacactcctcacctcccagatggggtcgcggccgggcagaggcgctcctcacatcccagacggggcggcgggtcagaggcgctcctcacatcccagacggggcagcggggcagaggcgctccccacatctcagacgatgggcggcggggcagagacgctcctcacttcctagatgggatggcggcggggaagaggcgctcctcacttcctagatgggatggcagccaggcagagacgctcctcactttccagactgggcagccaggcagaggggctcctcacatcccagaggatgggcggccaggcagagacgctcctcacttcccagacggggtggcggccgggcagaggctgcaatctcggctctttgggaggccaaggcaggcggctgggaggtggatgttgtagcgagccgagatcacgccactgcactccagcctgggcaccattgagcactgagcgaacgagactccgtctgcaatcccggcacctcgggaggccgaggctggcggatcactggcggttaggagctggagaccagcccggccaacacagcgaaaccccgtctccaccaaaaaaatacgaaaaccagtcaggcgtggcggcgtgcgcctgcaatcgcaggcactgggcaggctgaggcaggagaatcaggcagggaggttgcagtgagcccagatggcagcagtacagtccagcttcggctcggcatcagagggagaccgtggaaagagagggagagggagaccgtggggagagagagggagagggagagggagagggcgaggttttcttctcccttctccttgtcgccgtgtgttccggtgtcatggcaccggccaggtggaaaccacatctgcggatcattgggaatgttggccatgc

SEQ ID NO: 16259 - DNA, 950 bp, Artificial sequence
  DNA replication origin
ctgggatgtgaggagcgcctctgacccgccgccccgtctgggatgtgaggagcgcctctgcccggccgcgaccccatctgggaggtgaggagtgtctctgcccggccgccccgtctgagaagtgaggagtccctctgcccggcagccgccccatctgagaagtgaggagcccctccatccggcagccaccccgtctgggaagtgaggagcgtctctgcccggcagccaccccgtccgggagggaggtgggggtcagcccccgccaggccagccgccccatccgggagggaagtcggggggtcagccccccgcccagccagccgccccatctggcagggaggtgggggggtcagccccccgcccggccagctgccccatccaggagggaggtgggggggtcagccccccgcccggccagccgccccgtctgggaggtgaggggcgcctctgcccggccgcccctgctgggaagtgaggagcccctctgcctggccaccaccccgtctgggaggtgtacccaacagctcattgagaacgggccatgatgacaatggcggttttgcggaatagaaagaggggaaaggtggggaaaagattgagaaatcggatggttgccgtgtctgtgtagggagaagtagacatgggagacttttcattttgttctgtactaagaaaaattcttctgccttgggatcctgttgatctgtgaccttacccccaaccctgtgctctctgaaacatgtgctgtgtccactcagggttaaatggattaagggcggtgcaagatgtgctttcttaaacagatgcttgaaggcagcatgctccttaagagtcattaccactccctaatcttaagtacccagggacacaaacactgcggaaggccgcagggtcctctgcctaggaaaaccagagacctttgttcacttgtttatctgctgaccttccct

SEQ ID NO: 16260 - DNA, 1200 bp, Artificial sequence
  DNA replication origin
cggggtggtggccgggcagaggggctcctcacttcccagtaggggcggccgggcagaggcgcccctcacctcccagacggggcggctggccgggcgggaggctgacgtcccgacctccctcccggacggggcggctggcctggcggggggctgaacccacctccctccctgacggggcggctggccgggcggggggctgaccccccacctccctcccggacggggccgctggccgggcagaggggctcctcacttcccagtaggggtggccaggcagaggcgcccctcacctcccggacggggcggctggccgggcgggaggctgacgccccgacctccctcccggacggggcggctggcctggcggggggctgaccccccccacctccctccctgacggggcggctggcggggcgtggggctgacccccccacctccctcccggatggggctgctggcctggcggggggctgaccccccccacctctctcccggacggggtggctgccgggcggagacgctcctcacttcccagacggggtggctgccgggcggagaggctcctcatttctcagacggggcagctgccgggtggagggtctcctcacttctcagacggggtggttgccgggcagagggtctcctcacttctcagacggggcggcggggcagagatgctcctcacctcccagacggggtcgtggccgggcagaggtgctcctcacatcccagacggggcggcggggcagaggcgctccccacatctcagacgatgggcggccgggcagagacgctcctcacttcctagatgtgatggcggccggaaagaggcgctcctcacctcctagatgggatggcggccggtcggagacgctcctcacctcccagactgggcagccaggcagaggggctccccacatcccagacgatgggtggccaagcagagacgctcctcacttcccagacggggtggcggctgggcagaggctgcaatctcagcactttgggaggccaaggcaggcggctgggaggtggaggttgtagcgagccgggaccacgccactgcactccagcctgggcaccaccgagcactgagtgaacgagactccgcctgcaatcccggcacgtcaggaggccgaggccggcggatcacttgcggttaggggctggagaccggcctggccaacacagggaaacccc

SEQ ID NO: 16261 - DNA, 913 bp, Artificial sequence
  DNA replication origin
ccccgccaggccagcagccccatccgggagggaggtgggggggtcagccccacgccccgccagccgccccgtcagggagggaggtggggggggtcagccccccgccaggccagccgccccgtccgggagggaggtcggggcgtcagcctcccgcccggccagccgccccgtccgggaggtgaggggcgcctctgcctggccacccctactgggaagtgaggagcccctctgcccggccagcggccccgtccgggagggaggtggggggtcagccccccgcccggccagccgccccgtcagggagggaggtgggttcagccccccgccaggccagccgccccgtccgggagggaggtcgggacgtcagcctcccgcccggccagccgccccgtctgggaggtgaggggcgcctctgcccggccgcccctactgggaagtgaggagcccctctgcccggccaccaccccgtctgggaggtgtgcccaacagctcattgagaacgggccaggatgacaatggcggctttgtggaatagaaaggcgggaaaggtggggaaaagattgagaaatcggatggttgccgtgtctgtgtagaaagaagtagacatgggagacttttcattttgttctgtactaagaaaacttctgccttgggatcctgttgatctgtgaccttacccccaaccctgtgctctctgaaacatgtgctgtgtccactcagggttaaacggattaagggcggtgcaagatgtgctttgttaaacagatgcttgaaggcagcatgctcattaagagtcatcaccactccctaatctcaagtacccagggacacaaacactgcggaaggccgcagggtcctctgcctaggaaaaccagagacctttgttcacttgtttatctgctgaccttccctc

SEQ ID NO: 16262 - DNA, 1206 bp, Artificial sequence
  DNA replication origin
acctccctcccggacggggcggctggccaggcgggggctgccccccacctccctccgggacggggcggctggctgggtgggggctgcccccaacctccctcccagacggggcggctggccgggcgggggctgccccccacctccctccgggacggggcggctggccgggcgggggctgcccccaacctccctcctggatggggcggctggccgggcgggggctgccccccacctccctcccggacagggaggctggctggacggggcggctgccgggcagagacgctcctcacctcccagacagggcagctgctgggcggaggggctcctcacctcccagacggggcggctgccgggcggagggcctcctcacttctcagacggggcggctgctgggcggaggggctcctcacttctcagaccgggcggctgggcggagacgctcctcacctcccagatcgggtggcggccgggcagaggcgctcctcacatcccagacggggcggcggggcagaggcgttccccacatctcagacaatgggcggccgggcagagacgctcctcacttcctagacgagatggcggccaggaagagacgctccgcacttcccagactgggcagccaggcagaggggctcctcacatcccagacgatgggcagccaggcagagacgctcttcacttgccagacggggtggcggccgggtacaggctgcaatctcggcactttgggaggccaaggcaggcggctgggaggtggaggttgtagcaagccgagatcacgccactgcactccagcctgggcaacattgagcactgagtgaaggagactccgtctgcaatcccggcacctcgggaggctgaggctggcagatcactcgcagttaggagctggagaccagcctggccaacacagcgaaaccccgtctccaccaaaaaaatatgaaaaccagtcaggcgtggcggcgcgcacccgcaatcccaggcactcggcaggctgaggcaggagaatcaggcagggaggttgcagtgagccgagatggcggcagtacagtccagctttggctcggcatcagagggagactgtggagagagagggagagggagaccgtggggagagggggagagggagagagggagagggagctaacgtctttgtttagtggacttttatttatgtgcgaatgtaactattgcctgtaggaa

SEQ ID NO: 16263 - DNA, 1133 bp, Artificial sequence
  DNA replication origin
gaagcagggatgctgcccggccagaaatcgcccgtctgcccgccccatctttctccgggctttttccaccgagcttaagccccaaaagggagggggtgcatgggagagaaaaaggcagggattccgagaagcgagcggcccccttccgcccacgcaaggcctcccccgcaacctgctgcccagcggctgcagcctcggccccctcggctcccgggcgggccgcgtccacttccccgctacagccaggagcgacgccaccgaggggggggcggggcgagtccccgtcgcccgctcacctgccggggccgcgggcgccgacgctgcggttgctggccggtcgcctctacccgcgtccacgcaagccacctgcgccaccagctgccgcagaggcgtctcaacggctcggaatcgcaaccgcgccgccgctgccgccgccgtagctgcgctgctcccgcgcggctcccgctcggcgcccgctagcactggggcgcgaccaactgtttaccgagagaggggggatgttgcagcacccggcgaagctgtgtggctccgaagcggattttctggaaaccctacgtccccaagttcgctttcatgtaacaggtgcatgcagatggagaggaagacgcaagcgaagaagaaaggactgggcgaaaatagctcggcctgccgcaagttccccctgcggtttgcggagtggtcgggcccggcccgcccctgctggcttctctgcgtgtgtgtatttgtatgtgtactgtatgtaaaaggcggggagggaggaaatgattgttgtggacgcggttttgggggcgggtatccgggcctctctcccttggctgcgtgttagggagaaagtggcagtaaagattcatgttcttgtatcgtttccagggtggggaggtttgaatgctgcttttgcgcggtttgcatcatccaaaaaagaggagctgtacgaaaaccctaagatgaaattggagcatgcggcggttgcagggtgtgctgcatctaggcctcttgcacctcgctgaatgggcctcgtagtctccttttccttgaaattgtagtatgagagagccctatttcatttcttttgcatttgcatcaccaagaactattaagaaaaatgcaaccct

SEQ ID NO: 16264 - DNA, 1516 bp, Artificial sequence
  DNA replication origin
aaatcagtcacctgagcgcagaggggccgcggcgagggcgcgcgcgggcgggcggggaggcggaggcggcgagagcggaggcccggaggaactcggagggggagggagagaaaggccgagacggagggagccagcggcggccgaggggctggtccaggcgcggccgctaagaggagaccaagaggcgggggctgcacttgacaaccagcatgccgagatggtaagaagtttccaccctccttcctcttttattctagacttcctcagaaatgacccccgcgcccgagcgccaccggggccgcccgggggccgtgtccgccctccggcccgcggcgtgaggggcaaggggcgctgaggagggcgggccggggaccagaaccccggtccgacctgatccccgctgcgctcccagtggcctcccctaaacttggccccaagtttctgaggcgagctctaggtgggagggtgcacgtgagagggggcttctcaaggtcggccccgctcgcggcttccgcgcgaaggtgagcggctggctaggggaggctccagggcgttggggacgggctggggggacgaggtggaggggagtgggggatgaatggagcgctggcaggagctcggggaagagaggaaggcggctgggacctacgggaacttttacaacttgccgccgagtgagggaccggcggctgggcgtgggtgccgggtgcgctggggcgcagccgcccgggcccggcacgttgactcttcctctccccttgtcttcacattcggaatcttcccgtggtaaatggagatgggaggaaatgctcccgcaggctttacggagaaggtgcagaacgcagggcaggaaaatcaaccttgcagagacggctcttttcgaagtgcaattctataggagccgatttgttttacttgcacgttgactggagggtgggatttggggcctggggagggagcagaataaaaaattatatatgctgaaaaaccctaggtgaaatctcctgtgaagtgagtttaaggttgaaaaaaagttccaagtgcaagtggtggaggagatgggctggctttgccaagcgagactccagcacagcccctctacgagaagcgacttctttgcagcgaggaagcgtgcaattagttcgcctggtgatgagccgctctgtccgctttcggggaagtgatttgttagaaatggggcttgaccactcccttctttttagtttgcttcctcccagcgtcgctattgttacccccacttggggatctgacatggtgtattccgtatatagagggaacatatgagaatacaggtgagatagcgggttggcattttttcctcttccctgctccctaatgtgacatctcttgtttcagtgatcaaagtcacaactggagtgtaggagatgggactgtcaaatgcaggggcgcgtacacacacacacacacacaaaagcaagagcccaggactgtggttacagtaacgctgacagaaattaaagtggttttgaaagca

SEQ ID NO: 16265 - DNA, 987 bp, Artificial sequence
  DNA replication origin
acatctgggaagtgaggagcgtctctgcgcggccgcccatcgtctgagatgtggggagcacctctgccctgccgccccgtccgggatgtgaggagcgtctctgcccggccgccccgtctgagaagtgaggagagcctctgcctggcaaccgccccgtctgagaagtgaggagcccctccgcccagcagccaccccgtctgggaagtgaggagtgtctcctcccggcccacccggccagccgccccgtccgggagggaggtggggggatcagccccccgcccggccagccaccccgtccggcaggtgaggggcgcctctgcccggccgcccctactgggaagtgaggagcccctctgcccggccagccgccccgtccgagagggaggtgggggggtcagccccccgcccggccagccgccccgtccgggaggtgaggggcgcctctgcccggccgcccctactgggatgtgaggagcccctctgcccggccaccaccccgtctgggaggtgtgcccaacagctcattgagaaccggctatgatgacagtggcggttttgtggaatagaaaggcgggaaaggtggggaaaagattgagaaatcggatggttgccgtgtctgtgtagaaagaagtagacatgggagacttttcattttgttctgtactaagaaaaattcttctgccttgggatcctgttgatcggtgaccttacccccaaccctgtgctctctgaaacatgtgctgtgtccactcagggttaaatggattaagggcggtgcaagatgtgctttgttaaacagatgcttgaaggcagcatgctccttaagagtcatcaccactccctaatctcaagtacccagggacacaaacactgcggaaggccgcagggtcctctgcctaggaaaaccggagacctttgttcacttgtttatctgctgaccttccgtccactcttgtcctctgaccctgccaaatccccctctgcgag

SEQ ID NO: 16266 - DNA, 1291 bp, Artificial sequence
  DNA replication origin
caaggcagaagaatttttcttagtacagaacaaaatgaaaagtctcccatgtctacttctttctacacagacacggcaaccatccgatttctcaatcttttccccacctttcccgcctttctattccacaaaaccgccactgtcatcatagccggttctcaatgagctgttgggcacacctcccagacggggtggtggccgggcagaggggctcctcacatcccagtaggggcggccgggcagaggcgcccctcacctcccggacggggcggctggccgggcggggggctgacccccccacctccctctcggacggggcggctggccgggcagaggggctcctcacttcccagtaggggcggccgggcagaggcgcccctcacctgccggacggggtggctggccgggcggggggctgatccccccacctccctcccggacggggcggctggccgggtgggccgggaggagacactcctcacttcccagacggggtggctgctgggcggaggggctcctcacttctcagacggggcggttgccaggcagaggctctcctcacttctcagacggggcggccgggcagagacgctcctcacatcccggacggggcggcagggcagaggtgctccccacatctcagacgatgggcggccgcgcagagacgctcctcacttcccagatgtgatggcggccgggaagaggcgctcctcacttcctagataggatggcggccgggcagagacgctcctcactttccagactgggcagccaggcagaggggctcctcacatcccagacgctgggcggccaggcggagacgctcctcacttcccatacggggtggcggccgggcagaggctgcaatctcggcactttgggaggccaaggcaggcagctgggaggtggaggttgtagcgagccgagatcacgccactgcactccagcctgggcaccattgagcactgagtgaacgagactccgtctgcaatcccggcacctcgggaggccgaggctggcggatcactcgcggttaagagctggagaccagcccagccaacacagcgaatccccgtctccaccaaaaaaatacgaaaaccagtcaggcgtggcggtgcgcgcctgcaatcgcaggcacttggcaagctgaggcaggagaatcaggcagggaggttgcagtgagcccagatggcagcagtactgtccagcttcggcttggcatcagagggagactgtggaaagagagggagagggagaccgtggggagagggagagggagagggagagcgtc

SEQ ID NO: 16267 - DNA, 1345 bp, Artificial sequence
  DNA replication origin
gcgaaggggggagggcggggaggaggggggagggcggggaggagggaggagggcggagggagtggggggaggggggagtggggagtggggggagggcgggggggagtggggggagggcgggggaggctcaggcatggtgggctgcaggtccccagccctgccgcacagggaggcagctaaggcccggtgagaaattgagagcagcgccggtgggccaacactgctgggggacctggtgcactgtccgcggctgctggcctgggtgctaagcccctcactgccgggctggcggggctggctggccgctctgagtgcgggccgccaagcccacgcccacccggaactctagctggcccgcaggcgctgcacgcagccccagttcccgcccacgcctgtccctccacacctccctgcaagctgagggagccggctctggccttggccagccaagaaggggactcccaaggtgcagcggcgggctgaagggctgctcaagcgccgccagagtgggcgccgaggccaaggtggcgcggagagcgagccacgactgcgagggctgccagcacactggcacctctcagtaggtcgatcactcaccatttcccttggctggtggtaggagctcgcattactctgtgtggctcccaggtgggccgtcgcaccaccctgcttttccttgctctctgtgggttgtgccagctgcctagtcagtcccaatgagagaacttgcatacctcagttgccggtgcaggattcactcattgtttttgttcttcttggtggggggcctccgaccacagctgtttctagtcggccatcttggcccgccctgtttttctttacttattttcaaatgaggaaagatctggacaaattcagtgctttccgctggttcagatgtgtgagttgtgcgagctttgcttgctttttgtatttgcaacattggtgtacatatcatcacttgtactttcccgagggttgtgtggggcgatagaaataaacatatctacatagtataagagtatccttcaattccacttattgagagcatgcccagaaaataccatgaggtggtagagaaaaatgtgctttttcccaggttgatttttaatttgcaaagagtaataatagtatgagcatctccctactcttcagtgagagagagagagagagagagagagagagtgtgtgtgtgtgtgtgtgtgtgtgtgtgtgtgtgtgtgtgttagatggagtctggctctgtcacccaggttggagtggggtggtgcgatctcggctcaggatcaaatgattcctctgcctcagcctcctgagtagctggaactacagatgtatgctacca

SEQ ID NO: 16268 - DNA, 1443 bp, Artificial sequence
  DNA replication origin
ctatccatcccaggcccttccactttgtagatcaattgctctatcttttggcagcttcaacaaagccctgtcttatgaaaatgctttattgttcagatcagggacctggtagtaaaaattaactataaaatacttttttttctattatgcaagtaatgggtagcctttttaaaaattggaaacatagagaaaaaagtttattcctaacaaccggagcctcagtggattaaaattactcaggtttctcactgatgctacatgcccattgaacgtcaggtggggactctgcactgctttagtctcactctggatactggctgacagaccacagctttctagaatattgcggccgaggaaaagaaagctttgcggcatctcatacatctcatattgctgctgcagaagtgacagtcacttttcctcttaaacctctagtcaaaacttgtaaccatgcctccacttaacaagaggtttggaaagtgcaattctgccatgtagggaaaggtatatgaacagtggtaagggctaccacactggagaatagctcctttcatctgcctccctttgcagcctgcgtccctagtccatgcgctctactgctccagtgcccaccactgcttgactctgcctttgtgtgtgtcagttcacattatcaagaaggaccatgactggtagctctacggatggaggacccttttgtagcaggtgttcaccctgtgcccaagccgcagtgcctagaagagtggggatgggtctgtggctcctatcaggctgcaggagttgcggagacagaaaaagtatttctaggactcccatttggccttgcagtctctacacatccttggcaatttctcccatcttggcttctccttcttatcactttggtccacatacggggacagcgtctaagttctttctgaccacctcctcagtcctagaaaaaccagacttggttaagtaccagagcacagaaggcatttagtgctgctctgctcccaagtcatctattagtttcactttagccagccatacctccttggttacatatgaagcatctgtatataacttagtatcatgctttttcacattatattttgatttttatcggaccggaaaccctaaatccacaagcataacaacaagatcacatttgggctttttcatttctgtaaccagaggattgaacgctagttttgtagtaagacttcaattctatttatccgtccaggcttaagggttcctgttcttctttttaagtcattaaattgtatcagacaagggggaaaacgcgtgtgtgactttccctaaggtaagatgggcttaagggatattgaaaccagggcagagaaatgttttctgtgacccaccagtcagggcaaggcatagaaggagcaatgacttattcattagcccagatagaaggccagtctttttcaggctgcg

SEQ ID NO: 16269 - DNA, 2081 bp, Artificial sequence
  DNA replication origin
agcgcgcagccccgctcgggtttcccgaagcgcacaccgctgtcgctgccggggcggctggatgtctgcgctccccgcctccgctgggctgacacgggaggggaggagcaggagctggaggggtgttgggggtggggggagcgcgaaccatctcgagccaagacaagcagcacattcacaaataacgcccccacccccagcgcacgcgctcccattcaaagcagacccgctccgcggccgcactgaagctccaaagccgcgccgcctgccccagcgcagctctgtctcgtggggcgcacgcccgagcccgcctgccggccgccgccgcggagccaccgcaatcagcgcaggaggcggccacctcttcgagggaggggtctcgcctgagactccccttggtccccgccatggggaccatggcacgactggaggcgccccagtgccccgggttcctggcccgcctcctcggtggcacctggtgcctgctctgtatcgccggacaggtagggtagcctgtgcgtcttgcgtccctcccggggactctgcttctaaagcctgtgctacagcgaaaagcgctacagcgtgggaggtgctctcttccgcgaaggtccatcctggggctgcgctgccgcccaggctggggacaagtggcgcggggttggggctaaggcgtaccctggggtcgatcgggtcgatctctgcgtttaggcttgacccagcttcctgggaccctgtcctggcttttcgcccttacctgggtcctgcttccagccaggcagagccggggcgagaaggcggcgcctgagctggggagctgtcatccccaacagtcctctaccccccaccctttccgacagtccttcgcggagccccctctctcgttccaggctgaggcttgggcggcgccggggacactcgggtgctgggacactcctccacacttccgcccttctgcggacctagtgaacttctgacactgtcaccctagggccgcccgcagccgagtgtcgggggcgcagcgttgtaatgtgtgcggacgccggaccaggtgggctccctggtgcctccgcggtctagaggtggctctggtgggtgggtgcccgaggattggccctgaccataccccctccgaatcctcccagggtcttctccagggccacacggggtgtataaggaactggggacttctccagggtgggaaattcaggccctgaggcggcgcggaagggccctgggagagggtgtctgattaattcagtttgcctggtagtggtttattatcacaagacttggagaaagctgcttagggaagagggcaggggtccagggtcgagtcaaactcagaatgcctgcggttccttggttttcacactttccagactcaggttaactattgcttaaaacccacgaattgggcagtttgtacataatttagcctccatagatttgcctttcacaggattacttgggtaattctgggaaaatacccaaatactcttggccggaattaccgccagatagcctccctttcctctgttttgcttatggagacttgtccaaatagggggatttccttccctcgctttttcttaacgttttgcaacttgttttccgatctctattttaaaattttgattgcagtggtgcacttctagaggctgagagaggaccgagaatgttgtctcagaagggcccggagcagcagggattactctcatcagtagtagaaattttcagcagggaacacctgcttagattggaatatgacaaacagttggaaaagcttgtattaattatcagcaagttgtattcccaccatgcttcgttccttgtcagggcttcccagccatggctgcacagtagaattacctaggggagctctagaaatttcctgcgttagggccacaccccagctggattacatcagaatcctggagggagaggggaggctgggacatcagaaattctaaagctctcgggtaattctgttctgcagctgggttaaaacccaatgtgcaaaaatgacctgccttaatgtgactttttttttttttgaaacggagtttcactctcgttgccca

SEQ ID NO: 16270 - DNA, 1731 bp, Artificial sequence
  DNA replication origin
aggcagggctacctccaactcccagcctccccaggccgggcccccgcccggctcccgacaggctcctctccccgtggcggggcccctcgcccaggcagcacaccctctcaacccgaccgggcccccaccactctaggagggccggcgttgggggagggcgccgggacgtgcccgagggtgacactcgggcttgggacagggcgtgctgccgcgggtcacgtgctgcggaggcttggggaggggcggcgaggcggggtttatagcccgggcgcccgcgggccccacgctttgaccgggtcgtggcagccggagtcgtcttcgggacgcgcctgctcttcgcctttcgctgcagtccgtcggtgagtgcgcgcccagtgggtgccccagcgaaccggtcccgggcccccagcggcgcccagttggggtggggggctccccggggccttgggaccgctgctctgctccccgcggggctcaaaggtggacgggacgcgggggtgatggtccgagaccccccgctcgcctcgcggcttccaggtcctggctgggtaggggcggtctgctgaacccgcgctttcgacccttgcctttgtgcgttgaggcttctttcctgccaacagatttagggcgattgctatcgaatgtcccttggcctgcttgggtggttgtgggaaaacaatatttgtcgaagggacattatcgaaagggaaacgcgttagaaaaccgcattttttttttgacggagtctcgctctgtcgcccaggctggagtgcagtgacgccatctaggctcactgcaacctccgcctcccgggttcaagcgattctcctgcctcagcctccagagcagctgggataacaggcgcccgccaccacgcccggctaatttttgtatttttagaagagacggggtttcaccacgttggtcaggctggtcttgaactcctgacatcaagcagtccacccccctcggcctcccaaagtgctgggattacaggcgtgagccaccgcgtccggcttggctagcatttttgttaacagatactcggagaaacaagagaagtatgtcaacaactttacttctccctcctgagtattgcaagtttacacataagctctgaaactttgcctcaaaagagggagtggggttgtgtgggtgtgggtctttcaggagggggacctggagagctggagagaggaaagaagtgcagaagactacagggagctcaccctgcatttttctctacttgtaatcagcatttgcttgggttggggaatgaatttgggagagtcttatcccggtgttctgaaataagtctcttttctgcagatttctttctccaggaagaaaaatggcatccgttgcagttgatccacaaccggtatgaattttgagtagcctttgtctactttctctccttttgtgttttgagagattaataagcataccctccctactttgattgcagagtgtggtgactcgggtggtcaacctgcccttggtgagctccacgtatgacctcatgtcctcagcctatctcagtacaaaggaccagtatccctacctgaagtctgtgtgtgagatggcagagaacggtgtgaagaccatcacctccgtggccatgaccagtgctctgcccatcatccagaagctagagccgcaaagtgagttctgatttttcaagatgcaagtcaagggactggtcagtggcgagcccctgagctcacagca

SEQ ID NO: 16271 - DNA, 917 bp, Artificial sequence
  DNA replication origin
cgcctgcgccgcctcgcgggcagggtctccgaggggcgccgcctacagccaggggcgatggccggagcgctggcccgcgcgggtgcctccgcgctgtgagccgtcggacagtgcgggcggcgcgtcgcctaggagctgcccgcggcgcagccgtcccaagacctgaccgccatgtttctgttccctttttctcccccgccttccgcccctttccacaaaacagcactttcttttccccctccctctccctttcctcctgcgggggcgggtggaaaagggcggggggtgggagggagaagacgcagggaggaggggggcggtgcggtgctcaggcccctcccccggggagggccgaggccctgcagccaccgctcccctcccccgcccgacccctgtgcgacccccgcggggcgcggggtctgagccttgcgggcctccgatcccctcctcagcgttcgcgcggccgagcctgcagaaacagagctggggagaaagcgctctggaggccgctgtgcaccccttcctgcagggctcagactggcggtgtgatgtgggtttattgccttggcctgaggcaggtggcggctgcttctctcggagttttcaaagacagggaaagtgatgccgagtggctgaaggtcactgaggacagtgccgggagatacgtgaagattccttcccagggaaggaatctggaattcccacgcatgagtagagggctctagagagacccgcgcgctggcccttcccgaaaccccttggctccagtgcaccatgtgagtccctggccgcgctcggtgtctctccttcggcccagatttggggatgggaattcctaatggagaaatcgctcatttgcatagtcagtaccctcacgcctcctaagtgtagcctcattatcgacacagacgcctgca

SEQ ID NO: 16272 - DNA, 1240 bp, Artificial sequence
  DNA replication origin
gaggcggcgcaggcgcagaccggactgaggcggcggcggccgctggagctagtcccccgccctgccctgccgagcgcgcccagtccgcgaatccggtgctttcttgccccaggaagaagccgtgtcggggctgcgctgacagaggagcaggcagcaggtgaggctgcggcgcggggcctttggcggaggaagcctgcgccgtgccctcgcggggcctgcgctgcaaggctgggagggcgcgggacaggtagagcccggagggctgagttccgagtggctggcccgcggggggtcgccgaggaggcggagagtggccgcggctggcgttcgtggcctagtttctccgcggtttccgggggcggggagtccccggatcctgcgggatgcagtcggggaaaggctgcccctgaagagcctccccgcgtcgcccgccgggcccatgagaatcgtttgcgtacaagcgcgaggggtctgggcccgggggaccgccggggcgacggccgctttggtgggggccggggtgcggagggagcaggatcggggcttcccagagggggtcgaggctgagagagcggagagctagagccaggggtggcgggcagtctcgagaggagtcgggggactgagaagtgtcggggacaacggggaggagggggacctgggcaggtgtctctggtgaattgaagacatttccttctctgtcttacggtggccgatcctcagggcttctttgtcggggatgactttctaggagggcagtatccttttaactctggagtgactaaacacaaaaccaaggaatgaagtcctaaggctgactcctgtaaagagctgtaactttttctgttttaagaatgctgtcacgtctttttttttttcctccccttttctgcttgatagaccttttccctctcgaagaccgtcttttatctgcactaataaggaattacccagtttttaaatagtaccgcctccttctccccttatgtatgtttgtcacacgggaaaatttagggtagttaccgcgggtacttgtgcaaatttgagggaaagtgtcatttccagtagtgaaccctcagctgtctctttgtgcctccgagatactgtcaagcgttgtagcctgagaaattgacccactgagcctgcttaattgtgtgcaaacccgtgttgaggcgttcttcctaggccctaatttacgtaggaataggttttcccttccggtctgtgtataatgagaggg

SEQ ID NO: 16273 - DNA, 929 bp, Artificial sequence
  DNA replication origin
gtcaagagttcgagaccagcctgaccaacatagtgaaaccccatctccactaaaaatataaaattagatggacgtggtggcacatgcctgtaatcccgactacttaggaggctgaggcaggagaatcacttgaacccggggtacgggggttgcagtgagccgagatcacatcattgcactccagcctgggccacaagagcgaaattctgtctcaaaaaaaaaggggcaggggaagggaggggaggggaggagaggggggaggggaggagaggagggggaggggaggggaggagggggaggggaggagagggggaggggagggcaggggaggggaggggaggagaggggggaggggagggcaggggaagggagagtaggggaggggaggggaggagaagggggaggggaggggagagggaggggaggggaggggaaggaaagagaaaacctaactagttcctatatctctaaggactgctagcaaccactagaaataggaagaggctgggcgcagtggctcacatctgtaatctcagcactttgggaggccaaggccggcagatcacctgagatcaggagttcgagaccagcctgaccaacatggagaaacactgtctctactaaaaatacaatattagccgggcatggtggtgcatgcctgtaatcccagctactcggcaggctgaggcaggagaatcgcttgaatccaggaggcacaggttgcggtgagctgagatcacgccattgcactccagcctgggcaacacgagtgaaactctatctcaaaaaaaaaaaaaaaagaaagaaagaaacagaggaagagtcaaggaggggtcttccctagagcctacagtgggagcacagctctcctgacaccctgacctcatatttctactttccagaactgtcagaaaataaatttaagctgt

SEQ ID NO: 16274 - DNA, 837 bp, Artificial sequence
  DNA replication origin
tctgccccgccgccctgtctgggatgtgaggagcgcctctgcccggccgccaccccgtctgggaggtgaggagcgtctctgcccggccgccccgtctgagaagtgaggagaccctccgcccggcagccgccccgtctgagaagtgaggagcgtctccgcccggcagccaccccgtccgggagggaggtgggggggtcagccccctgcccggccagccgccccgtcctggaggaggtcagccccctacccggccagccgccccgtccgggaggtgaggggcacctctgcccgaccgcccctactgggaagtgaggagcccctctgcccggccagccgccccgtccgggaaggaggtgggggggtcagccccccgcccggccagccgccccatccgggaggtgaggggtgcctctgcccggccgcccctactgggaagtgaggagcccctctgcccggccaccaccccatctgggaggtgtgcccaacagctcattgagaacgggccaggatgacaatggtggctttgtggaatagaaagggaggaaaggtggggaaaagattgagaaatcggatggttgccgtgtctgtgtagaaagaggtagacatgggagacttttcattttgttctgtactaagaaaaattcttctgccttgggatcctgttgatctgtgaccttacccccaaccctgtgctctctgaaacatgtgctgtgtccactcagagttaaatggattaagggcggtgcaagatgtgctttgttaaacagatgcttgaaggcagcatgctcattaagagtcatcaccactccctaatctcaagtacccagggacccaaac

SEQ ID NO: 16275 - DNA, 1560 bp, Artificial sequence
  DNA replication origin
ttcttagtacagaacaaaatgaaaagtctcccatgtctacctctttctacacagacacggcaaccatccgatttctcaatcttttccccacctttcctccctttctattccacaaagccaccattgtcatcctggcccgttctcaatgagctgttgggcacacctcccagatggggtggtggccgggcagaggggctcctcacttcccagtaggggcggccgggcagaggcacccctcacctcccggatggggcggctggccgggcggggggctgacccccccacctccttcccggacggggcggctggccgggcagaggggctcctcacttcccagtaggggcggtcgggcagaggtgcccctcacctcccggacggggcggctggccgggtagggggctgacctcctccaggacggggcggctggccgggcagggggctgacccccccacctccctcccggacggggtggctgccgggcggagacgctcctcacttctcagacggggcggctgccgggcggagggtctcctcacttctcagacggggcggccgggcagagacgctcctcacctcccagacggggtggcggccgggcagaggcgctcctcacatcccagacagggcggcggggcagaggcgctccccacatcccagatgatgggcggccgggcagagacgctcctcacttcctagatgtgatggcggccgggaagaggcgctcctcacttcccagatggaatggcagccgggcagagatgctcctcactttccagactgggcagccaggcagaggggctcctcacatcccagacgatggccggccaggcagagacgctcctcacttcccagacggggtggcggccgggcagaggctgcaatctcggcactttgggaggccaaggcaggcagctgggaggtggaggttgtagcgagccgagatcacgccactgcactccagcctgggcgccattgagcactgagtgaaccagactccgtctgcaatcccggcacctcaggaggccgaggctggcggatcactcgcggttaggagctggagaccagcctggccaacacagcgaaaccccgtctccaccaaaaaaatacgaaaaccagtcaggtgtggcggtgcgcgcctgcaattgcaggcactccgcaggctgaggcaggagaatcaggcagggaggttgcagtgagccgagatggcagcagtatagtccagcttcggctcggcatgagagggagaccctctctttttttttttaagacgaagtctcgctctgtcgccgtgagtggctttttgaaccttggtacttagcgcagaatttcttttcagcttgtatttctggcaatgcctgtaccttgctaacattaaacaaacaaacaaacaagaactccttttctaatggatttggttttgctttcatggattcaggggtaggttcaaggtggtggtcagtgtcctgtctgcggttacgacgtgcctggcatttgtcaagcctgccatcaacaacatctctctgatgaccctgggagttccttgcactgcactgctcatcg

SEQ ID NO: 16276 - DNA, 1303 bp, Artificial sequence
  DNA replication origin
caagcacctacataataacatcattgctgtgctggtactatacaatggtggccaaaccagatctgatcactcttcatagctgcaagagaaccatcaagtaaatagaactttgttggtcactacaacagagccctttgacagggcatggattaagaaaatctacatggctagagacatatagttccctagcagaaaaattataaaggcaagtactcattcaattcatttagcaaatatgtactggggcccacttgtgccagacactagggatagagccaagcctgccctgagtcctgctctgttggaggaataagggtagagacaggcagcatacaacaaatacatacgttcacggggacaagtgttaaggagaatgcagagcagggagagggagagtgagaactcggattcactttcattgttttgcttctgatattttcaaaaggttgactgagtaaggcctctgatcaggtgacatgtgaaggctgacttgaaggaggggagaccaggagccaactggatatctagaaaaagggggaacatgtgtaagggccctgaggcaggagtgtgcttgggatttggaaggagctgctaggcagtcagagaagcagaacaagggaaatgacatgtgagagaaaagagagaagggtagagaaatgaggagacaggaaggaggggagacgagggggcaaagcaggggaggaagggaggaaggtgagagacgggcagagagagatgagggagaggaaggaggggaaggaggggaaacgagggcagagaagagggaaggaggggtgagagaagagaagagaggataggaggaagagaggaggcgggaggggaaaggcggaaggaggtagagtgggaagttgcaggggttctggggccgctgtacgctctagggcttttgctcttggtgagatggttttgagcagaggtggggtgtgatctgacttacattttaggggatccaggattcttctatggacaagtttggggcatgccttttctggggaaagattcagggccactgtgaaataaattggactcatgggtcagcagacagcccttcagaaagagggaaaaggggaacttccatctcttccctataaattgagaactcaagaagactggacaaagttactagggatgggaagaagaaggtgaacacatttgactctaactgggctctactatggagttacataatgtggtcctgggaaaatagatttccccaaatcgatctcatctgagaagcatgacacttgtgaggaactgctgatgagaggtggggggaacagag

SEQ ID NO: 16277 - DNA, 883 bp, Artificial sequence
  DNA replication origin
cgtttcaagaaggaggaaaaaaatgtcaggcgcaacgttcactgccgaaacctcgccttcctgttattcacggctgtctctcctccccctgcccgcagtgtgccgtgcaggtgaagctggagctggggcaccgcgcccaggtgaggaaaaaacccaccgtggagggcttcacccacgactggatggtgttcgtacgcggtccggagcacagtaacatacagcactttgtggagaaagtcgtcttccacttgcacgaaagctttcctaggccaaaaagaggtagggctcgaatacaaaagggtcttgataaaaaatgtctttgaaacaatcgcttggcccgggcggtcccgctgtcccgctccccgccccccgcgccgcgctcgccggcgtagcctcgggatccgggtgcgcggcgccgcgcgggccaggtcccggctcccgcctgcccgcgcgcgcgccacttcggcttggtgaaagtcaccgcagagaaaggaccgtcaggtgtcgagtgtttattcatcccaagccagccctcaccagtcctctggggttagccgcgggttctgtggggaaggtgcaattagttgttgagtttggagatgtggggaatcgggctggagggaataaacactttgcgcgtgtgtgtgtgtgtgtgtgtgtgtgtgtgtgtgtgtgtgtgttttcctagagaaattaagatttacctgtgttattagcaaagaatgtattggatgtagttattgttcggtcttggcaagtcggttctctttagggtcttctgtgctttcctgtctgtgtatgaggcaccaggtgccagttgccatagacttttctttttgtggcttagccaccgccacacccactccagtctggattttatgtt

SEQ ID NO: 16278 - DNA, 916 bp, Artificial sequence
  DNA replication origin
cccccggcgcgcacacagacacacagacacacacacactcacacacgctcacactcgcccctccaccccccgcgcctccctccctcctcgcctctttgcagtcacaagaagcgcactcacacactccctctcgctcacacgcgcgcactcacacacacacacacacacggtggaaggaggcgaataataactcagccatatttcagccgccgccgccgggagctgcgggcacagtccggggacgcggcgagcagcctcggcggccgcacctccgcaaagcgccgcggccgctacgatggtgcgttctccgcggcgcgcgtgtgtgagccgaagtgtgcggggctgacagcggcggggccgcacgcaactttgccccagcgccgggaggtgctgagcgcgagccgaggctcggcggctgtccgcccgccgccctgcctttctgaatttcattttttggggggaggtgggagatactttggagccacttgggctcttgaaagtgtgttgcgggggctcggttcgactggcctcgccgatcgcgtggggcttttcgctggggggtgcggggtgctctaagttatggatgcctcggcgtgttttcctgcgggcgtgtgtgtgtgtttcagtgtgtatgacgacgtctcatttttgttgtgcacgaaccccgtggcaagagcacgggagtttgtgcccatcagcagaggctgcctgtagtttccatttcgcctggcacagcgctccacacgcacgcacacacacgtacacaaagacttcctcggcgtgtgcctgtcgccgcggtactttcggggagggggctcgccaggagcccttcggtccccctgggtcccagccacctcccctcccacgccgggaaaccgccccggcatcgccttctgatttgtttccgatgcatttg

SEQ ID NO: 16279 - DNA, 938 bp, Artificial sequence
  DNA replication origin
ccgtaccaacctttctctaattggaaccgcggagcgctggcgctgtctgggctgcggcggcgcagggcgaggaaggaaagtgggggagggcttttattattatttttgcgcgtacttaccgagctagccatgcctgggggcccggaggtttgctggggtgttgtgtggtacccccccctcctccgccccccctcagctgtaattcatgaagaggctgctatgaatgagagcgcgcccaggagcggagggtagatggcggacattctctgcctttttccccccgcgctcgcttgctcgctcgctcgcttattaaactcagccccaaaagcaaaagcagcagcagcagcagcagctccagggtaaagaagatgattgcggagcatgcgccgtggcgcctgacacccgggctccgagcctcacagggcggagggagggcttgcgggcggggcggagcgcgcggggaggcagagcgagcgagccagggggagctcgaaagagccaatcacctgccacctcccgaaaccccggcggcccgcagcgccacactggaaagcctcgcttaaagtaacaggttcctgctgggggggtggcagggaggggacgcaggagtggggagagcggccagctggggagccatcccagcccctgtgtaaactctgctcgccctacaataaaaaacggattaaaactgctggaatgtagccactgcttagagccctcagcagccggagagggggtgttaaatcaagtccttagctagtacgcacggggaggagggagtgggctttcttttactttccaccacgtatttctgtggttttgtgctgaaaagacaagaactcacacccaaacaaacttacttaaagagagcgagagaaatgccatcctgcaaaaaacgagcatgaaaatagcaatgactgaggctgttctaacccgca

SEQ ID NO: 16280 - DNA, 1110 bp, Artificial sequence
  DNA replication origin
acagaagcgccgcccggcctcgcccaagcgcacacgaaggggccgcttcccgccccccgcaccccagaccaggcggctcacggaacaccgcctcccagctctggcccgggaccaggcggtcccccagccggcttcggcgccgcggccggggacgcgcgtcttccttctccaggcgccggacgtggaacctgcgagcccctggcggcgccccaagttatgcacaggtcgcagctgctcaccaagctcctcctgggaggccgccctggtccccgagaggggcgcgcgggagtggacgttcccgcaccttcgccccatccacacctgccgccgccgccggggccgccagcgccgtggctccgccccggctccgcccctcgccgcccccggctcccgctccagccgccgccgcgaccgccgcggaaaggagggggagggaagaggcgcctggacggggctgcgggagcggccgtgctgagcctcctcccttgggcccggacgggacccaggtttctccactgcaacgcagctcccgagtgacggaattttgtgggggaagcggcggccactacgctcgcttttggcacagtagccctttgcgggtgggagcttctcgcagtcagagctaagggagagggagtccacctgcaagagccagagctcgcccttgtactctccgaatgcaaacttagcaaattgaacagcggaagtacttccttggtcggacccctgctcttctaggggtcttctagaaacgtggcggctatcacaggccccgtggtataactggcatttggaaaacgagggtgtttttccatctggagtggcctctctcctatcctcaaccctccgtgtccttcgacgcctctctcagatgccatctccaccaagaattttttccgggtacccacctgcgcccagatttgattccgccctctttgggacagcctgggtgctctgaacctttccactgccccttcaggtgtatgagagcgccttgtgaaatgcatgggccatcgttagttatttttattgcaatatgtggtttcatattcagtactgtagtatacaagcagagatatttatgctttcacaacacttttcatttgggtt

SEQ ID NO: 16281 - DNA, 1236 bp, Artificial sequence
  DNA replication origin
cacagcccccgtgcttaatcggttggttgggaggtttctttcgtccgtggttttggaaagtccccgcctccaaaccgcagtcccgcagtcagttctgcagcctcagggcctcgaacagccatgcttagaatccgtccttctttcctgctccatctacccttcccctctggcttcttttttttcactggagaaagcccacccgagtctctcagcctgcttcggaggttactgcggcctcctccacgggtagttctgggacccgggtctagtccgcggttccggagcaggtccctccctggagtcgtcaggcccagtatgcgtgtgctcagtgtgctcgggaaacacgcgtgggctttaacagcagatctccataaaagggtcccggagatagcctctgcctggcccgaggcccagtgcctcaaagcggacgcctttgcgctcccggaggtgctcacaccacagcggagcctgctggcgagtggagcgtaggactgcgaaccagcaatctcccgagaagcggcgagggggaggggaatgtctgtgaatcggttatccctcccacccccagcagaagtcggggaaatgggggtggaagggggaaaaagggagagaacaggagtggggttgaggaagggtaaggaggaaggtgagcttcctacagctgcgggggaaggtggagaaaattttcagggggacagctgagtggtagagctagcgagcttcagagaaatgttgacagacagatgcccagaaagtgaggatgccgggcatgggcactgcgtaccaggcacaggagatatatggaggcaggaaattggcacatcataagcatttgaccatcctgccctaaaacaaaacaaattgaacaacaacaacaacaaaagataatagcaaaagtggcacagtagtgagctcgcagggcccattcctatatagaaacacagaaaaataagcaaaagctgccagaattgacttcgtgggaactctgggaaacagtaagaaagttttacagcaaccaagtgagtgctgaaccaaggcaaaggtaactgaaacgcaatgatagagaagaggggcagggaagtgttgggtagacaaaggcgggtccctggtaagggccctcccctgggcctgtgcccactggacctaggtgaggacaggcactccttccttcacgcccaaatgttgcatatcccaagaccaccctgtcccgccacgcccccatcctttgcctatgaa

SEQ ID NO: 16282 - DNA, 1199 bp, Artificial sequence
  DNA replication origin
taacagagtgaacgcactcaaacacgcctttgctggcaggcgggggagcgcggctgggagcagggaggccggagggcggtgtggggggcaggtggggaggagcccagtcctccttccttgccaacgctggctctggcgagggctgcttccggctggtgcccccgggggagacccaacctggggcgacttcaggggtgccacattcgctaagtgctcggagttaatagcacctcctccgagcactcgctcacggcgtccccttgcctggaaagataccgcggtccctccagaggatttgagggacagggtcggagggggctcttccgccagcaccggaggaagaaagaggaggggctggctggtcaccagagggtggggcggaccgcgtgcgctcggcggctgcggagagggggagagcaggcagcgggcggcggggagcagcatggagccggcggcggggagcagcatggagccttcggctgactggctggccacggccgcggcccggggtcgggtagaggaggtgcgggcgctgctggaggcgggggcgctgcccaacgcaccgaatagttacggtcggaggccgatccaggtgggtagagggtctgcagcgggagcaggggatggcgggcgactctggaggacgaagtttgcaggggaattggaatcaggtagcgcttcgattctccggaaaaaggggaggcttcctggggagttttcagaaggggtttgtaatcacagacctcctcctggcgacgccctgggggcttgggaagccaaggaagaggaatgaggagccacgcgcgtacagatctctcgaatgctgagaagatctgaaggggggaacatatttgtattagatggaagtatgctctttatcagatacaaaatttacgaacgtttgggataaaaagggagtcttaaagaaatgtaagatgtgctgggactacttagcctccaattcacagatacctggatggagcttatctttcttactaggagggattatcagtggaaatctgtggtgtatgttggaataaatatcgaatataaattttgatcgaaattattcagaagcggccgggcgcggtgcctcacgccttgtaatcccttcactttgggagatcaaggcggggggaatcacctgaggtcgggagttcgagaccagcctggccaacaggtgaaacctcgcctctact

SEQ ID NO: 16283 - DNA, 1016 bp, Artificial sequence
  DNA replication origin
cgcggggcgcccgcgctgagggtgggaagatggtggtgggggtgggggcgcacacagggcgggaaagtggcggtaggcgggagggagaggaacgcgggccctgagccgcccgcgcgcgcgcctccctacgggcgcctccggcagcccttcccgcgtgcgcagggctcagagccgttccgagatcttggaggtccgggtgggagtgggggtggggtgggggtgggggtgaaggtggggggcgggcgcgctcagggaaggcgggtgcgcgcctgcggggcggagatgggcagggggcggtgcgtgggtcccagtctgcagttaagggggcaggagtggcgctgctcacctctggtgccaaagggcggcgcagcggctgccgagctcggccctggaggcggcgagaacatggtgcgcaggttcttggtgaccctccggattcggcgcgcgtgcggcccgccgcgagtgagggttttcgtggttcacatcccgcggctcacgggggagtgggcagcgccaggggcgcccgccgctgtggccctcgtgctgatgctactgaggagccagcgtctagggcagcagccgcttcctagaagaccaggtaggaaaggccctcgaaaagtccggggcgcattcggcacttgttttgtttggtgtgatttcgtaaacagataattcgtctctagcccaggctaggaggaggaggagataaccgccggtggaggcttccccattcgggttacaacgacttagacatgtggttctcgcagtaccattgaacctggacctcccttcacacagcccctcaatcgtgggaaactgaggcgaacagagcttctaaacccacctcagaagtcagtgagtcccgaatatcctgggtgggaatgactaagacacacacacacacacacacacacacacacacacacacacacacacagtaggaaaggtgtatttcaagcacactttctttctccttggggagaattattgctaaccatctaagttttctggaggcg

SEQ ID NO: 16284 - DNA, 1155 bp, Artificial sequence
  DNA replication origin
cccccgatgcggggtcagtgggggtggggcgcagggtccccgatgcggggtcagagtgtgtggggcgcagggcccccgatgcggggtcagattgtgtggagcgcagggccccctcgtgtccagggcactttggtacactgtcccacaaggcacctgtctcagaggaggggtcctggcaggcagtgtggcaactcccttccagagcccagctccatgctaacctgcccacagcaaccccacagagccacatcccctgctgcacctggcctgcaggagtgtcccaggacaggcccaagtcagcccagcatgcagctgccctcctaccctgaagaagggagtgggctttccaggggacataaggatgccaggcctggacctcctgggcaggaaagggagcaggtcctgagggcctgtgccccacagccccagcaccaggtggactgcagcgcagtgggtgggccagtggcagctggggagaagccccccgtcagcaggctggggtctgcccaccagggcctccccacgtctgcctttgagggtgcctgccatgccctgggggatcctggtatctttactggactggaagcaggagacagaacagtgtctgtcccggggtgacttcatcaggagaccgcccacatagagctggaccccgcagctgaagcggaaatgtgagacaggctggcacctccggaaaaactgcctttcagccttggtgttccgtgcaaggtgaaaaaaaataggtcctccaagtttacagcttgaaatcaggctactgtgtggccctggagaccacgaggggagaatttaaagtggccccggctggcagggtctaggtggctggcagaggcacatgcagaccctacctggagcccgccctagggacgctgggcaggtcagtctccgtgcaggatgtgagcagcgtccctgggctctatccgcgaggtgccagtagcgtgtgcaggtacatacacatgcgtgcacactgttatgacacccagaaatgtctcaggacgtcgaaatgtgtccttgggagcagaagtgtccccggttgagaatctgtcccagaggaacacgaccacgacaggcctcaggattttgtgttgatcaagttccaaggaaaaggaacatctcggccaggcgtggtggctcacg

SEQ ID NO: 16285 - DNA, 1118 bp, Artificial sequence
  DNA replication origin
ggaagtccggagggacggagctgagctgctgaagcccggcatctccctgccggcacggacccgaagggcggtcgggcagggcacgcgccggcggcggccgcggcgccgcgaactcgccgccggccccgcctcctggcgctcttccaagcaagcccctccttcccgccccgctacaaacggcgggaccgcggcgcctgggcgtcactgaggcagtagccggccgggtgaggagggcggttgccggcgcggcgcggcgcggcgcgggtggggcgggggttccgccggcttccagtcccctttcccgccgccgccgccgccaccgcctctccgcggagctcgccccgagcgactcctccgcggcagtgctgacggccagcggcacgagccgtagtagctgcagcttcgagtcacagcaggcaagtgctgggggcgtgggggcggggacggcgtccgcgccttgcccctggtccattttggacgccgaggctaaggtctgtgcgcgcccccgctgcgtctagcagggtaggggtggtgcgccctagtccgaactctgggcgggaacactggtgggggcggcggaggttgtgcccgcgaagttcctagagctcagcccgttgcggcgggagtagagagaattgggcgcctcgggaggtggcaccgcccctcccgtgggcacaagcaggttgggggcggcgggagccgagcggggacagtcgcgcctggcagcgtgcacgggcgtggacgtgcccgggtgcggccgcgtgtagcgcaagaaggaaactgttgagacgcaggtgagtgtattggagggaaagtgggggagggggcttttctagaaaaagggcaggattcctgtgttgcactggcaaccccgccttgcgggaggatgtgtgcactggcttctcccgcggaacacgccggggtggtgtctggtgtgtgcccacttgctacggcgccttcgcgcgcgcggtccttggagctctcggggcgtttggagacttaacaccggccgcgttgtgtgcggaggtggtgtagggccgcgggcgcccagggcaggagcaatgatgatcccctcgtgcgcgttaggtgaggcccgtcgcagccgcgcgaggtcgcag

SEQ ID NO: 16286 - DNA, 1323 bp, Artificial sequence
  DNA replication origin
ctaggttctgggggagagttagggctgggttcaggtaggttgtggggagaaagatcggagaggtcaacagacaaggaggaatcagcactgccagtgtaagatagaggggtggacggaagggagataaggaaaatttgggatggatcacattgggagtagaggcgagggagggataatagtgtaataaatcccctggcatagggtacctcagaccatttacccattttgtgatagaagttgtctaagtcccacaagatagagaaatcacaagtgctgctttctggccactgaagagccgttgtctaatttgtgttggggccagaccatgtaacagaaaaaaattagacatttaggctttagatcaggtgaaagctgaagagttttgaggcttttgaggacacaagccagaggggaagaaggagggatgggggggcgggaggttgcccatggtagacaggtgaagttttgaggacaaagatggagacaagaaaaagagcaacctctaggctcctcggggggcggggggcggatgggggctgaagttttgaggacaaagagggagacaaggaaaagagcaaccactaggctcctcagtgggcatgcccaacagaggtcttgggttatgtggctggcaaatggccaaggtgggcatccccggcattgaccaaacagcgaggggagactgtcttcccaagaagagtccgtgaccaacgttggatttctgaaacaaagataaagagagtttccttgtctcaatctggaaaggagggatataagaagggatgtaagaagaagtgagaggcagcttatctgatccatagacagaagcaggagcattcgtggggctggtctgaggtcctgcagttgaggggagtctctacgatggaagaatgtgggtgcggggaggataggggagaggactcctggaggagttcccctatcccgggttcttggcaccaaatgttatgtgagcatttaattgaagagacaaccagaacaggccaaatgtaagcaacaaggcgtttattcacttgggtgtgaacaggctgagtctgaaaagggagtcagcagcaggtggtgggattggagtggttttataggttagggttaggcagtggaaagttacagttaggggccagtttttgcaggcagtggaagaatgtcacaaggtacattatcacacatttacagagctgagtgtcacgaggttgattgatcagttagggtagagcctgttacgatggtagaatgtcgcaagtttggctaatcagctaagacaggaactagctgtttttcttctgttgtggttttcctgttgtgcca

SEQ ID NO: 16287 - DNA, 948 bp, Artificial sequence
  DNA replication origin
ataaggcagctccccagcccttcagggtctaatgctgtatgccacctgagggtggcagctaggtgggccataaactgagctggattctcatctttattctgagtggtctcttttagtttctcataattgacagctttgtatgctacctttgaagcccttgaactaggcaagagatcatgtagtcctgcctggctatgccttggccccctgcttggtaggtccactgggggtcttcctggggtactgcccctagcaccttcttggaggccaggctcaaggtgccagccgtcatgggcataagctcgagctagggtccaaacctgctctcgctcctcaggagtgagagtagagatgaggatgacattgaagtcattccaagtaagattataggactgggttaagaattggaattcctgtatgtatttggtggggtttgatgaaaaagagcctagacactgactgatttgggaaaggtcggacagatagaaagggacgtgaacccggactattccttcagctccggccacctctcgaaggggaaattgttgagtggggacagggaagctggctgtgggaccaaattgtaagccatatcaggtgtgaggaggggtggtgatgagaggggcataaggatgtgggttgtgggtagaagaggaactaggttctgggggagagttagggctgggttcaggtaggttgtggggagaaagatcggagaggtcaacagacaaggaggaatcagcactgccagtgtaagatagaggggtggacggaagggagataaggaaaatttgggatggatcacattgggagtagaggcgagggagggataatagtgtaataaatcccctggcatagggtacctcagaccatttacccattttgtgatagaagttgtctaagtcccacaagatagagaaatcacaagtgctgctttctggccactga

SEQ ID NO: 16288 - DNA, 859 bp, Artificial sequence
  DNA replication origin
cccggccgccccttctgggacgtgaggagcgcctctgcccggccgccccgtctgggaggtgaggagcgtctctacccggccgccaccccgtctgggaggtgaggagggcctctgcccggccgcgaccccgtatgggaggtgaggagcgcctctgcccggccgcgaccccgtctgggaggtgaggagcgtctctacccggccgccaccctgtctgggaggtgaggagcgcctctgcctggtcgccaccccgtctgggaactgaggagcgcctctgcctggccgccgccccgtctgagaagtgaggagcccctacacgccgcagccgccccgtctgggaagtgaggagcgtctccgccagccgccccatctgggaggtgggggggcgcctctgcccggccgccctgtctggggggtagggggcccctctgcccggccaccacgtctcagaagtgaggagcccctctgcccggccgccaccccgtctgggaggtgtacccaacagctcattgagaacgggccatgatgacgatggcggttttgttgaatagaaaagaaggaaatgtggggaaaagaaagagagatcagattgttactgtgtctgtgtggaaagaggtagacatgggagactccattttgttctgtactaagaaaaattcttctgccttgggatgctgttaatctataaccttacccccatgctctctgaaacatgtgctgtgtccactcagggttaaatggattaagggcggtgcaagatgtgctttgttaaacagatgcttgaaggcagcatgctcgttaagagtcatcaccactccctaatctcaagtacccagggacacaaacactgcggaaggccgcg

SEQ ID NO: 16289 - DNA, 1124 bp, Artificial sequence
  DNA replication origin
cagaggcgcccccccacctcccagatggggcggctggcggagacgctcctcacttcccagacggggcggctgcggcgtgtaggggctcctcacttctcagacggggcggcggccaggcagaggcgctcctcagttcccagacggggtggcgaccaggcagaggcgctcctcacctcccagacagggtggcggccgggtagagacgctcctcacctcccagacggggtcgcggccgggcagaggcgctcctcacctcccatacggggtcgcggccgggcagaggccctcctcacctcccagacggggtggcggccgggtagagacgctcctcacctcccagacggggcggccgggcagaggcgctcctcacgtcccagaaggggcggccgggcaaaggcgctccccacgtcccagacgatgggtggcctgggagagatgctcctcacttcccagacgggatgacggctgggaagaggcgctccttacttcccagactgggcggccgggcagaagcgctccccacatcccagacgatgggcagccaggcagagacactcctcacttcccagacgggatggcggccgggaagaggcgctcctcacttcccagactgggcggccggtcagaggggctcctcacatcccagacaatgggcggccaggcagagacgctcctcacttcctagatggggtggcggccgggcagaggctgcaatctcagcactttgggaggccaaggcaggcggctgggaggtggaggttgtagccagccaagatcacgccactgcactccagcctgggcaacatcgagctctgagtgagcgagactccgtctgcaatcccggcacctcgggaggccgaggcgggcagatcactcgaggtcaggagctggagaccagcctggccaacatggcgaaaccccgtctccaccaaaaaatacaaaaaccagtcaggcgtggcggcgcgtgcctgcaatcccaggtactcggcaggctgaggcaggagaatcaggcagggaggttgcagtgagccgagattgcagcagtacagtccagcctcggcaacagagggagaccgtggaaagcgggagacggagacggagacgaggagaccgtggaaagcggg

SEQ ID NO: 16290 - DNA, 1140 bp, Artificial sequence
  DNA replication origin
gctgccgggcagaggggcttctcacttcccagatgtggcggccaagcagaggggcctcccaccccccagacggggcggccgggcagaggcgccccccacctcccagagggggcggctgcctggcgggggcgcccccccacctctcagatggggcggctgccgggcgggggcgctgcccacctcccagatggggcggctgggtggagacgctcctcacttcccagatggggctgctgccgggcggaggggctcctcacttctcagacggggcggccgggcagagacgctcctcggttcccagacggggtcgcggccgggcagaggcgctcctcacatcccagacgaggcggcggggcagagacgctcctcacctcccagacggggtggcgtctgggtagagacgctcctcagttcccagacggggtggcggccgggcagaggcgctcctcacctcccagacggggtggccgggcagaggcgctccccacatcccagaggatgggtggccaggcagagacgctcctcacttcccagacttggcggccgggcagaggggctcctcacatcccagacgatgggcagccaggcagagacgctcctcacttcctagatagggtggcggccgggcagaggctgcaatctcagcactttgggaggccaaggcaggcggctgggaggtggaggttgtagcgagccgagatcacgccactgcattccagcctgggcaacattgagcactgagtgagcgagactccatctgcaatcctggcacctagggaggccgaggcgggcagatcactcgaggtcaggagctggagaccagcccggccaacacggcgaaaccccgtctccaccaaaaaatacaaaaagcagtcaggcgttgcggcgcgcctgcaatcccaggcactcggcaggctgaggcaggagaatcaggcagagaggttgcagtgagccgagatcgcagcagtacagtccagcctcggcaacagagggagaccgtggaaagcgggagacggagacgagggagagggggagaccgtggaaagcgggagacgggagacgggagatgggagacgggagagggagagggagctttttcttttttttttgagatggagtcttgctctgttgcccaggcta

SEQ ID NO: 16291 - DNA, 1022 bp, Artificial sequence
  DNA replication origin
aggcaacgtcataaggcttcctcgttatttgcatcttcgttctctttttggcgactagcctgccctcccgcccttggaaacttgtggaccccagaatctcagctttccgcctaccaaaggtgccccgatcccctcccactgccctagcagcggcccagccccaacgcctttggctagagattgaaatcctctggaaccaaccactggacgctctggattggggcggaacgcgcttccactgtctcgaaagcagcaccttctcggatttgagcctttgcggcgcgcctgggctgagatctgagaaatgcgccctgggccacaggcagcagcggaggcggggaaggaacaactttccctccgccctctaaccacaagggcggggtggggcggcctcgctggggtcgggctcctccactttcccagctgggatcccctgccggagctggcgtgggggccggggagggggaccagaggggcttccttctctccccaagccccgccagatgttggaaaggcaaacaataggggaaacgcggagaaacaaaaggccattcgccacgatctcagtcggctgcgtagagagatctctgtggggagggttaggggagagggtcaggaaagagcgcgaggggggggatcccgagagatttagagtctctggtacttgccaggcaccaggggtcggcgctttaccctcccagcaggggtctgaaggtgggaaggggcaatcaaagaaaacttgaagggttttcaccttcttccccagttcagggaaagggaggggctgggattccagatgtttgacagttgttggccccaaagttaagcgcgatttgtacggcctttacacgctccccacctccgtgaggcatcgtcagccccgggggcgacctggctgacggtgcggacttcccctacgctgccccaagccgagactcctccctcaggatcaggacgcccaagcgttgtcccccagcccaggcgcacttttgtaaaagtttgtcttcccgccacccacagcc

SEQ ID NO: 16292 - DNA, 1046 bp, Artificial sequence
  DNA replication origin
ggggccggggccggggccggggcgtggtcggggcgggcccgggggcgggcccggggcggggctgcggttgcggtgcctgcgcccgcggcggcggaggcgcaggcggtggcgagtgggtgagtgaggaggcggcatcctggcgggtggctgtttggggttcggctgccgggaagaggcgcgggtagaagcgggggctctcctcagagctcgacgcatttttactttccctctcatttctctgaccgaagctgggtgtcgggctttcgcctctagcgactggtggaattgcctgcatccgggccccgggcttcccggcggcggcggcggcggcggcggcgcagggacaagggatggggatctggcctcttccttgctttcccgccctcagtacccgagctgtctccttcccggggacccgctgggagcgctgccgctgcgggctcgagaaaagggagcctcgggtactgagaggcctcgcctgggggaaggccggagggtgggcggcgcgcggcttctgcggaccaagtcggggttcgctaggaacccgagacggtccctgccggcgaggagatcatgcgggatgagatgggggtgtggagacgcctgcacaatttcagcccaagcttctagagagtggtgatgacttgcatatgagggcagcaatgcaagtcggtgtgctccccattctgtgggacatgacctggttgcttcacagctccgagatgacacagacttgcttaaaggaagtgactattgtgacttgggcatcacttgactgatggtaatcagttgtctaaagaagtgcacagattacatgtccgtgtgctcattgggtctatctggccgcgttgaacaccaccaggctttgtattcagaaacaggagggaggtcctgcactttcccaggaggggtggccctttcagatgcaatcgagattgttaggctctgggagagtagttgcctggttgtggcagttggtaaatttctattcaaacagttgccatgcaccagttgttcacaacaagggtacgtaatctgtctggcat

SEQ ID NO: 16293 - DNA, 672 bp, Artificial sequence
  DNA replication origin
cccatttcgctagcctcgtgagaaaacgtcatcgcacatagaaaacagacagacgtaacctacggtgtcccgctaggaaagagaggtgcgtcaaacagcgacaagttccgcccacgtaaaagatgacgcttggtgtgtcagccgtccctgctgcccggttgcttctcttttgggggcggggtctagcaagagcaggtgtgggtttaggaggtgtgtgtttttgtttttcccaccctctctccccactacttgctctcacagtactcgctgagggtgaacaagaaaagacctgataaagattaaccagaagaaaacaaggagggaaacaaccgcagcctgtagcaagctctggaactcaggagtcgcgcgctaggggccggggccggggccggggcgtggtcggggcgggcccgggggcgggcccggggcggggctgcggttgcggtgcctgcgcccgcggcggcggaggcgcaggcggtggcgagtgggtgagtgaggaggcggcatcctggcgggtggctgtttggggttcggctgccgggaagaggcgcgggtagaagcgggggctctcctcagagctcgacgcatttttactttccctctcatttctctgaccgaagctgggtgtcgggctttcgcctctagcgactggtggaattgcctgcatccggg

SEQ ID NO: 16294 - DNA, 805 bp, Artificial sequence
  DNA replication origin
cagctcgggtactgagggcgggaaagcaaggaagaggccagatccccatcccttgtccctgcgccgccgccgccgccgccgccgccgggaagcccggggcccggatgcaggcaattccaccagtcgctagaggcgaaagcccgacacccagcttcggtcagagaaatgagagggaaagtaaaaatgcgtcgagctctgaggagagcccccgcttctacccgcgcctcttcccggcagccgaaccccaaacagccacccgccaggatgccgcctcctcactcacccactcgccaccgcctgcgcctccgccgccgcgggcgcaggcaccgcaaccgcagccccgccccgggcccgcccccgggcccgccccgaccacgccccggccccggccccggcccctagcgcgcgactcctgagttccagagcttgctacaggctgcggttgtttccctccttgttttcttctggttaatctttatcaggtcttttcttgttcaccctcagcgagtactgtgagagcaagtagtggggagagagggtgggaaaaacaaaaacacacacctcctaaacccacacctgctcttgctagaccccgcccccaaaagagaagcaaccgggcagcagggacggctgacacaccaagcgtcatcttttacgtgggcggaacttgtcgctgtttgacgcacctctctttcctagcgggacaccgtaggttacgtctgtctgttttctatgtgcgatgacgttttctcacgaggctagcgaaatggggcggggcaacttgtcctgttcttttatcttaaga

SEQ ID NO: 16295 - DNA, 945 bp, Artificial sequence
  DNA replication origin
aagggaggaagggaggaaggaagggagggaggaagggagggagggagggaggaaggaaggaagggaggaaggaaggaaggaagggagggaggaaggaaggaagggaggaaggaagggagggagggaggaagggagggaggaaggaagggagggaggaaggaagggagggaggaaggaaggaagggagggaggaaggaagggagggaggaaggaaggaagggagggaggaaggaagggagggaggaaggaaggaagggaggaaggaaggaagggagggaggaaggaagggagggagggagggagggaggaaggaaggaagggaggaaggaaggaaggaagggagggaggaaggaaggaagggaggaaggaagggagggagggaggaagggagggaggaaggaagggagggaggaaggaaggaaggaagggaggaaggaaggaagggaggaaggaagggagggaggaaggaaggaaggaaggaaggttggttcaaaagatgatgaaaagttcactgctttactagtgcctgatattccctggagaaccaaaagcttgaagcagttgtgatcaagggcttaaggcagccactctggttctgtgtgtactgcacatgtgcgtgtgcaaacatgtggtgtgtgtataaggggtggtgggtactgatggagaagagagagaagaggggactagaaagggggacagcaaaaaacaagggaaagaaattaagtgaaacataagaacaggaatacttagacaggttgccattaactgaggcctcttaatcttgggtccatgaatctaggcagaattgtagtgttgtaagttctttaaacgtttcacaaacatggatattttgacgtggtatggccaagacagccacattttcaagtttccttagctccatagtaattctgatgccaggctgtcttgtccataccttcagaattc

SEQ ID NO: 16296 - DNA, 919 bp, Artificial sequence
  DNA replication origin
cgtccgggatggaggtggggggggtcagccccccgcccggccagccgccccgtctgggaggtaggtgggggggtcagccccccgcccggccagccgccccatccggcagggaggtgggggggtcagccccccgccgggccagccaccccgtccgggaggtgaggggcgcctctgcccggccacccctactgggaagtgaggagcccctctgcccggccagccgccctgtctgggaggaaggtggcgggggggtcagcccccggcctggccagccgccctgtccggaaggtgaggggcgcctctgcccggccgcccctactgggaagtgaggagcccctctgcccggccagccgccccatccgagagggaggtgggggggtcagccccccgcctggccagccgccccatccgggaggtgaggggcgcttctgcccggccgcccctactgggaagtgaggagcccctctgcccggccacgacccggtctgggaggtgtacccaacagctcattgagaacgggccatgatgacaatggcggttttgtggaatagaaaggcgggaaaggtggggaaaagattgagaaatcggggcggtttcgtggaatagaaaggcgggaaaggtggggaaaagattgagaaatcggatggttgctgtgtctgtgtagggagaagtagacatgggagacttttcattttgttctgtactaagaaaaattcttctgccttgggatcctgttgatctgtgaccttacccccaaccctgtgctctctgaaacatgtgctgtgtccactcagggttaaatggattaagggcggtgcaagatgtgctttgttaaacagatgcttgaaggcagcatgctcgttaagagtcatcaccactccctactcttaagtacccagggacacaaacactgcggaag

SEQ ID NO: 16297 - DNA, 1225 bp, Artificial sequence
  DNA replication origin
ggacagggcggctggccaggccgggggctgacccccccgccaccttcctcccagacagggcggctggccgggcagaggggctcctcacttcccagtaggggtggccgggcagaggcgcccctcacctcccggacggggtggctggcccggcggggggctgacccccccacctccctgccggatggggcggctggccgggcggggggctgacccccccacctacctcccagacggggcggctggccgggcggggggctgaccccccccacctccatcccggacggggcggctggccgaccgccccgcctccctcccggacggggcggctggccgggcggggggctgacccccccacctccctcctggacggggcggctggccaggcagaggggctcctcacttcccagtaggggcggccgggcagaggagcccctcacctcccggacggggcggctggcctggcggggggctgaccgccacctccctcccggacggggtggctgccgggcggagacgctcctcacttcccagacggggtggctgccggatggaggggctcctcacttctcagacggggcggttgccgggcagagggtctcctcacttctcagacggggcggccgggcagagacgctcctcacctcccagacggggtcgcgccgggcagaggcgctcctcacatcccagacggggcggtggggcagaggtgctccccacatctcagacgatgggaggccaggcagagacgctcctcacttcctagatgggatggcggccaggcagagacgctcctcacttcccagacggggtggcggccgggcagaggctgcaatctcggcactttgggaggccaaggcaggcggctgggaggtggttgtagcgagccgagatcacgccactgcactccagcctgggcacggttgagcactgagtgaacgagactccgtctgcaatcccggcacctcgggaggccgaggctggcggatcactcgcggttaggagctggagaccagcccggccaacacagcgaaaccccgtctccaccaaaaaaatacgaaaaccagtcaggcgtggcagcgcgcgcctgcaatcgcaggcactcagcaggctgaggcaggagaatcaggcagggaggttgcagtgagccgagatggcagcagtacagtccagctttggctgggcatcagagggagaccgtggaaagagaggaagagggagaccgtgg

SEQ ID NO: 16298 - DNA, 1791 bp, Artificial sequence
  DNA replication origin
agaaatacattgctacttggctgcctctactctattattgtacaccttgaaggtgaggttaattaagtcctgttgtggggtttgagggccagaatttaatttttggagtttttatttaatgtcaggagcggattgggtaataaaatgtatattgagaataagatggccgtttgacgttttagggtctagggctgtaaagcgtctcagggttgctgccgaatgagccatgaactgggctgggtttttcatatttgatgaaagagcctaaacactaactgatttgggagaggtcggataaagaaaaaggagcattaaccttgactatgcctttagcgtcagctacctttttaagaggaaattgctgggcacgtgggggagggctagtcacagagagaaactgtgagctggaccgggtgtgaggaggggaggtgataaaaggattatagggttggggagtagaggctgaggaagaatagggatctggctcagcctggcaaggggtagcctggggaggaggggagcggtcagatgggtctgtagaaaaggaagattagaaagactcagtgatgcttggggttgggactgagagaacaggtgggagggaaagaaggaggatttgggacgagtcgcattgggaacagagagtagggagggaacaatgtgtaaaagaaagcctggatgtcaggcacctcagaccatttgcccattttacgacaagaatcatctagatcttgaaggatggaaaaatcaaaagtgccgttttctggccatttagagccattgtcaagtttgtattggggccaagcagtgttgcagaagaagataaggcatttaggttttaggtcaggtgtgagttgaagaggttttaagttcttgagaatacaggctaagggagaaggaggaatggagggtggaaagttgtccatagtgaaggaggcaagcccagagaaaagacagagacacggagggaaggggtttgggggttcttaccttccagaaaagcgggaaaggggtcagggcacagaaataaggggttagggcgcagagataagaggtcggggcatggaaataaggggttggggcacagagataaaaggttggggtgtagagataagaggtcagagcacggaaataagggatcggggggttcttgcccccagaaaagcagagaaggggtagagacacggagagaaggggttggggggttcttgccccctggaaaagtggtacttgctctaagggtgaaggagaaggggttggggggctcttgcctcccagaaaagcggagaaagggtagagacatggagagaagggcttgaggggtttcttgccccccagaaaagcggtacttgctgctaagggtgaaggaccaaggcaagcatccccgtgtggtcagacacctctgaaacgtgggtgaataatcaggcaagcatccccgtgtgattaaacaccaagggaagactgtcttcccaagtccgtgaccggcgccggagttttgggtccacggataaaacgcatctcctgtctccaccagaaaaggaaaggaactgaaattaagagagggagagattgaagggtggcgccaagattgaaaggagaaagtggttgagggatagtgagagaggttggagaagagagtaagaagaggccacttatctgatttaaaattgatgagatgttccttgggctggtgggtctgaggacccaaggtcgtaggtggatctttttcacagagcaaagagcaggaggacaggggattgatctcccaagggaggtcccctgatccaagtc

SEQ ID NO: 16299 - DNA, 1227 bp, Artificial sequence
  DNA replication origin
ctggtttctctccccggcatgacatagactggggacagggtggagacgtcagtcgccagaaacacgtccccgattctcctctcagcctccccaagctcgcctccgtgtcccccgtgccgccactgcctcgggcacctcggtaaaggcccgcaccgactctcgagggatacagggtggacggcgctcccgcctggggacgtgggtcgggccgcgtcggtactcacctccgactgcacggcggggctcccgcgaccggcgaacctgacccaagcagcgggacgcgttcccgtgcgctgcgcggttccagctgccgcctccacgctccgccccctctcgcccccggggccgccgcgcgatgggcggagcaggggcgggaagggcggagcaggggcgggacggacgggcagctagccgaagaaggggcggagcctgcgggcgcccccgcgggcctggaggacttcgccccgggctggaggctagggttgcgaagggctcctccgctggaagtgggagggctgatccctcggcccgggtccgcttctgccagcatgggacctgggacgagggtgtctgttgctcactttggagcttagcatgtgactccccagccggcgttaggaagtgaccaaagggtggggaagaaatggaattatttttaaaaaatgatttggccataactggagaggcttcatgtacgtgtggtcacttggcccgcctcccttctcactttgtccgtccccaccctacccaccctctccaccctcgccttaattctttgcgcaaagcctgccaagtggacatcggagtcacgctgtcagaataggacttcagcatttccgtggcaaaagttctatatgtagatttccttggacatgtaacaacactttctaatgcacgatgttcaccggtctgaagtcggagaaatggctgggagatggcagcaagtgggctttcacaagatctgcttttcatgttggtaggagttgtgccctcttgggtgaatggcgttcaaagaagtgattagatctttctagatgaaaggtggtgaggttttcctgcccaaattatttggaaagttactgtagttttctgaataagcagcttataggatgagtaaacaatagccagtactaatagcccccctgctactttatactgccctcctattctgcacaaagccctgtgatcgactctttccacgttattcagttcagctcttccaaccac

SEQ ID NO: 16300 - DNA, 1787 bp, Artificial sequence
  DNA replication origin
gctgccccgtgggcaaaccgaccctggtttccgactccggccactggcagcctcgcgccccagacccttcccgggcacggaagcgggtcaggtcgccctgctcagcctccggaacggcggcggcacaaaccccggccgctcccagcagccccgacgagaccccgggcagcgcctgccgccgggtggcctccctctggggctgaccccctcgcgcccccgcgcgtctgtctgcgtttctgagcctgctctgacagtgatgtaacaaggccaggctcgcgccgcgtcccctctttcccagactcagtgctccctcctcctcccgcgccccgcgctctgcgcgctgagctggcgccgggctccgcttgcacagcaccgggaccgacgggcactgctgggagagccgctctcccaggttccacctccccgatgcagagtccgtgggggaaaccaggctttcctcccagaaccaagggagcgagccgagggggcagctgctgtgggggcttctgaggagacagcctggcttctttccctacttcctggagagggcaggaaacctcaggtacctcgttgaccccagccggagcgtgttgatatgagagagagacggaggttgcaatagtgagaggaagagagggagggcacaagaaagggagggagggagaggggacggagagaaagagtagaaatagaaacagggagagattgcaagagaaacgcagagagagagatagagagattgcaagagagatacagagacagagatcaagactgaaagtcaagaagcaagtcggagacaaagggcaagagaaagacaagagttgatgggtgggagcttgacttggatttttttttaacgcactgtggtttcatctctgacagaatagaggaacgctgctccctggtcagcaagcagcccccaacctggatggagtgaaacatgcggcctgatgacattaacccgaggactgggctggtggtggccctggtcagtgtcttcctcgtctttggtttcatgttcaccgtctctgggatgaaaggggagactttgggaaacatccccctcctggccatcgggccagccatctgcctaccaggcatcgcagccattgccctggccaggaaaaccgagggatgcaccaagtggccagagaacgagctgctgtgggtccgcaaattgccctgcttccggaaacccaaagacaaggaggtggtagagctgctgaggaccccttcagacctagaatccggcaaggggagctcagatgagctggctaagaaggcgggcctcagggggaagcctcccccacaaagccagggtgaggtgtccgtggccagctccatcaacagccccacacccacggaggaaggagaatgccagagcctcgtccagaatgggcatcaggaggagacgtccagatacctggacggctactgcccctcgggcagttccctcacctacagtgccttggacgtcaagtgctcagcaagggacagatctgagtgccctgagcctgaggatagcatcttctttgtgccccaggacagtatcatcgtttgctcctacaagcagaacagcccgtatgacagatactgttgttatatcaatcagatacaaggcaggtgggaccacgagaccatcgtctaatctctgcctacaaaggtggctggattgatagaatatgactaagcccagctccccgtggaagcaaattgctctgcttggagagccttcacactgttagaaattgacctggtatgtgatgggtgtgataacctctggtacc

SEQ ID NO: 16301 - DNA, 2168 bp, Artificial sequence
  DNA replication origin
atcccagctactcaagaggctgaggcaggagaatcgcttgaacccgggaggcagaggttgcagtgaggtgagattgcaccattgcactccaacctgggggacaaaagcaagactttgtctcaaaaaaaaaaaaaaaaaaattcaagcagtttaagcagatttgggcaggaggccattctgcataaggtagtctgaaaaggtctctgtcataaggtgacatttaagagacctgaattgaatgaaatattggggacaagtgtttcaggctaaatgaacagcaagtacaaaggccctgaggcaggaagaaatatggcaagttcaaggaatagctatcaggctagtgtggctaaggcaggtccagcatggtagagtgacagatgtgggtggggagggaaataggaaccagattgaacagggtttctgtggatttggttctgaacaaaatggcatgatctgatttatgcttacaaagatttcctggatgctctgtggaaaacagactagggaggaggaatggaggaggtggaagcagggtgaccaattagtagctgccatataacccagggcaagatgatggtggcttgatcgaggatggttacatcagagttggctggtggtgaattttgatgttttgaaggtagcactgacaaagctggctgagggcttgcaaatggcattgagagcaagagaagcacatcaaggacaccttttagattctggggaactgaataaacaatagtatcactctctgagggaggtaagaacgggagtggtgtgtaaggagtaggttgctgagggcaagatgtattgtgtttgagatgccagtaaaataagcagttgaatctggaggtcagggaagagatctgggctggagacaaatcagtgatcagcatttggatattataaatcattccgaggcagtaagtgtagacacaaaagaacatcatggactatggctggggccttcagcaactggggaagaagtccagagaggagacagaaatggccagtgaagtgaggaagatcagaaggacctggtgtccaggaagtcaagtgaggaaagttgattctgtatgatcacaaccaaagtgtcaactcataagccttattttctcatctgtgaaatggacaccgtaacaccacctacttcatggcagatagtactggcacacagcaaactctcaaaataaggtagctactgttattccctgatggttggctgccagagccctcaacttccctatccacattactgacagcacctccatgagtctttctctggggtgaggtgtctctgctcactcagggcctgaggcctctgggtcaaatcgaggtcaagtggcttcagtgcctaagtctctcacccacacagccttcagcccttacttgcaaatcaacaaagggtaaacctgtagaaaacatgggtttcggagccagaattctgcctcttgccagctgtgggctcttaggaaagtttcttaatctgccggggccccactctacgacatggggagaactgctacttcatgggacagtgggtagcccagtgtagactgtaacgccggctgatctcctgcacgctggcctgggagttagaggcttcttgctgctctcctcttcaaagtatacaggactcccgccacacacacatctggaaccaagctggtctgagagccccttatagcccaggctacctgatggggaggcacagaagtggcaacccgtccactttctttgccgcaggaccccccgttaagcagcggggtccagccgggctgagttagggagggggtttcgaacgtgccactcctcgcccggcgtcgaagcccgtttcctgggtaacctttttctgcctctcttcctagcccaccaaggcccactggccagaacgccgccgcggccccaaaccactccagataaccacccgccagctgtcctctccgttctctccgccgccgcgctgcaggcccaggctcgcacccgagtcccttcgcaccccaggaagtggcgcggcctgtcgagggcagcgtggaggaggaagaggaggcgcggctcaacgcgaccgaagctccgccgcaaaggctcgggaggaagagggcggtgcgcggccaagcgtcggagctgcagtcatactccggggaccccacgacggcgccccgcccgctgcc

SEQ ID NO: 16302 - DNA, 1102 bp, Artificial sequence
  DNA replication origin
ttttactgtagcaaggcggggcctcagttgagtgggtggggcctggaggcaactaacgcggcatagggcgagggcggggccggcaggccggggcggggctgggaagtagtcgggcggggttgtgagacgccgcgctcagcttccatcgctgggcggtcaacaagtgcgggcctggctcagcgcgggggggcgcggagaccgcgaggcgaccgggagcggctgggttcccggctgcgcgcccttcggccaggccgggagccgcgccagtcggagcccccggcccagcgtggtccgcctccctctgggcgtccacctgcccggagtactgccagcgggcatgaccgacccaccaggggcgccgccgccggcgctcgcaggccgcggatgaagaagaaaacccggcgccgctcgacccggagcgaggagttgacccggagcgaggagttgaccctgagtgaggaagcgacctggagtgaagaggcgacccagagtgaggaggcgacccagggcgaagagatgaatcggagccaggaggtgacccgggacgaggagtcgacccggagcgaggaggtgaccagggaggaaatggcggcagctgggctcaccgtgactgtcacccacagtgagtgtcgggcgccaggtgggctccatgcaggtcccgaaagcccggcggggtctgtgggtttagtcacgtgtcctccagaagcgtgtgaccttgcgcttgtcctggcgtccggaagcgtgggttattggttgtgtccgtggaactgtcttttgtcccgggcttgtgtctgtacacttttccatgtggccggtgtattttgtctctggtcatttgtgcgatcctgggtgtttgagcttctccgtgctttacgtcgtgggcctggttgtgtttgtgtgcccgcgcagttattgtgccctttgtgtcaggcatatattgggccatgtggtctacgactgctccgtgtgtgataagtcagaacttcgtgcatgccggggtgctcctcgtgtgctgagtgccttctccgtgtgcgccgcttgagttggccgtgggtccaagcgttgtactctgggcaccctttgggtctgcctactgttggag

SEQ ID NO: 16303 - DNA, 1093 bp, Artificial sequence
  DNA replication origin
ctatttctataggtgctaaaactaggctctgccagcaccttgtgcagcagttgctgcccaccttacctttgcaggaccctctctcatcttcttgatctgatccttatacttcactagctcagcatccaatcgagaaatcttcttgtcaatggattctgctctactgtccaccttaggggaaaatatcaaatgcactggtagttactgcaatacacttattccagaaggggcaggtagagaggaaggaatacagaggaagaaaagaggagcttaaggggaagggtgaaaaacagtggttcacaaagaagggtattcccaaccagaaaccctgggctttataaattattctcttaccccccgccacactgccccgattctgatataccaggtagccttcaagtgggttggggcagaaaataatttgagaatcactgagttgagttggaatttccctagaatcagagactagccaggctgagagttcctccaagaggcacatgaaatgggccagtgccaagtgaaaccagctgattgtagatctaatgccattccctaaatcggggatggtggcttaatctgaggggctagggttctgagttttgtgttactgagatccaggacgaaggcacagatatgttgacctaggatatcaagctgagtcctgatgtggactggggatgacagatggaagaagggtaagggatcaggcaggatgaggtgggaagggtgtatgggcctagggctgggtgaggtgagaggatcaaggcgagagcgagtggacgggcaatgggcatcaaaacgggttgggtgctggcagggcaaggcagtgatggggttaggggttccctggtttgtggcgttaggaatgacttgggtaacagggatgaaggggagaaggtgagatagagagggacgacgtgtaaggggcccaggacccgaaatgaagtggaagaatatgggcccggggctgggggtgggcggggtcgggtgtgtcagaggtcctgagcctacttatgcatgatcaaatgcccaccgtgccaatgcagtcagtcaggctgggcggcggagccttgggtttcgctttcccgaagag

SEQ ID NO: 16304 - DNA, 1400 bp, Artificial sequence
  DNA replication origin
cttcctggtgccagagtgctcccacatgaaggaataggaaaggaagatgcaaagagggaaatccttcgaccacatgaagacacaggaagaggcctcatagggctccaagggctccagggaagcaggtgcagaggttgggtggggtgaggggccaggatccactgaccctggggccaggcaggaatcactctgttgcctggggctcagaaggcagcatcacccatggttcctgtccttgctcatgcattttgcctttcaataattattgtgcatctactgtgtgcaggccctgcctggacactggggatgcgcagtggatgcgctgggctctgcctttgagggttgcagtttaatgggggacaggtaattatatggaagaaggtgagtgcagagtgggaggcttggaggctgtggggctcggggtaggggagctcacatccagcctctgggccaaggccaggaggcttcccagaggaggagacagagcagggtatggtggtggggggtgtcctttttgggggtgggagctgcactttacagtttgaggggatgggcagaggaggctgggcttcgttctggaggtggggacacggtgaggtgaggtttagaaagcacacctgagccgcagtgtgtaggatgctggaaatggtggagatgggcctgcgaaagtgatgacccaggagcagcagccgggcacctaacaatgggtcagcaccgtgggcgtggagacgagagcggggattgatcaataccggagaagtacaatgtacaggacttgggttccatttggatggagtgggtgagggagagggaggagtcagaaatggcttccggtttccagcttgggcctggggattggagatgtccccactgagagtagggcacaagtgaggaaatggtttggagaggaagataagttacatcatggacatgctgagtctgagttgcctatgggacttggaatggggggtggcaaaatgtgtgtgatcttgagcaagatattcaacccttctgggccttggtcttcttatttgtaaaatggcgataagaatattacttcccatttgtgttgctgtgaatattaaatgcgctaccacatgtaaaatgttgagaatcatttctggctcagagtaagtgctcaataaacacagttatgccttttatatggtctggagctcagaagcggaagacagggtttcgtgaagtcatggctttgtggatgtagctagattgtggagtaatgacaggagggttgggggcatggcacaaggtaggtggtcaagagacactggacacaacccaaatgtccatccacaggggaacagatacatacactgctgcgcaattgcacataatagaaccctctacaatagcaaaaattaaggcacaacagacacctg

SEQ ID NO: 16305 - DNA, 890 bp, Artificial sequence
  DNA replication origin
gagcagggggatggggcaccggggcatttgaagcttgatgggattgtgagaaaacctgggaactgcgagtgacttgcagagggctgcggaagtgggcagggatagaccatgaagggctttgtcagccaggccaaggagttctgactttaacccgagggcctgaggagcctgcaaagggttctaaacaaagagaagagcaacagggtcaacctgaggtccctgaggccccagggcatccagcaggcagaggcgcagttgggcctgggctggggagaggagtctagctggagaaagagaagaggagatatcagcccctggacattcagcactagagttgctggggctgcccaagaagcacagggagtgaggcaagggccagggccaggattctggggaagaaggatgacgaagaaggagtgggtgtggaaggagctggaaacccagacacagggctgcccagaggctgatgggagccagtagggggctgttgccccagagttgggtgctgggaggggctggccaggcaggtgtttgcagacagctgcctggatgagctggtggggatagagggtggcaacagcactgaagaagcagaggctgaggaggcagaaagttcaactgcagagagaagagaggcagctaaaggggccaccaaggtgggagtttgggtcagagctgtgaagcatgttagtctgcacagagcctgcggcggggggtctctgggtctctgagccagtggagatagttggggggcagagagggaggggacacccggggtcctttcttcataggatgggcttgagtagagttaccagataaaatataagatgcccagttaaatttaaatttcaaagaaacaatatttgccacaaccttatacctggtatacc

SEQ ID NO: 16306 - DNA, 880 bp, Artificial sequence
  DNA replication origin
atgtctagctgcccatgctcagtgatgccaactgctcagtggcttcagggagtgacagcctgacccctccattgtcacattccccccgtcccccgcatcagtacttcgccttctgcttttattctttgatttctgcctaaacccatttcataatctttccacagtaaagcattttaaaggaaaagctccaagcagcaatttcctaacccacaggaaagaaagagtctaaaaatggtagagactcaggtaccaggttaatcggagcagggaggaggctcaggataagggacgcatcatgagaaggaggaaggagagactgaagtggtggccggaaggagcagtggaaaaacccagagacctcctggccaggagcctgagtttgaggctggtttgaagtttccctactcagggccccacctgggtgtgagttgtttatagctcaggctttttagacagacagacctgaacttgaatccagctcagcttcttaatcagcattgggtgacttaaagcaagaaatttaactgggcttcttcatctgtaaaatgaagatatgaatccttatcttgcagggttgttgggagaatggactgagtgggcagggggcatggcaagggcctggtagagtaaactctctgggtggtgggtaggaagcccatctgagggagggaaactctgtactccacacctcctgtccttctcctgccctaacagattcttgcctgatgccagggccaaactagaagtgctgggagtagagtataatatgctcattctgcagacagcaagagcaatgctcagggacatccaccttcctcttcagccgctccaatggtgtgtctggtctcccagcccttgccattgcagcctagtggcttag

SEQ ID NO: 16307 - DNA, 1133 bp, Artificial sequence
  DNA replication origin
cctctgcccagccagccgccccgtccgggagggaggtgggggggtcagccccccgcccggccagccgccccgtccgggagggaggtggggggatcagccccccgcctggccagccgccccgtccgggaggtgaggggcgcctctgcccggccgcccctactgggaagtgaggagcccctctgcccggccagccgccccatccgggagggaggcggcggggggggtcggccagccgccccgtccgggaggggggtggaggggtcagccccccgcccggccagccgccctatccgggaggtgaggggcgcctctgcccggccgcccctactgggaagtgaggagcccctctgcctggccagccgccccgtccgggagggtggtggggggtcagccccccgcccggccagccgccccatccgggaggtgaggggcgcttctgcccggccgcccctactgggaagtgaggagcccctctgcccggccacgaccccgtctgggaggtgtgcccagcggctcattggggatgggccatgatgacaatggcggttttgtggaatagaaaggcgggaagggtggggaaaaaattgagaaatcggatggttgccgggtctgtgtggatagaagtagacatgggagacttttcattttgttctgtactaagaaaaattcttctgccttgggatcctgttgatctgtgaccttatccccaaccctgtgctctctgaaacatgtgctgtgtccactcagggttgaatggattaagggcggtgcaagatgtgctttgttgaacagatgcttgaaggcagcatgctcgttgagagtcatcaccactccctaatcttaagtacccagggacacaaacactgcggaaggcagcggggtcctctgcctaggagaaccagagacctttgttcgcttgtttgtctgctgaccttccctccactattgtcctatgaccctgccaaatccccttctgcgagaaacacccaagaatgatcaattaaaaaaaaaaaaacaaaaaaacaaatatttacgtatgataatgagaagaacactgtcctagatggctgaaatgctaatagtctttaattcactattttcttattctgactgttgcaaagatttgtagtttt

SEQ ID NO: 16308 - DNA, 670 bp, Artificial sequence
  DNA replication origin
tgcctaggcccaaggcctagcccacctagaggtcaaaatgaagcatcgcttgccagggcagacggcaaagctaagtgtagcaaatccaggtcaggaagcccagaggaggccagaggctggaaaggcaggggcaaagtctcaaatgtgggcacatgttgagcatgtcaaagagaaagacaccaaggggacctcagtgaggggcttgagatcagaggatgtggatgatgatcgggaggaggcagaggtagggcagtagtggttgactaacaaaggggcagcaggagggtggtgacagtccagaagacttagagatgatggggactgagataggtggtaagagcgggagactatgttggggctgtggcagcaaaggtgacaaggtgacagggtcgggtggggacagtcaaggtgacaggagagatgggaatgaactagcaagtgacaggttgggttggaggtggttgacaaagggttggtccagatagccacaggcttgggcatggggcaggggcagggatggtggcaatgctcaagaaggtaacacgatgatgggaactgggtcaagtgacagcgtgggtaagaaaggggcagtggttgtgatgcagggatgatggtgagggtgacaaatgagtgacagggtcagagaggagtgatgaccatcaaggtgacc

SEQ ID NO: 16309 - DNA, 903 bp, Artificial sequence
  DNA replication origin
cagtttctttctgacaggtctcctcctgcccgcaaggaagtggggtgatcacagggcgcaggtggtctctatgacagctgcatcctctccagccatggccctgaaccctgcctataatcccaccattggctctcagatctgcctaagcctctcagcccccttgacgtcccctcccttaagcgccctccgaaggccacccgtccctcaaagctcctcacactccatgcccgcagctccctccacccggcgtccgcaccagcctcccagccgaggtggggcgggggcgagggggcgcgcactcctcggcgctccgggactgcagggcggggctgcagggcgggcggggcccgtgtctccagcgctcctataaagggagccaccagcgctggaggccgctgctcgctgcgccaccgcctcccgccacccctgcccgcccgacagcgccgccgcctgccccgccatgggtcgacagaaggagctggtgtcccgctgcggggagatgctccacatccgctaccggctgctccgacaggcgctggccgagtgcctggggaccctcatcctggtggtgagtggagggagccggggaagcccttctctctccagcccttgcactccccaaactctcacttccccgaaggggctgtgttttccaaggtagcctggacccacctccccagctgtgacccccacgcttaaccgcggaggatcaagctgacttccaaagtcctcttccccacggttctaaccccctctctgacagctccgactcttgccagaatgacagctgttactccccagtgatagtgccgatcgtttaccctcccacaagtgactcagccaacaggctgggggcagcggtcacgcttgcagtctgggacagccagccacttcccctgcctc

SEQ ID NO: 16310 - DNA, 1345 bp, Artificial sequence
  DNA replication origin
tagaaccgtggggaagaggactttggaagtcagcttgatcctccgcggttaagcgtgggggtcacagctggggaggtgggtccaggctaccttggaaaacacagccccttcggggaagtgagagtttggggagtgcaagggctggagagagaagggcttccccggctccctccactcaccaccaggatgagggtccccaggcactcggccagcgcctgtcggagcagccggtagcggatgtggagcatctccccgcagcgggacaccagctccttctgtcgacccatggcggggcaggcggcggcgctgtcgggcgggcaggggtggcgggaggcggtggcgcagcgagcagcggcctccagcgctggtggctccctttataggagcgctggagacacgggccccgcccgccctgcagccccgccctgcagtcccggagcgccgaggagtgcgcgccccctcgcccccgccccacctcggctgggaggctggtgcggacgccgggtggagggagctgcgggcatggagtgtgaggagctttgagggacgggtggccttcggagggcgcttaagggaggggacgtcaagggggctgagaggcttaggcagatctgagagccaatggtgggattataggcagggttcagggccatggctggagaggatgcagctgtcatagagaccacctgcgccctgtgatcaccccacttccttgcgggcaggaggagacctgtcagaaagaaactggccgcatctctccaggatgactggacccaacagatcctcagttcgaggcaggaggaggaggctgcgagccccaagtgagaagcaacactgtctcttctgtcaggacagataaggcaccgacccttcaaggggacagctagtgtcagaggggcagcagtccagactcaggtgggcacacagacacacgtgctgagttccaaccagacttcatgggcccttctccctgtgctatgagcacgtcgtgtgtcgcatgtcctggccagctatgtccacagctgtgtctacacatggcggatgtcctgtgtgcctaattgtacggctgggcattcctcgtggctgtgcacatgcctgttgaacatggctaggtgacctagcttgtcacacgtgtacctgcgtgcattgctcacatggctccagaggctgagctgcagttgccccgacatgccacatgccacatgtttgccagcaggctgagtcccagctgtttttaaccctctcctctcccatctgacttacccccagccaaggaagagtctgtctcttttttttttttagacggagtctctctctgtcgcctaggtggagtgcaatggcgtga

SEQ ID NO: 16311 - DNA, 999 bp, Artificial sequence
  DNA replication origin
ctgcagagggcccctggctagaggtctcgagctctggcagaggaggagccgggagggggcagggtctggcgggctctcaggccaggggcacccgcgatccagaggccgcccaggccatgctccaccacctgggcgcccagctacaggcgccgggcaactcccaagctggctggcgcgcccagcctcgcagaaccggggctagatgtcgccgtggctgcggccaagccaggcggtctgcccggcggcggctgcaccggggcaggaaccgaccctcagccccatccccgcggacggtccctggagcggccccgatctctcttcggagaagaggggcgggagtcacggccaggcgggaagggatgcgcgcctgagattccggaacgtcccgcgccagcccaggagaacccgcaagccagcggcgcctgagcccgagctgcagtcaccctctgcgggccacgcgagctcgagggcgccttccggagtccgggctggcgctgagctgtaggcgcgcgcctaaccgctttactgggctcactctatcgagaggtcggaggctgcgagtgtcgctgctgaaggctgtagtggaccgggctggatcgcggattctgagctacatcgcgggtttgggggtgcatcttggatttaggggtggatcgctgggtggggagggggatctcgaatttggagctgggtgggggtggaaaggccacgaggagccgcggcgtctcaggagcgggtggtgggcatctgagaagtcgccaccatgaggaagctcctcagttttgggagacgcctgggccaggcgctcctgagctccatggaccaagagtatgcgggtcgggggtaccacattcgggactgggaactgcggaagatccacagggcggccatcaagggcgacgccgcagaggtggagcactgcctgacgcgcaggttccgggacttggacgtccgcgacagaaaagacaggtagcgggggctcagccctcggtgggaggg

SEQ ID NO: 16312 - DNA, 1017 bp, Artificial sequence
  DNA replication origin
tggtggccttgtcagcatgggctgggtcactggtgaccagctcaaggggtgctattcagtggaggcctggtcacatgggacccagtcagcagggcctgctggccatgtcctcaccagtgaggcccttgtcagtggggccctggtcagcgcagcctggtcagtggaacctaatcagtgggggcctgttcagagagagcacattctgtggtggctcttgtagctctggtctgtggggtgacctggtcagcagggatctgagcagtgggtgcctattcagtggggcctactcactagggtcacagtcaggggcatctggtcccctacggcctggttaataggggcctgatcagtggcagcctgttccctggaggcctggtcagtggggcctcatctgtggtgccaggcattggggtcacgatcagtggaacctggtcagtgaggcctagtcagtaaggacctggtcagtgaggccctggtcagtaaggtcctggtcagtggggtcctggacactgtgggcctagcagcaagggcctggttagtggggtctggtcatggggttctaatcagtgagggtgtggtcaggaaggacctgatgtgcgggatatggtcagcagggacctggtcagcgggggctgctgagcactgctgggagatgtcaggtgcaatgcacgttatcgagggcgctgtggacagtcaggatggcccagtagtgcccaaaggcccagtcaaaactggacaaagcaggtgtttggatggacctgggagatcttgctcagagattctgacaggacaaaggtaaaggaagggccagagtggccggatagatggtcacagtctatgggctgcacaggatgaggaagccagagaacaggcaaggtgggcagcaggggtgcagggagaggcaggtgcatgctgggaggtcagaccctgtgagggctgtgggggcgtcaggtggggtgggctccaggtgcaccctcagtgcactgggcaggtctcagcccaggctccctggacccc

SEQ ID NO: 16313 - DNA, 1144 bp, Artificial sequence
  DNA replication origin
tcagagagctcagggttgggggtaaggtcatagatcaacaggatcccaaggcagaagaatttttcttagtacagaacaaaatgaaaagtctcccatgtctacttctttctacacagacacagcaaccatccgatttctcaatcttttccacacctttcccccttttctattccacaaaaccgccattgtcatcatggcccgttctcaatgagctgttgggtacacctcccagacggggtggtggccgggcagaggggctcctcacttcccagtaggggcggccgggcagaggcgcccctcacctcccggacggggcggctggccgggcggggggctggccccccactccctcccggatggggcggctggcctgccgggggctgactcccacctccctctcggacggggtggctgccgggcggaggggctcctcacttcccagacgaggtggctgccaggcggtgacgctcctcacttctcagacggggcggctgccaggccgagggtctcctcacttctcagacggggcggccgggcagagacgctcctcacctcccggatggggtcacggccgggcagaggcgctcctcacatcccagacggggcggtggggcagaggtgctccccacatctcagacgatgggcggccgggcagagacgctcctcacttcctagatgggatggcggccgggtagaggcactcctcacttcctagatgggatggcggccgggcagagatgctcctcactttccagactgggcagccaggcagaggggctcctcacatcccagacgatgggcggccaggcagagacgctcctcacttcccagatggggtggcggccgggcagaggctgcaatctcagcactttgggaggccaaggcaggcggctgggaggtggaggttgtagcgagccgagatcacgccactgcactccagcctgggcaccattgagcactgagtgaacgagactccgtctgcaatcccagcaccttgggaggccgaggctggtggatcactcgcggttaggagctggagaccagcccggccaacacagcgaaaccccgtctccaccaaaaaaataggaaaaccagtcaggcgtggcggcgcgcgcctgcaatcgcaggcactcggcaggctgag

SEQ ID NO: 16314 - DNA, 791 bp, Artificial sequence
  DNA replication origin
tctaggaagtgaggagcgtctctgcccggccgcccatcgtctgagatgtggggagcacctctgccccaccgccccgtctgggatgtgaggagcgcctctgcccggccgtgaccccatccgggaggtgaggagcgtctctgcccggccgccccgtctgagaagtgaggagaccctcggcctggcagccgccccgtctgagaagtgaggagcgtcaccgcctggcagccacctcgtctgggaagtgaggagcccctccgcccggcagccaccccgtccgagagggaggtgggagtcagcccccggcaggccagccgccccatccgggagggagtggggggccagccccccgcccggccagccgccccgtccgggaggtgaggggcgcctctgcccggccgcccctactgggaagtgaggagcccctctgcccggccaccaccccgtctgggaggtgtacccaacagctcattgagaacgggccatgatgacaatggcggttttgtggaatagaaaagggggaaaggtgtggaaaagattgagaaatcggatggttgctgtgtctgtgtagaaagaagtagacatgggagacttttcattttgttctgtactaagaaaaattcttctgccttgggatcctgttgatctatgaccttacccccaaccctgagctctctgaaacatgtgctgtgtccactcagggttaaatggattaagggcggtgcaagatgtgctttgttaaacagatgcttgaaggcagcatgctcattaagagtcatcaccactccctactc

SEQ ID NO: 16315 - DNA, 1101 bp, Artificial sequence
  DNA replication origin
cgcagtgtttgtgtctctgggtacttgagattagggagtggtgatgactcttaaggagcatgctgccttcaagcgtctgtttaacaaagcacatcttgcaccacccttaatccatttaaccctgagtggacacagcacatgtttcagagagcacgggttgggggtaaggtcatagatcaacagcatcccaaggcagaagaatttttcttagtacagaacaaaatggagtctcctatgtctacttctttctacacagacacaggaacaatctgatttctctatcttttccccacatttcccccttttctatttgacaaaaccgccatcatcatcatggcccattctcaatgagctgttgggtacacctcccagatggggtggcggccggacagaggggctcctcacttctcagacggggtagctgccgggcagaggggctcctcacttctcagacggggcagctgccgggcagaggcactcctcacatcccagatggggcagtggggcagaggcgctccccacatctcagacgatgggcggccgggcagagacgctcctcacttcctagacgggttggcggccgggaagaggcgctcctcacttcccagactgggcagcggggcagaggggctcctcacatcccagactatgggcggccaggcagagacgctcctcacttcccagacggggtggcggccgggcagaggctgcaatcttggcacttagggaggccaaggcaggcggctggaaggtggaggttgtagcgagccgagatcaggccactgcactccagcctgggcaacattgagcactgagtgaacgagactccatctgcaatcccggcacctcgggaggccaaggctggcagatcactcgcagttaggagctggagaccagcccggccaacacagtgaaaccccgtctccaccaaaaaaatacgaaaaccagtcagacatggcggcgtgcgcctgcaatcgcaggcactaggcaggctgaggcaggagaatcaggcagggaggttgcagtgagcagagatggcggcagtacagtccagcttcagctcagcatcagagggagaccgtggaaagagagggagaggga

SEQ ID NO: 16316 - DNA, 1593 bp, Artificial sequence
  DNA replication origin
tggtccctgatggaccgttggtgccttcttcctttgctggacggtgatctgtggctgtttctccggtgtgttcgcagtggttgcctggcttggtaacaaacactcttcagagccacagcctgtgctcgggctcctcgccgcctcccaggccctgcgatctctttgcatcccaggaggtcccggttggttgcagtcctcctgggtgactcaggaaccagcctctcctgaagcacacagcctagggagttcctggggccagagacatctccaagggaaggtcaagggcctggaggatgtgcggacctgacgacagatgccccgcacgctggccgggaccgggaagggcggtcaagtgtggaaagggtctggcggctgccaggcctggcagagtggagcggggcggggcgcagcggggcggggcgggcctggagctgcacccgcttctgggtggacgcacttggcgagcggcgcgggatgcagacggctgcgaggcgctgggcacaggtcagacgtcagtacccgcagggggcttgaaactggaggagggctcgaagggagagggagccccgccaaggagcggggctgtgatggagagggggttccgactcgcatgggacctgcgggggagggtacgcggacagggaggggataccgactgggaggggctcagggacagggatggaggctcctctaggggaggacgggaggggatggagggccctggtgtcgcagaagcccacctggggccccctccgggctgcggcaccgatgcgcacactactcccaccgcccccgagtgcctatgtccggctggccgcggccctggaatgaatattgctcagtcccccgcgagtcaggtctgccgcgttgcagggtgaggggaaggtgtgaagccccgggcctccgtctgccccgtgagtccgggaacgcgcgcccccgtggatgccacctggcccctgagctgtgtccagtcacagctcacatagctctgggcactggtaccccgactgcctttccttgttagctgcgatacacaaatacatgagccagatcctttcctgaggccaggaagcctggaatctaataacattgggcggtggataaagtcccccgatccagtgcttagcttccgttaatggagccatggatggaagcggatgtcaggcgcagtgggggagaaatttgcgggggtggccctgtctagggccagagaaacaacctctgaagcttagatccagccctagagggaagaaagatgtgagtttcagccagggaaacctagcactttaagaaatagaaaccctttcaaaatttgagggcaggtagctctcctaaaagttgcagaaatggccacttctttcacgttctcttcgactgctttctgccgtgtctgccgttttcctcctcccgcacctttttgtctcctagggtggcatagccttccaaacagatctgcctacagcattttacctgcaattttacactgattttatagaaaggatggcttattgttcatgagaaacgtgtactgtttttaaccagatgtgttatattttcagtataacctgggtgttgtgcagtgggaaattacgg

SEQ ID NO: 16317 - DNA, 1177 bp, Artificial sequence
  DNA replication origin
ggccgggcccttctcctcacactcgggccgggcgagaggagaggtcgagggagttaggagaattcgctacgggtcccggtcccgggcctcccccccccggagggggcctcaacttggggggggggagaggaggtggaagcggaggaaggcggcggagggccggcgatggtgaagggagggggccgggccggcccgggaacgccgcgctcgctcgccctctcgttctcttcgggggccgcaggggccggagggcgcgcggggcaggagagggtggggggagagcggcgtgcgggggtctcgcggcggtggcggcgggggctgcgcggggggaggggcgacggcggaggaggaggagagcgagagcgcctcgcgccgcgggagcaacggagccgagaagcagggagggagggagggagggagagagggaggaggggcgcacgccgggtgctgggcggctctcagcggctggcggcccgacgcgcgtgcgcgtgcccctccctcccctccccccaccgtgcctggctctcctccactaccacctcctcctcctcccgtttccacgcctcctctcggtctcccgcgcggtcgcggcgctttgtgacgctggcgcgtgtcccccgcccataaagatcccagaagcagcggggaccaagggcgggcgcagggattgccgtggccccagagtgacggttgtgcggctggacgccgcagttccaaaggcgtgcccgggaagggaacccaggtctcccggctctcggggccctccccactgtggatccaggggcctccgcagccatcctgggacgggcctggtcgctgcaggcccctccccgtgacacccagtctgcggtccctccacttagtagctacttgattaggatgtgctgacaatgtgggtcttttcggtgggaacagaccttcccgcaggccagcccacaggcaagtgtgccctttggcacgttactcaccctgggtgcggcagttccacgtgagaaacggggtgagacaaaaaggtcagcttctgcttcccttcttaactacaaagaggaagttgtgaggaaaaagacaataacaaactgggtctctagcccttctcattgtgatttggggcaagtgctcaggctgcccttcgccttcgccatttgtaaaataaactactgtggttgaacttaggggt

SEQ ID NO: 16318 - DNA, 761 bp, Artificial sequence
  DNA replication origin
cgcgagacccccgcacgccgctctccccccaccctctcctgccccgcgcgccctccggcccctgcggcccccgaagagaacgagagggcgagcgagcgcggcgttcccgggccggcccggccccctcccttcaccatcgccggccctccgccgccttcctccgcttccacctcctctccccccccccaagttgaggccccctccgggggggggaggcccgggaccgggacccgtagcgaattctcctaactccctcgacctctcctctcgcccggcccgagtgtgaggagaagggcccggcccggcctgcgtcgtgtgtgaggaggaccccgggcgggcccacgggccgtgtggggcctggtctggcccgccgggtgtgtgaagaccggggcccggtgctgcccggccggagggcgagcggaggggaggggcctggtccggcccggccggtgcgtgaggactggggcccgggcccggcgccgccgccgccgccgccgccgcgatggcccagcagcagatgaccagctcgcagaaggccctgatgctcgagctgaaatccctgcaggaggaaccggtggagggcttccggatcaccctggtggacgagtccgacctctacaactgggaggtggccatcttcggaccccccaacaccctctacgaaggcggctacttcaaggtaccctcaccctcctcccggaccctgcttccgcggccgaggcctccggctccccgccgctttctgcagttcctgggaccag

SEQ ID NO: 16319 - DNA, 1057 bp, Artificial sequence
  DNA replication origin
tccgcggccgaggcctccggctccccgccgctttctgcagttcctgggaccaggagtatgagcacgggcgagtggagggggcttctcacccgtgcagccccctcccccatccctggaggcaggaaggccttgctcgccgagtgccttttctttgtcatgggggcgggggctcgggcgggggcgggagggcaggctgcaccgggaaatcggagagcctctctggttagggtagtgtctacgggcggaggaggccgcctttgtttcccccgctgagggtgggtggaaagagcggtggtctatctgtgctttttcgttctccggtcggaacccctccctgcgcaggctggaactgccccagagggcagggtgacctgcaccgactggattggacttttcttttttggggggtgggggtgggggtggggtgggggaggggcaccagcttgtcatttcagaagctgccgagtgccctgacattttgaggatttgttgggcatcttgggtagtggtagtgccaactttgcattccaatgggtggtggtgaagaatgggaccctaggggtggtaaaaaaaaaaaaaaaaaaaaaaagggtgcccgcgtcgtcttgtcattatccatttgggggaactttaaccctctttccgttcacattctctgcttacctcagtcactggttctttcaaaatgccctttgtcctcaccatgccaccaagtttgccaacctttttttctacaggtagaagtatccacaaagggtggaacgagtcatgtagggagactgatagcttcctactttcagagacaaaattgaaacctgctcaagtggttaactctagctaaaggggtggtctcacagatgacaagtatcatctgaggcgagatcgtttctctgggtgggatgtatggttccttagcgaccacagacattgtttctgttgttttatatggtcttagaacagtggttatcattccagaatctaatgatttttttttaactccaaggtagttaacttggagataatgagtgtttgttttgttttgtttttacttgagtgt

SEQ ID NO: 16320 - DNA, 1251 bp, Artificial sequence
  DNA replication origin
aagacaagattccttgagactagcctgggtaacatgatgaaaccccatctctacaaaaaaattagccaggtatggtggcatgtgtctgcagtccccactactcgggaggctgaggttgcaggcagttgtgatcacaccactgcacttcagtgggtgacagagccagaccctgtatcaaaatgaagaagagaaggagagggagggagaagggggggagggggagggggaggaggaaggggaggaggaaggggaggaggaaggggaggaggaaggggaggaggaagggggggaggagggggagggggaggagggggagggggaggaggaggaggaggggaggaggaggaggaggggaggaggaggaggatggggaggagaagaagaggagaaggaagaagaagaaagagggaaggaaggaagaagaagaaaaaataaggtaggagggaggagggtgaggaggaggggaaagaggagggggagggagaggagggagagggaagagagggagagggagaggggaaagaagaagaaaagaaaaagaagaaaaaaaggaggaggaggaagaaggccacgacgacaagattccttaattcaaatgcagttaagacatcggatgcatgcaggcagatttaatatgggaaccaccacagtgtcgtttctttggctctagaaaggcttcttcctaaactggaagcatatctatacttttctcagctgcctacaccaagtaagatgctgcaaatgtgtgtgtgagggtgtatacaccctaggaggggttcttgtggggcaagggcttggatttactcataggattatcaagttccagcactgttaataaaaattgttggcttaaaaatttactcagaaaccttggacatacagagttgttgagctgaaatcctaagctatcatgtcatatttacaaaataatgtcaagtgataaaaggaacaaagagcccagtgtagtggctcaccctataatcccagcactttggaagaaggccaagataggtggattgcgtgaacccagcagttcaagatcagactgggcaacatggtgataccccgtctctaaacaaaatacaaaagtcagccagacatggcaatgcatgtctgtagtcccagctctttgggaggctagggtgggaggactcactgagcccgggaggtcaaggctgcagtgtgctgtgatcgcgccactggactctaacctgggtgacaaagcaagaacctgtactcccccaaaaaaca

SEQ ID NO: 16321 - DNA, 1370 bp, Artificial sequence
  DNA replication origin
tatagattaacagcatcccaaggcagaagaatttttcttagtacagaacaaaatggagtctcctatgtctacttctttctacacaaacacagcaacaatctgatttctctatcttttccccacatttcccccttttctattcgacaaaaccgccatcgtcatcatggcccgttctcaatgagcagttgggtacacctcccagatgaggtggcggccgggcagaggggctcctcacttcccagaaggggtggccgggcagaggcgccccccccacctctcggacggggcggcggccaggcggaggcgccccccaactccccaacggggcggctggccgggcgggggctgccccccacctccctcccggaaggggcggctggctgggcggaggctgccccccacctcccagacgggccggctgccgggcggagacgctcctcacttcccagacggggtggctgccgggcggaggggctcctcacttcccagacggggcggctgctgggcggaggggctcctcacttctcagacgggtcggccgggcagagacgctcctcaactcccagacggggtcgcggtcgggcagaggcgctcctcacatcccagatggggtggcggggcagaggcgctccccacatcccagacggggtggcggggcagaggcgctccccacatctcagacgatgggcggccgggcagagacgctcctcacttcctagacgggatggcggccaggaagaggcgctcctcacttcccagtctgggcagcagggcagaggggctcctcacatcccagacgatgggcggccaggcagagatgctcctcacttcccagacggggtggcggccgggcagaggctacaatctcggcactttgggaggccaaggcaggcgggtgggaggtggaggttgtagtgagccgagatcacgccactgcactccagcctgggcaacattgagcactgagttaatgagacactgtctgcaatcccggcacctcaggaggcctaggctggcagatcactcgcggttagcagctggagaccagcccggccaacacagcgaaaccccgtctccaccaaaaaaatacgaaaaccagtcaggtgtggcggcgcgcgcctgcaatcgcaggcacttggcaggccgaggcaggagaatcaggcagggaggttgcagtgagccgagatggcggcagtacagtccagctttggcttggcatcagagggagaccgtggggagaggggaggcttgtatttttaatagagacagagtttcactgtgttggccaggctggtcttgaactcctgacctcatgatcttcccacctcagcctctcaaagtgctgggattacaggcaggagccaccgcgc

SEQ ID NO: 16322 - DNA, 835 bp, Artificial sequence
  DNA replication origin
gatgtggggagcgcctctgccccgccaccccatctgggatgtgaggagcgcctctgcccgaccgcgaccccgtctgggagttgaggagcgtctctgcccggccgacccgtctgagaagtgaggagcccctccgcccagcagccgccccgtctgggaagtgaggagcccctccgcccggcagccaccccgtctgggaagtgaggagcgtctccgcccggcagccggcccgtctgggaggtggggggcagcctccgcccagccagccgccccttccgggagggaggtggggggcagcccccgcccggccagccgccccgttggggagttggggggcgcctccgcctggccgccgccccgtccgagaggtggggggggcgcctctgcccggccaccccttctgggaagtgaggagcccctctgcccggccgccacctcatctgggaggtgtacccaactgctcattgagaacgggccatgatgacgatggcggttttgtcgaatagaaaagggggaaatgtggggaaaagatagagaaatcagattgttgctgtgtttgtgtagaaagaagtagacataggagactccattttgttctgtactaagaaaaattcttctgccttgggatgctgttaatctataaccttacccccaaccccgtgctctctgaaacatgtgctgtgtccactcagggttaaatggataaagggcggtgcaagatgtgctttgttaaacagatgcttgaaggcagttaagagtcatcaccactccctaatctcaagtacccagggacacaaacactgcagaaggccgcagggacctctgcctaggaaaacca

SEQ ID NO: 16323 - DNA, 1213 bp, Artificial sequence
  DNA replication origin
acccctggggctgggtggggcccagccgacctggacgggggaaagtaggaagaagcacagggcaacgtgaggggaagaggaaggagggagcccgggcctggacgtagagggaccgtggacctggcgagtgaagctcggcccggtcctcacgggtgggcgccggggcagtctgcaggcggtggggtttcagacgagctgaacccagaattagaaagcacacgctgcagcgctcagggccctggaagagggaaggagagggagaggatggcaattaccgctgctgctctcggaggacccaagacccgctgccgccgccgccgctcgttacctgccaatgtgcctcttacaaagcggcggcggcggcacaggctgcccaacccgtcacgtgacctcgcgtcacgggcgaaggaggagccacaacacgtcgctcgtgcgcggcttcagagtcagcctaggcggcgcgcggcctcttccagccaccacctccaccccaaccccgcgaagccaaccgcgtggaggtggggaccacagaaaggaacaaataagggagacttgataatatgtattgtactcggagtcatcaggagagtattacccaccgcatacaaggtgcccacaactgcagctcgtcgtcgcgccgtgatgacctcacaaagcaccacaggttactcccctgtggccgccctgtgctcatcacgtgatgtggtccaaccactcagggcaagcctggcctcccaaatgttgcacgaggggaccacgactcccaacatgctgcacagccaaggcgacccctaccgcagcctttctccagcgggcttctagacgaaccccctagagaccttagagccgagggaaggccgggacggaaagcggactaagctggcttgaaggactaataccattggatgccgcccgccatgtggcggagcgtggtgcctgctgggaggtgtagtcctggcggggggtggggttccgctcccacgttcctgggctcgctctgcgccctgccccctgcgcgggaaaacgccaacggctagcagcgagagcctcggcaaggcggaaggtgcgcccacttttagtctttttcagtgcggttttacttttgccctcccaagccccttctgggtgaaaagactagaatctactgaacgcctactccaagtcagccgtttatttctgttatatcatataatcaactccttgagtccaggat

SEQ ID NO: 16324 - DNA, 1241 bp, Artificial sequence
  DNA replication origin
ccctcccggaccgggcggctagccgggcagaggggctcctcacttcccagtaggggcagccgggcagaggcgcccctcacctcccggaaggggcggctggccgggcagggggctgacccccccgacctccctcccggacggggcggctggctgggtagagggctgacccccccacctccctcccggacggggcggccggccgggcgggggggctgacccccccacctccctcccggacggggcggccggccggacgggggctgacccccccacctccctcccggaccgggcggctggccgggcagaggggctcctcacttcccagtaggggcggccgggcagaggcgcccctcacctcccggacggggcggctggccgggcggggggctgacccccccacctccctcctggacggggcggctggcctggcggtgggtgacccccacctccttcctggacggggtggctgccgggcggtgacgctcctcacttctcagagggcgcggcttccgggcggaggggctcctcacttctcagacggggcggccgggcagagatgctcctcacctcccagacggggcggcggggcagaggcgctccccacatctcagacgatgggcggcctggcagagacgctcctcacttcctagatgggatggcggccgggaagaggcgctcctcacttcctagatgggatggtggccgggaagaggtgctcctcacttcctagatgggatggcggccgggcagagacgctcctcactttccagactgggcagccaggcagaggggctcctcacgtcccagatgatgggcggccaggcagagacgctcctcacttcccagacggggtggcggcagggcagaggctgcaatctcggcactttgggaggccaaggcaggcggctgggaggtggaggctgtagcgagctgagatcacgccactgcactccagcctgggcaacattgagcactgagtgaaccagactccgtctgcaatcccggcacctcgggaggccgaggctggcggatcactcgcggtcaggagctggagaccagcccggccaacacagcgaaaccccgtctccaccaaaaaaatacgaaaaccagtcaggcgtggcggcgcgtgcctgcaatcgcaggcactcggcaagccgaggcaggagaatcaggcagggaggctgcagtgagcggagatagcagcagcacagtccagcctcggctcggcatcagagggagac

SEQ ID NO: 16325 - DNA, 1003 bp, Artificial sequence
  DNA replication origin
ccagccgccccgtccaggagggaggtgggggggtcagccccccgcccggccagccgccccgtccgggaggtgaggggcgcctctgcccggccgcccctactgggaagtgaggagcccctctgcccggccagccgcccggtccgggagggaggtgggggggtcagcccccgtccggccggccgccccgtccgggagggaggtgggggggtcagcccccccgcccggccggccgccccgtccgggagggaggtgggggggtcagccctctacccagccagccgccccgtccgggagggaggtcgggggggtcagccccctgcccggccagccgccccttccgggaggtgaggggcgcctctgcccggctgcccctactgggaagtgaggagcccctctgcccggctagccgcccggtccgggagggaggtgggggggtcagcccctcgcccggccagccgccccgtccgggaggtggggggcgcctctgcccggccgcccctactgggaggtgaggagcccctctgcccggccacctccccgtctgggaggtgtgcccggcagctcattgagaacgggccatgatgacaatggcggttttgtggagtagaaagtggggagaggtggggaaaagagtgagaaatcggatggttgccgtgtttgtgtagtaggaggtagacatgggagacttttcattttgttctgtactaagaaaaattcttctgccttgggatcctgttgatctgtgaccttacccccaaccctgtgctctctgaaacatgtgctgtgtccactcagggttaaatggattaagggcggtgcaagatgtgctttgttaaacagatgcttgaaggcagcatgctcgttaagagtcatcaccattccctaatctcaagtacccagggacacaaacactgcggaaggccgcagggtcctctgcctaggaaaaccagagacctttgttcacttgtttatctgctgaccttccctccactattgtcctgtg

SEQ ID NO: 16326 - DNA, 1121 bp, Artificial sequence
  DNA replication origin
ggtttcccgctttggccgcctcgccaaacccaagtcttacactcttagtgaccccctcctttcctccttcccccttaggtcagcagggtttactcattccaattgcaatgctccatgttgccggagtagctcctcgctagaagagagattagttatgtcaccgtcggctcctcccattggtccgggcgtgtggagcgcggcgccatgacgtcagacgcccaaatgagtggggcggtgaggggaaggaggagggaagtaggacttcaacatggcggctgcggcactggcggtggctacggtgacggcctggcccggagcgggcagagttggaggtggtggcgttcgctctccctaggggctgtcgggagctcagcggggaccgagcctgggaggccggccggtgccagcacctttcggcttctgagacggcggcagcagcggcattcaggtgaggggggcctccctctgggggagggggaagaggggcggagttgggggaggggggctggtactgggagactgggaaacgggatggggggccgagcgaggtgaagggcgccggagctaggaggtgggagggaaaagtggccggagatccgcgattcggggaggattctgggagaagggtcggagtgaggggaccggagttgaaggggcggaggggaagtgggatgcggaaaaatgagttcggattaaggagactaataccctactggaagacaggcatagtagacatctatcgggctggactgagaactcggtgggaactagaggatgtcagggagggggacccagattttagtaaagaaggtgagtggtggggagttgagggtgagctggggacgtgcggtgtagatttagttctccctgaggcaatgagattggggagaaaaggtggagactagaccagaggtgagtgatctttggggatatctttggccttgtctggtcttctccaggtatgtttatccgccttttttgtttcttgggtggaggcttacctatacagtccacctgggcctcaggaaccgccccagtctttcttgtggaacgtcaggttcatttatttgagctatatcagtgatctttgacctttgttgccaaatgtaattgtttccaga

SEQ ID NO: 16327 - DNA, 1030 bp, Artificial sequence
  DNA replication origin
cgtctggagccggcgctacactgagatggcgctgcccttcttctcgctggcggaggtgcgcgtaggctaccagtcacagaacatctcctgcttcttccgcctggtggatcgcgactctgtgtggggctacgacctggggttgcgctcactcatccccgcggtgctcaccgtcagcatgctgggctacccattcatcctacccgatatggtgggcggcaacgccgtgccccagcggacagccggcggcgatgtgcccgagcgcgagctctacattcgctggctggaagtggccgcctttatgccggccatgcagttctctatcccgccctggcgctacgacgcggaagtggtggccatcgcgcagaagttcgccgccctgcgggcctcgcttgtggcaccgctgttgcttgagctggcgggcgaggtcaccgacacgggtgaccctatcgtgcgccccctttggtggattgcgcccggcgacgagacagctcaccgtatcgactcgcagttccttattggggacacgctgcttgtggccccggtgctggagccaggcaagcaggagcgcgacgtctatttgcccgccggcaagtggcgcagctacaagggtgagcttttcgacaagacgccggtgctgctcaccgattacccggtcgacctggatgagatcgcctactttacctgggcgtcctgacccagcccagggcccggtaaccgcaaagcccccagtcttcatgcagaccttgaaccctccgtcacacccgcaccatgtactcccaggaacctcccacctctataccacccattaagtggctgctgacttaaatgtgctggaaccagctgctgaaggtggggcctagggagggggcactgaagcaatctcctgctccaacgcacaatccttactgtgccctttccacccccacactcacaccaatctgcagaaacctcttccctggggtggaagccagagagcttagaggaaaaaggtcagctctcttcctgttatacatggttatacatggttggg

SEQ ID NO: 16328 - DNA, 809 bp, Artificial sequence
  DNA replication origin
tcgggtaggatgaatgggtagcccagcatgctgacggtgagcaccgcggggatgagtgagcgcaaccccaggtcgtagccccacacagagtcgcgatccaccaggcggaagaagcaggagatgttctgtgactggtagcctacgcgcacctccgccagcgagaagaagggcagcgccatctcagtgtagcgccggctccagacgctggggtccggcagcggccggtaggtgctgaagtcccgcggcaggtagctgacctcgcccgcgtcgaacttgaaggaagccacggagtagcgagagcgcagccgccgcaggtgtccctggaaccagtcgcgggcctttgggtgcgtgaagtctagcaccgcgccgatgccgttccaccagcgcaccagcgcaggtaaccggcccgtgggttcgcgcacgaacagctcgcgctccacgccctcgccgaagcgcgacgagttgtagttgacaaaagggtgcacccagagcgtgacgcggaagccggcgtcgcgcaggcggcggaacatgtcgctggcgttggggaatttgacctcatcgaagtcgaagtcgccataagcaggtgtgtacatgtcgtcgatttccaggtggctgctgttgaagtggtgcaggcggatctgttgggcaaaacgcagcaccttgtcctggtccacggcgcgcccgtacagcgcccatgtggaccaaatggggtctcggaaggcctcgggtgctggcacccttgacggcttgttgaagtagcgacgcaccatgtacttgtggatggaggtgacgtctgagcccacgcacac

SEQ ID NO: 16329 - DNA, 1470 bp, Artificial sequence
  DNA replication origin
gctcagctctggcgctgcggcgcggccggcgggtggcttgtagggcgtgtcgtggtagcgcgcctgaagccgcagcgagcgctccgtgctgttccagcccaggtggaagggcactgagtcattgactttgatggcggccgcgcgcgaagatagccagtagcgctcgaggatgcccccaaacgcggcgtcggaggagtagacatcgctggtgacgaacggctggggctcctgctggccatccaggcggatgggccagtgttgcgtcctcatctcggcgccaccataccagtgggccgccgcgtcgcccaagaacatggcgtgctccacggcccggcccggcgctgcctcctcccagcgcacgcggtagcacatgaccgtgtccttgggccgcacagtctggatgaagaagtgcagcggcagcccgtcggccgtgagcgagcagcccagcagggcgccatcgcggctgcaggagtcaaggtccagcgcgccggagcggaaggccaggcggaagacctgctctcccttctgattgcggatggagaagccgccagctttcaggtccagcagctccgcgcgaagtcgctccgccttgcgtagggagacgctgtagtagcaccaggccaccaccgcggccagcacaagcagcagccccagaaccgcggagcccagcagcggcttcaggtctttggaaggcttgggcttggcaggtgagaagttgtcgggcaggaaggtgtacatagctgcggctgcgatggcctcggggttctgacggtatgcgtagcagccaggccggcggcggcgggggtaggcctggctcttctcctgagggttctggagcattagtgggctgctaagaaaggagcgggccgtggggccatctgactgagttcatctcaacctgctctgaaaggaggagacagagatggaactgagctatctcatcccatgatatttccatttgctgccgcaagctaagaggaggtgtatactttgggaagatgaatactggaacctgagggcttgaagagtggcaaaggtgagacccttaccaggacaatctgtgcctaacccaccctttctcatgggacctaatgcttgcccaaattaggactctgtgactggggagcggcccatgtgactgggagatggcacccatcctcattttcctagtggagaaacaaaccctgagagggtcaggaagctttccaggatcacaggataagccaggcctccccagatcacacatggggccgttcgggctgaagagacgggaaaggaactagaaaagtcctgctctcctagaggtgtggatggtcagggtgggagagggggtattgtccagccagctccttgagacttttttttttgaaatggagtctctctctgtcacccagactggagtgcagtggcatgatctcagctcactgcaatctctgcctcttgggttcaagcgggtctcctgcctcaacc

SEQ ID NO: 16330 - DNA, 2045 bp, Artificial sequence
  DNA replication origin
gtggggctggggtccccaggcaccgcctcctcatgaataatgcaagatccgggcggtgtcccggacccggaagtggagttgccgagtcaccgcagtggctgagctgctgacaggaggcggcagcggagtaggaggcgaggcaagacctgcggctcggcccggccacagccgcggtagtgctaggcaagcccacggagtcacgccggcctcagccagtctgcgaacctctcgcccccgcccacccctgcatccgcccggcccctgcccgcccgagtggtccggggaggcctagtctgcaccacccgccgggctcctggggccgccgccccgcgcggtcctgtcggcgtccgcggccgcgcccggcccctggcccgctcgcccgccggcaccatgatggaggagatcgaccggttccaggtgcccaccgcgcactcggagatgcagccgctggtgagggggcgggcggcgggcaggccaaggccggagggggcgtcgcttgagggggagggagggaatcaggccggggggatcgtgcggaggggcgccatcggatggggcaaagagatccctgaaaacgtattgccgggggacggggacttgcaggacaagaaaaccgtgggagaatatgctggatgagagcaaagggacctgtaagggcggagggcaccgtcggtggaagcagggcaccgtcggatggaacggagggggcacaaaggtgcacaccgctagtggaggcccatagcagggactggcgagggaactgccatggggcaccgccggcggcaggcccaggggtctgggatgggaggtggggaggcgtttagtcctagaggcctgtgatgcttagggcgggggagccgtcaggctaagagagattgggaatcagcttttagaagaggaggggcttgcccgcctgtccgctggatatacggacaggaacgctgggccggggcgagggacccagtgggggaaggtggttggtgcagaacctgggaattccgttctccggtggggagcgcaggcagaccaggctgggggcatctaaaccgggaaggagagtgcgcggcgaccagatggggaatcggggtgcagatgagagtgctcgggaaccgacgggagaggaagtggggtcgcgctggagctgcctgtgcgcactggttgggaagagcccccatcatcttaggcctacgtgcctgaagtccttgctgggcgcggatcctgccgcctgtccgcggtcccggagtcagggaggaatgatgtcatcgctgctggcgcggagggaatggaagggggagggcaactcgggtgcaccgaggctaggcctaagggagaccatgcttgctggccaccgcccagggggctccctgacctcgcttgtctgtcaggcaaccgggtgggagacgtggaggcctagccagctcgtatagtgaggggggaagagagggaatgtctaggctgtgttcgctttatccccctggagcctgagctggaattggaaggaggcaaggtgggctacaaatccgaaagtgtggatgccccatttctctgagctgtgctggctggagcagagctgagttctccaagttctgaagttctgcttctgtgttaggcagggtggccagaaacaggtctacccttgggcctataaccccctggctgacagatgtgctttgtagcttcctgggcgagtaacctacccattacagcagccaagatgggcctcggcagggacccatcaccacctttttgtcacaccttttgagggatggtagagagaatcattagtggccacttagcaggagacaaaggctttttccccctttcatgactgcttagacagttctaagagccaaaacaaagaagttttacagaagcatacaatattaaaccggagagaggtgttgcaggactttttcctagcctcatgccatcattggattatttgggagccagaaaatcctggagagaagtccatcccatgaacttaaagaaggactttgggctggctgaagataattttcctttctgagttctctttctagcta

SEQ ID NO: 16331 - DNA, 1084 bp, Artificial sequence
  DNA replication origin
cacagaaaataaaatcacactcctgcacatagcctgtcctgtattctgtttagttctcttgcacaccctctgtgggctcccaaacagcaagagctgtgttcccacctagcctggagctaggcacacagcaaagggttggataaagaatgcctttgaggctgggcgccgtggctcacgcctgtaatcccagcacttcggaaggtcaaggtaggaggatcgcttgagctcaggagttagagacgggcctgggcaacatggggaaaccccgtctctaccaaaaacacaaaatttagccgggcgtggtggcctatgcctttggttccagctattcgtcaggctgaagtgggagaatcgcttgcacccaggaggcagaggttacagagagctgagatggcgccactgcattctagcctgggctacagggcgagcctctgtctcaaaaaaaaaaaaagaaagaaagaaagaaaaagaaaaagaaaaattcctttgggacaagaatgtgagaacaaggaggaagggactcgtgggaatggggatggggaagttaaggagaatagactggtcagaatgagtccatggggtaaagtgaagtgaagagatgggaatggtggataaaaggagagaggtaagaaacggtggattggggtagtatgggagaggaggccgggattagtgggaaagagtaggacagagtcagaggtcagtgggagcacttaccagaggtcacgggggtgagaaggctggggtcaacagagaaaagatcaaggatcagtaggagaggtatgattagtggtcactggcgacgacgaaggtcagaggtcatcagaaggaaggtgtgcgtacgttacctgcttatgaggctgtttatggggagccttcgcagaagcaggaatcatctcaacccctggagagcctacaaaacgctccctcgtctgaagacaaaaagtttgtccgtctccttgaccacacacaagaaatctggactctcttccacttcagttaccagtcgcaacggttctttagggacagccgtcgttgtgggtccccgtgcccttgcaggatagaatccaactccctgacgcgg

SEQ ID NO: 16332 - DNA, 1817 bp, Artificial sequence
  DNA replication origin
tgcgggaaccggggttcggccagccaattgagtggcggcagcggcgctgggatggctccgcccccgggccgcaggccgccggcctcccaggaggcgaggctcttcgctgtttttgctggccgccgagcccggccgagcccagccgaacgtagccgagcccagccgagcccaaccgaacgcagccgagcccagccgaacaccgcgcagctcccgccgccgccgcccgagcgctgccgagcgagcgagcgccgcggccgcggaggaggtgcggccccaaggggaggaggtgcccgctcaccgcagaccgcccgcggcagaggccgccccggtcgcgccgcggcgggagcggccggtggaggctgcgcggccgagggggagggccgggggagcggacgtcgcctctgctggtctcccacctcccgccgccccccgcccgcaggctcccaagccttagtcggcgccgagcatcccgctgccccggaccctcccgcgggcgcgcaccaggctcaactcaggtaagaagggcctcccgccacgggcacgggggccaagaacacgcgacccgaagatggagataaagagacagagacacactgccgcggagagagacgaacacaaagacagagacacaggaaccaccgaaaagaccccacggagaaggggatagggacacgtccatgggaacagagggggatacagcctggaagagagagagagacacagagactgatgcagagatacacagagacacactggtagagaaatgagacatagaggagacatactcagagatggggacacacggagaggcagccacacacacagaggtgggtgtgcagaggcacaggcacacatccaacggagggacagtgagacaccagacacacacacacacctgacccagagaggcagccccacatagaggcacacagccctggacgcacagagcctgcacatgcctgccagggcctccacaaagttccctctgtgcaagctggcgcctctggaggtctcctggtcgggctggctggagtcctgggagagaggaggcgcccaggccacaccagagctgcttacaacccccatccttttgggctgggggcttcctggatcccacccaccaacagagggcttttgagggctgcaagcttggtgggcaggaccagggcatgcccaccaggtctaaggagaatgagatgacggctgcctactgcagcttccccacggtggctacacactcattcaggtggccagaaccaagcctgtggatgggggtgatggctctgtggggtattcgagcctgttgggacccaaggtctttcaccagggaggccagaaatgtgggagggaggctctcttccctacctctctcctcctaggcctcaccccacccttcctcctcaccaccctctcctttactgtatacccccaacaggctcaggactgcaggtagacatctccactgcccaggaatcactgagcgtgcagacagcacagcctcctctgaaggccggccataccagagtcctgcctcggcatgggcctcaccattgaggcagctccactgtctgtgctggtctgagggtgctgcctgtcatgggggcagccatctcccagggggccctcatcgccatcgtctgcaacggtctcgtgggcttcttgctgctgctgctctgggtcatcctctgctgggcctgccattctcgctctgccgacgttgactctctctctgaatccagtcccaactccagccctggcccctgtcctgagaaggccccaccaccccagaagcccagccatgaaggcagctacctgct

SEQ ID NO: 16333 - DNA, 1535 bp, Artificial sequence
  DNA replication origin
accagcagaggcgacgtccgctcccccggccctccccctcggccgcgcagcctccaccggccgctcccgccgcggcgcgaccggggcggcctctgccgcgggcggtctgcggtgagcgggcacctcctccccttggggccgcacctcctccgcggccgcggcgctcgctcgctcggcagcgctcgggcggcggcggcgggagctgcgcggtgttcggctgggctcggctgcgttcggttgggctcggctgggctcggctacgttcggctgggctcggccgggctcggcggccagcaaaaacagcgaagagcctcgcctcctgggaggccggcggcctgcggcccgggggcggagccatcccagcgccgctgccgccactcaattggctggccgaaccccggttcccgcaccattggtggtgcgctgaggtggggaccagcccgcctctcgtgccggcgcggggcgggaggagggccgaaggagtagctggccctggatccttcccgggagaggggatggggtgggggcaaggcctaacctctggtagggatttcttgcaccttctacacctggaagggttgtacaccccacatccgagaaaggccaaggcctctgcatttccacatgtgaggaaaccacccctctgtatctgggagaggtctcttaagtaagtcatccggaggaaggccccgcgtccccacacctggcaggagactgaatctcctcacctagggaaccgcctatagtgcagtcccgcacttccctctgccacctgggtgtggactctgcattcccactttagagggccccaggttccctggccctaagaggtgtgaaaatctctggcaacacaggttctttggacacatttactgagttcctacccagtgttggtcgcaggcttgctgccaggctgttggggagtctgggacagaaatggagtgtcctgagcgatggttctgccctggctggaataggtgcaggcgtggtggaaatcctgccttgccatcctaaaagctcccctaagaagaagatagcttggacaggagcagtgaggtagaccttgtcctccccgaccttcacaggccagtgattgtcacctattctgatccggccgtcttctcatcccgctctacatgctctccttggaggatcacatccctgaagctatatcatgaagactcccagtgctcccaagtctagccttaacttctctctggaatcctagactcatataactaagtgcctactgtaatcggggcagtattgattcctggttcacttactaactttgtgatcttgagcaagttactaaatctctcttagcctcagcttcctcatctgtaaaatggttgtaatgctacctctcagggttgttattcactaatttatagcagatcgatcacatctcagcaaatgccagctgacacaacccccaggaccatgtgactaagaggccccttcccccaatccaatgccatgaaattcacataagacccctgtaaatccagatgctatcttgaaagaagaaaggg

SEQ ID NO: 16334 - DNA, 907 bp, Artificial sequence
  DNA replication origin
cccttctcctgccctttctgcagccaggccagacatctgggtgcccgctagacagttatgggcacatagaggttttgaagaggccttgggatcacacagcagatagctaggctgagagctgctgccgatccgcatcgtggggaagagagggtgatgagggaaggcagcaagggcctgggaagtcggctgatttctgggcctttctggctcttgctgattccagtgccaccatctgtctcccccaggtacttccttcacctctcctgtctggaatggatctcccttcattccctaatgctgttgaaagcagggtttggggaagaaggagctgcctggggaataatcatttattttctcactttttagggaccaacgaagtatttcctttccttttctttcctgccctaggcatccctaggctttctgtccctcccctcaggcacggctaggcaacctgaggtgctggcacagtgtggctgttcagggtgtgtatgtgggtgtttcccattgccggtgtcggggcgtgagaggccaagggcgactgggggccctgagcttctggaagtgtacaatggtgtctgtgtggaaggttgactgttcggagtgtgtgatggtatccatatgtgagaccatggctgtgtgagggagtctgtgtgtgtgagtgtgactgtaatgtgtgcacgcacaccagcgtgtacggggctgtgggagtgggtgtccatgtgggaggccctgatgtgtggccacgatggtaggctctgaatgccagtgtctgcgagaggctgcctgggtgtgtctgtgaagctctggccctgtgtgtctgaggaggcgggggctttgagagctctgccgggtgtagtgagagcccaagtgtgtgctctgtctcggggtgaagtgagcgctgggt

SEQ ID NO: 16335 - DNA, 793 bp, Artificial sequence
  DNA replication origin
ctctatgtgcccataactgtctagcgggcacccagatgtctggcctggctgcagaaagggcaggagaagggaaggagatgagacctccactccagccccccagcccccaccaaagccctggcatcactgtcagcccacagagaggtagggcagatgcccagcagcaggaggggagcaggcagagccagcggtgctcctctaactaaccactgaggaggagagtcctaaggtgtccttggaccctgcagccccgcccccatcactggaggagtagacgcggagtcgctgtccagtcagaatggaatccaggctgtgctggccaggccccagcccaggaaagatcggcaatgctgcagacatccttgccacttgccactccaggtgtagctggggccctgatgcctccatcctaaaaggagcctgacgtgactccacggaagacaggcaggacctaaggaaaccaggcaggggtaatgccataaagccaggtgatagggacttcggggaagggggcagtggggacaaaagaaaccaggcagcagggtgtaaggaaaccaggtgacagggccccaaagaaggtaggtggtgggagccaaatgaaatcaggcagtggggactaaagttagctaggaggtgtggacaaatgaagccaggctttggggatcaaatgaaaccaggcaagaggcccacaggatgtgagaaaagaaagatatcaggagctcatcccctctgtctagatgtcacccccacacgctgggcctctctctctgtagccccccttccactcaggcgg

SEQ ID NO: 16336 - DNA, 1521 bp, Artificial sequence
  DNA replication origin
agccaatgggccccggccccatccctgggacctcaggaagtcccagtccctcccaccggctgcagaggcaggggggctggggggagagacagagaagagaaaagaagagagacagcttggcagggggagcgcgccgagcagccgcggggggcggaggccgagaaaggagcgggaagcgccgaggcgggctgggcgggctggcgggcgggcgagcgcggggcgggggcgtcgcggcggcgggggtgacaagtcctccggccctgtggccactgacctgggtccccacgcaggcgccccgtcggtgcctccggcgctccgtgggtccgcctgcccgcctgcgggcatcgggtctgcggggctggggcccgggcagccggaacgacccgggaggcagaagcaacccccacagcggtcccggcgggcgggtgggcgaggggccgggccgcgcggtgagcgacgagggccgagccccgagtgagcgaccgggcaagcgggccgggaggaggggaggaaggagcgcgctgcaagcgaacgagcaagcgagcaagcgagctagcggagggagagtgagggacggcatgcagtgaggtcatcctttgaatctaattgtctgagtcaggaggagatgtggcacttgatgctgggggaggggaggcagaagggaccctccccgctccggtcccggcccctctccacacccaggggtggccggggcctcctttcccctcccaaggagaagttgccgcaggccaactcgggcagaccactgctggtctcagggctgacctctgctgcctggggctatcagcaagtggtgagagatgtgggacccggccccagctcccggctaccttcctcctcccggggtgaccgccacacctcaaggcccagctcactttcccacattttttagggcacgggaggctcccagcctacccccaggtcctattccaggtcctattctgccctgtgaggataaagcaggaacttcagccagccttccaagttgccttactttaggagcacggggccccaactctattccccaagttacttccagtgctgggaatttgggggaatctggaaactgaaccccaggctcaccatcctgccctctgggaatgacagtgcaatgccacccgtcctccagttactttctgcatttgggatgaggaccccagatccgcctttaggagggacaggagcagggccagactcctagggtctccagggagggaccaggctgcccagagggtgacggacaggttggtcactggaccctgggcttgtcaggtgtgcacacccgtacacatatacatgagcacacgcacacgcacacgtgcaaatgcacatccgcatggggtcgggggcaccagacagctggggatactcacaccaagggccataccctcctcccttcgcccctgtgggggaggggtgataaatatttaaggggcttttagctcaaaaggggctggaacgggggagggagggggatccacgctgcctgattaatggggt

SEQ ID NO: 16337 - DNA, 887 bp, Artificial sequence
  DNA replication origin
caccatcctgccctctgggaatgacagtgcaatgccacccgtcctccagttactttctgcatttgggatgaggaccccagatccgcctttaggagggacaggagcagggccagactcctagggtctccagggagggaccaggctgcccagagggtgacggacaggttggtcactggaccctgggcttgtcaggtgtgcacacccgtacacatatacatgagcacacgcacacgcacacgtgcaaatgcacatccgcatggggtcgggggcaccagacagctggggatactcacaccaagggccataccctcctcccttcgcccctgtgggggaggggtgataaatatttaaggggcttttagctcaaaaggggctggaacgggggagggagggggatccacgctgcctgattaatggggttacgggcttggatcaatccgtccgcccgccgctccctcctccccctcctccctccctccgcctaatgcgctttatcaggagacgcttttctgacttggcagcgttgggcgttttaaatagacccatttagagctggggttgggggagaaggaggggggtggagagacagagattgagacaggctgggagacagagacaaatcaggaaagagagatgggccctagaagagagagactgggagaggagagacagaaggaaatgcagagataccattgagataagacactgagggcgaggctcccacggaggctgagatggacagagagagggtgatggagagagagagggtgatgggaggccaaaggaagctggggggctgaggagcagaaacaaacaaacaaaaagagacagggaggaaaggaaccatgggcagcagggagaagcccagagagaggctctctgcaagg

SEQ ID NO: 16338 - DNA, 667 bp, Artificial sequence
  DNA replication origin
ctccctgtctctcattcaggccaggcaaggcccctggattggcagcttgggggtgggggcatccaaggcatcgaggcactggagcggaacggaagggcctattgtccaaaacccgccagaggcccacaaaggccggccgggcttttcatctcagctcccaaacagactggccattttcccggctgggggctgaggggggactaacccttcacaactaggaccaggttgttgttgagggtggagtggggtaccccaggctgacacataaaaggggcttaagatggagctggggcccaggagaggaggaagggaggcctgagaaggctgtagagagttaagcttttcaccccactgttcccagaggacccaaggacatggggtgtgtatctgatagaagttcagactaggatggggctaggagatggatttacagaataaaagataatatttatggggggtaccttgggaggagtctgatggcttatttggaaagtgtgctactgggctgagagggcacgtaatcctccgcaaactgggaacaccttagggagccgggacaggagctggagaagagaaggatagtggtcggggaaagaatgggctccctgcagcaagaagaactgaggccagacagcaggaaggacttcctgccagtgaacagtagctc

SEQ ID NO: 16339 - DNA, 1376 bp, Artificial sequence
  DNA replication origin
atgcgaaccgacggttgcgcgtctgccagtgcatgtgtgtccgtgtgaatccgcgcgcccgcgcgcgcgtgtgtgtgtgcatgtgtgtgtcggtcggcgtccccatggttttctcttcagtccgcctggatgtatctccatgtagtgggtctcctccagtgtgtctctttgtaagtcttcctggcttgtgcgagtctgcctatggtgtatccccaagtgtctctttgtgagtctgctcgtgtgtgtctcctccagtgcggctcagtgtgagccagtctgggtgtccctgtgttgctccgagtagtgtatctccgcgtgcgtgggggctgggccgtggggaggtcaccagacggacagctctccctctcggctcctctcctctcccgagcctctcctccagcgttagctcgctcgcttgctcgctcccttgtccccctcccccctccagtagcttcaggcgggcaggactatttcacgccttgttgaaaattcaggattttctttctttccgtctagtctctctttttgagaagcgtctgtgtgtgtctgtgtgcctggcagcttgtctgcaacattgggtgtgtgtctgcatgccgctgtaggagtgtgtctctaacactagttgttctgcctgtaatacttggtgaatttgtgtctgtgtcactgggagtgtttgtgtggctgtggtcactgaggtggtgcgagtgtgaaatgctgggtgtgtctgtgcatctgtaattgctgtgtgtccgaggggcctgaaacaccaggtgtatttttgtgtatctaactctgggtgtgatggtgtgtcattacacgtgtgggaatggggcttgaaccattgcagattcccagggatgtagggctagcaatgacttgggggctagaagggcctaggtgtctcaaactatgcctctctgtctccactgtcacaacccacacaaatcctctcagctggtgccaggggctcctggtcagcattggtgagatagagctaaggttcacactgtcagggctgatactccaactgagaccctgagcctacacaaagactaggagtttaaagttcatgcacaggacttctgggggctctggaatccatactcagatgcacactgggacacttcagctccttctagggtctaggggcttacattcatatggactgacacttacgttgtggggctcatatccagggatacacttcagtcctggagtttccacatagactcacattggaactctgctcacactgggacccacactgggactgtaggctcatgcttagattcacggtcttaccctttagcttagatctacattgagacctagagctcacacccagaatctcactggggtcctagggctcacactgg

SEQ ID NO: 16340 - DNA, 1233 bp, Artificial sequence
  DNA replication origin
gagcgtgccaaggcgggggcgcgcggggcccgtggcggggaggggtcgtggcgcgcggccgcggaggcgcggggagacaaggcaagagggggaggggagcgagggcgcgcgcggccgagcgggcgcccgcggtcacatgggcgagagaaggagggagggagcgcgcgagggagggaggaggatgggggggttaaagccgccgagcgctgaagagccggtgcagagcgggcggcggcggcggcggcagcggaggcggcggctccagccggcgcggcgcgaggctcggcggtgggatccggcgggcggtgctagctccgcgctccctgcctcgctcgctgccgggggcggtcggaaggcgcggcgcgaagcccgggtggcccgagggcgcggtgagtaccctgcggcggagtgcgcgcggccggaccctcagagcccgggctgaccagcagaccggcggccctcatgcgtgcgggaagagtgaggggacacccgtgggcccacggacgggggcgacaggaaagttcacgagaaactttgcctgcaaactcgggggcgggggcgctggaggagcggccccccacgtccgggcgctccgggggttgggcgtggtggtggtggtggggccgactgtggactagagggaggtggctccggcggtttgtcctagtgtccctgttctccccacccctcagctgcacgcgcggggtctggaaaaattcctgggtttggggaggttcgtagtggcctttgcgcgcccaaaggtggcttctttctcgggcagaaatctggacttcaaagcgcccggggatgcgaaccgacggttgcgcgtctgccagtgcatgtgtgtccgtgtgaatccgcgcgcccgcgcgcgcgtgtgtgtgtgcatgtgtgtgtcggtcggcgtccccatggttttctcttcagtccgcctggatgtatctccatgtagtgggtctcctccagtgtgtctctttgtaagtcttcctggcttgtgcgagtctgcctatggtgtatccccaagtgtctctttgtgagtctgctcgtgtgtgtctcctccagtgcggctcagtgtgagccagtctgggtgtccctgtgttgctccgagtagtgtatctccgcgtgcgtgggggctgggccgtggggaggtcaccagacggacagctctccctctcggctcctctcctctcccgagcctctcctccagcgttagctcgctcgcttgctcgctcc

SEQ ID NO: 16341 - DNA, 906 bp, Artificial sequence
  DNA replication origin
aagggcccgggcgctctaggcagcctactggggaaggatgtgaggaaacatggagacatttccctcccttctcctcgccctcagccctagagcagctccccggaggggcagggcccaggattatgggtcaagggtcaggtgacaaatccaaggggtggagacgggggtggctttctcggtctctgcctctgccattgccactccattgcgctttcacgtggcctcagaagttggtcaggttgtccaaccttactctcctatgttgcagccagaccggaggcccagggacgagtgcagtgaacaccccggcccctcagaggcccaggctgcgaagggagtgagcctcctatcgaggggtgcgcctgtgcccggcattgagagtgcaccctccctaccccttcattccagtggaggcttctcccccggctgtgtgtcctcggggcgcgaggaacatgcgagtagtggtgttggtgtcatcggagacactggaggcatgggcctgggctcccggcagggtccatccccggtcaaggaagcccctttcccccgcgcgagggggtgaccgggaggggagtcgttgcggggggcagtagcaataggggagaggcggagccggctggcttcttctgcccaaagtgggggttgggggttctggctcgcgttcctctcacggcgacgccggagggaggaccccgagagttggcccggggtgtgccagggagtcggtgcgaggccgtcagggcctgaacgtgcgggagtgtgcgcaggagagacctggctaaggccgagagggagagtgagtgtgaaggagcgatcccgggggtgagtgcgcgcccagccgccctaggggagcgggccgagtgggtgtgtgtgtgtgtgtgtgtgcgcgcgcgcgtttgcgagacc

SEQ ID NO: 16342 - DNA, 1045 bp, Artificial sequence
  DNA replication origin
ccgcagccgtggactgctgctctgccgacagcagcctctgcgtccccgggggccgagggggacgttggaccgggacagaattcccgactgctcccaacctggcagaaagaggctgagccagggacaccagggcatctggaggtcaagtccgttccccaaaccactcgccaattttcaccccgtccgcccctccccggccggattagagcgccgaggccggtcagccccctggggaggagcggcccccggtgtaccgaaccttgccagggcctagagcttcgccgcaggggcaggggcaagtcctgctcccctcaagatcccgtcgcaacgcccccttccttccccgcgtccacagtctaatcccggtctgcggcacgggaagcaggaggccggcggcccagagagcccggggagaggacaccttgtgtgggcggctgtgcgctgaccctcagcggggcgcagctagtttgctgtgtgtcctgaagtcctagctggccgtctctgagctccagcccatgccgacccctgccagttgtaggaaggggattctgtggccacggaagtgaaagtgaaaagcccaggccgtggcgggaagaaggattttcctctgcagtgggagtccctgaggcatttgttgggaaagggcccgggcgctctaggcagcctactggggaaggatgtgaggaaacatggagacatttccctcccttctcctcgccctcagccctagagcagctccccggaggggcagggcccaggattatgggtcaagggtcaggtgacaaatccaaggggtggagacgggggtggctttctcggtctctgcctctgccattgccactccattgcgctttcacgtggcctcagaagttggtcaggttgtccaaccttactctcctatgttgcagccagaccggaggcccagggacgagtgcagtgaacaccccggcccctcagaggcccaggctgcgaagggagtgagcctcctatcgaggggtgcgcctgtgcccggcattgagagtgcaccctccctaccccttcattc

SEQ ID NO: 16343 - DNA, 1051 bp, Artificial sequence
  DNA replication origin
ctatgtgtgggtatggtgtgtgtgactcagggactctcctactcttttgggacctctagttcctagcccaagctggggaccctgactctcagtgtaccatagtgaagttgaatatacaccttttactgtttgagattgggtgtgtgactttatgtgaccatgtgtttggcatttgtaatacagagagcctgtgtgtgagagtgtgtgtgtttgtaactttggagagccaggtgtgtgctgcagggagaaactttctgatggtattgcaagttagaaaccagcaccgtttcctaaaggagcactggaaaggtagaccataggggatggggagggagctctccttcctcggagacatgtcagtaagaataaggaagggtctttgcttgcccaaaggcttggaatggcacaattgatcccttggtgtgtgtgtgggggggtccaagtttaggtcacctgccagggtggagggtggtgtcagaaatcctggccatagagcccctttcatggtagagaactccaggaactgaaagtcaacgaggaacttcccatatttccccaggcgcaaatgtgagatccccatcacgtgcagggcacaagggatctggcctgggggtgttacttccagccactccatcatgggcaaggtagatggtgaagattggaaaggcagtgaattcttggagatggagttggggagaggatgtcagtgaagtggggtttggcttaaggataagtgacatgacacagaagggggctggcgcagagctggggaggccgggaataggggcgcttaataaaggtggagaggaggcagggccagatcctgcagggctttgaagccccacctaagaaactcaactttgcccccaaggcggtggggagggctcagcactgaggcttacaagctcaaaggctactgtgtaggtagggcatcagaggcggcaggagcggaaaccactactagtctgttgacccagctctggggggaggaaaattggttgtgagccgggtggcggctgtgtggagaggtggcagcccccggtgttcagta

SEQ ID NO: 16344 - DNA, 1546 bp, Artificial sequence
  DNA replication origin
gcgcccacaggatgaggtcgaagctcagaagtcggtaactaaggctctcgcccatgcaacagcagccactacaaactgaagcctttgttcgcacccacggtgaaacccacagctccccgtttgctcaacagctaacgccagccctcccatcttctaagggccagatccccctccttcagacgcaggacttccccgacggccgctcctttctaccgcagggaactgtcctgcctccctccggggcgtaacagcggaggctgcgctcgtgttcccatccccgctgggactggtccggggcgctctggccagcgggttgtttccgcggcggagatgcctcggggcccgtccctcacgccccgcccctcacgccccgccccctcggggcgtgcgcggccccgcggccttagtgcgctccgggcccgcgcgccatcttggctccggatcgtgcgtgaggcggcttcggtgagagccggaaccgggcgggcagaggggcgctcgtagggttgggggacgcctgtggcttggctgcagcggccggcaagaccctggaagagaccgtggctatggaaacggccaaggctgtcttggaatgtcctgagcagccctccgagtcgagcctctgcccccgagtttctgagtgacctgggttgatatagattgaccttggtaatctctgggagaggggatccgttctgtttgggggcagcactggataagggttcttggctgtttcccggggggcctggggcgaagggccttgtccctgtccttgtagagccccaagtgaggagcgctctctattggtattagtctggggtgagggttccaggccctgttccaaggagcccaggataaggggggctaagccccagtcctggagagtttaggatgagggggcctggcactttcccaaagagctcagtgtttggggaatgtgatcctgcctcttggactccaggattggaggtgggggtgttatggcccttgtagaggaacggggtgtatggggtacagccctttcccagactgcggcaggcatggaccttgtcacgagatgctaaggacaaggggacatgatcctgtttctgggaagtctggaacggggagcagggccatatcctggatggagataggggatggtggacagtgacttggggcacattgcttagcacttacctgatgcttccctgcagtgggcagcgagagtcacagacaagacagcaagcaggatggagcactaccggaaagctggctctgtagagctcccagcgccttccccaatgccccagctacctcctgatacccttgagatgcgggtccgagatggcagcaaaattcgcaacctgctggggttggctctgggtcggttggagggcggcagtgctcggcatgtagtgttctcaggttctggcagggctgcaggaaaggctgtcagctgcgctgagattgtcaagcggcgggtcccaggcctgcaccagctcaccaagctacgtttccttcagactgaggacagctgggtcccagcctcacctgacacagggctaga

SEQ ID NO: 16345 - DNA, 1430 bp, Artificial sequence
  DNA replication origin
ccaaacagaacggatcccctctcccagagattaccaaggtcaatctatatcaacccaggtcactcagaaactcgggggcagaggctcgactcggagggctgctcaggacattccaagacagccttggccgtttccatagccacggtctcttccagggtcttgccggccgctgcagccaagccacaggcgtcccccaaccctacgagcgcccctctgcccgcccggttccggctctcaccgaagccgcctcacgcacgatccggagccaagatggcgcgcgggcccggagcgcactaaggccgcggggccgcgcacgccccgagggggcggggcgtgaggggcggggcgtgagggacgggccccgaggcatctccgccgcggaaacaacccgctggccagagcgccccggaccagtcccagcggggatgggaacacgagcgcagcctccgctgttacgccccggagggaggcaggacagttccctgcggtagaaaggagcggccgtcggggaagtcctgcgtctgaaggagggggatctggcccttagaagatgggagggctggcgttagctgttgagcaaacggggagctgtgggtttcaccgtgggtgcgaacaaaggcttcagtttgtagtggctgctgttgcatgggcgagagccttagttaccgacttctgagcttcgacctcatcctgtgggcgctggcggaccacgggggttttccgggttttccaggggccagtcgaaccagatcttgtgcagggagccgaggagggagtggtggggaaatcgggccacagcccctgacgacacctgccgcggagtctgggggctgagggggcgggggtgcccacggagcctagtatggtgcctggcgtatgaccggcgctcaatatttgttaaatgatttgttacattaatgaaccagagaaatcgcggtgggaatggaaaaaagattaagttgggagatactagtaggttcagtgacgagttggccactgtttggacggagaagtaggaaattccgatctagggtgactcccaggtttcagatcggtttggacacgctgaatttgaggtgccggagaggtcgcaaaggcggggcggccaatgggccgttggaaaaagggtctggagccagagcactccctgagaccacaagggggcagcaaacatttggtggactacggtgccaatctgtttctcaacatgcttgccccagcgcccctacttcccaacttcccctccccaggaccaaaacttcctgcatccaaacctcttaggctgcccttctcggctcgtggcagcaggtaggctcccaagagagaaatttaaaggcctttgcacatgctgctcccttggctctgaaagtccctggatatcacttaccaggtcccttcagtcccttttttcttctgtgtccacctgatag

SEQ ID NO: 16346 - DNA, 737 bp, Artificial sequence
  DNA replication origin
tggctgcccaaggctgggggatgacgggcgggaaaagaatcaactcccgcctcggcccgccgactccgcagcccgcgccgcccccgccggccagtcctgacaaaggggcctgtctgcgctgagcgatgggccccagttaattccttaccgatcccgtccccttccgccgcgcctttggacccgaacaattagctgcggcctgattaatgggggaaaattatcggccccgcgggaccccctccccctgcagctggagcggtgggaggcagggaccgaagggaggcaggcaatgctgggatcggttcacacccgctaccccagtggaggggaggcctcgaggaagggccagagagggaacactggaaccagaatgggcctccctgggaaccaaaaggacttaggtccctactgagggtccctgggaaggtaagggaccagaaagaggtgctggggtgagggccgggagtgggaagtgggccagcagctgcactaaaggcggtgggggggcggggggtaacagggcagccagttaattagcggcttatcaggctgcgctctgagtgagttaattagctttgcagagagagataatgagtcagtgttcggtcccatgaatctgggaaaaagctgaagtgatggactgccgcccaccctgatgccctcctggacccttcttgcgttctcctccagctctgacattcctggaaaggaatttctcctcctccacagcctcaact

SEQ ID NO: 16347 - DNA, 1205 bp, Artificial sequence
  DNA replication origin
tgggtgggctgctaatcacctggctgtgcttttgccagaagagagagatagggaagagggccggacattgagggcataggtcctacctgcttgaattgttcctcgtaggtccactcgtggggatggagtccagggggctggctagaaggcgagctggggccctgggcccctggacggctctcctcagctgcctcctcctctgccccggcttcctcccgcttctcctcatcttcttcagcatcttcctcttcctcagccccaacattccccaaggccccctcaggggcctgtagggtccggtggtcaggcaggggaggctgcggtggcagcagcgggcatgcaggggccaatggccccaccccctgggccagccgagctgcctgctgcttctgcagggcctccatgacagcttccaggcgcagtcccccagctgagggggtccctggtaccaggcgggaccccgaggaaagggccgcctgtgggggagggaattatgggtgctgggccctactgcccccagagccccccaacacagggggaggtggtcatggattcagggaagtgcaggggtcacaaggaaagaggcagaaagatggctttcccagaggtgaacagaaacaggaccagacccggggaatcaaatggccattgactgaggactggaagagtgagcagatcagagagggtgacggggaccaagagacatcgggaaatggtgaaggaagggagagagaaagaaaaggagaagggggatgtccgacagagacaatgacagggagatgtgaaaatagagatggaacagggtgacaaggagagacagaagtggggtgacacagagactgagagggaccaagatggagagaggcagaggtatcaggcagagacagggtagacagacagagatggagagagatagaatattgggtagagagacagggagggtaagagaggtagaggagcaacagataaaagacctaagtgacaggtagctcagagacggacagagacggagagacagaggcggagatagacaaatagacaggggttgagatatagggaaagaccaagacagcaggaaacggacagaagagagagattagaaagagacagttaaatagagagggaccgacagagacagggacgggaaaaacagccggagagaggggcagaggacagggaccaaggagtcgcggggatggagggcg

SEQ ID NO: 16348 - DNA, 985 bp, Artificial sequence
  DNA replication origin
ggaaacggacagaagagagagattagaaagagacagttaaatagagagggaccgacagagacagggacgggaaaaacagccggagagaggggcagaggacagggaccaaggagtcgcggggatggagggcggtggggcagagcctgggacgggcacgggaccggacgggcaggaggcggcagagtcgcgacgcccggctccctcgctccgggcgccccgcggccgcactcacctgcctggcgtggcccgctgcccctggcgtctccacggcgctgcctttgctccgcccgcctcccaggcggccctggcctcggctgggtcccggcggtgcgctcccgccgccctgtgctcctctggcggctgtgcgctcactcgccgcgctgcttgcggcggccgcgggggcgggacccgagcggggcagggcgggcggggcgcatggggagaggcccctgtgggatctgccgctctcagctccccaacaggtgtctcccaccttctttccagccagcttcgggggcagggggcgctggaaagctgcgggggaatcgtgcgaaaatgagggctctaccgccaccggactccggaccagagccccgcccagcctcacaagtcgtgcccccgacacccacactcggcactgggcttccacatacaaatagccgcatccacacaccaacacaccttgtcacaagttcaggcgcatagcttcccagtctcacacgttccgtgacatggtcaccacagtgccaatggcctgggcacgctgtgatcaagaggggaatccctctgcaagatgctggggtgtgcgtggagggtctggtcagaatagaagcttctccctttgccttgagcacccctgccctgcctacgtgctgtcccccactgcgggcatgctgcggtttgcacacatgagtgcacatggtggtggacccacacctatgcactcacacactctcagaggtctttaagctgactgcacactcac

SEQ ID NO: 16349 - DNA, 921 bp, Artificial sequence
  DNA replication origin
agccctcctggcccagaccccaaaagtggattaactttgcttgattgatttgggagctgggggagtgactgcccagccccttaccattcaacccaaaccctacaaagcgatctccaaacactcagaactggaatttccccaagccaattcctacctttctaggaagactctggccacctacctttgtccatggacctcctctgagcagccaggggaagctgtggtggggaaaagggagcaagcagggcacaagggttctgtggattgctaccctctgctctccagtcttccagtagacttccagggcatgtctgtctgcctggcacattcactgattctcccctcccagcatcagggagggttgggcagaggaggaggcttggctctgccccaggatactcacaccaaacaaagccatgggggaggaggcatcagtaccgacagtgattggatcactggagcttctggaggctggggggttctgatgggctcagaggtctgaaatctgaggtggaggacactggggcagccaaaggaatgaatggggtgagcctcagcgtggccaggaatgggccatagagaaccaggacttagtgctgcagtagaagctgggcacagaagggtgcagagaagggtggcggctggaggcagggagagcagggaggaggcacccaccatggtcagacccaccatggtcagaagagccggtggtttgagccagagcaagctgaggctgagaggagtggactgattgggagaggacaagggaggagggaggagacaaaggtcgtgtttggattcctgccttctgggggtgtgaggtcagaagacagtctctggtgccacagtttcatacctatgccaagtgtcacccctacagacacctgctgttcacttacacacttggcatcacctcacagt

SEQ ID NO: 16350 - DNA, 1721 bp, Artificial sequence
  DNA replication origin
ggcagaggggcggcggagtcagggctggcaccggtcctaggtccggggatggcgccttcggaaccctaggctccgctcccaggccggccgctcccctccctgccctctgcccgctcaccagcgtactgccgcgccaactgcgctatctcttcgcgctggaagacgaagctctgcgtacccagccagagccagacgacctgggtcagcaccgctgcgacagccaggagcagcgcggcccacgcccaccgccggcccacggcccactgcatcccggcgggcggcctggcacggcgcagctcaggagggagccggggcctgaggctttgcgctcacggcctcggagcccgccggctgcccacgaagcgctcccccgccaccgccgtggtacggctcgccctgaccaatcggagcggcccgggcaccttggcaccgcccttcggttgaaccatttcctcggggggagcacggaggagtggggcggtgccgcgcaagggaggcaagggggcggggccaagtcgcccagcggcagatgtcagggtcttcaggcgaggtctgacctagctagcgccactctacatacggataggtgtggggatagtgagacccagaatggacgggctcgcccgagctcactggctggtgaagcagacgagcccggaagtgaagccttctgggactcaacgattgttaaggcccgcctttaccaggactgaagcggagaggaggcagttcaagctgggagccccagggtgggcattccagaggcggtgacacctgagcagtgtctttaagagctcgcagaaggggcatgccagcccacagggaccagcccctagagcaaaggcctccgaggagagacagcttggggtcttcaggggcctacaattccttctctgttctgcggcacaaaatgtgagaggaggccttgtaaaccagctgagggttatcagcaagggaggaaggggattagattttgccaccgagtggcacaggactgtcgagtggaggggagcaagatgagtcagggagaccatgactgtgggccaggtaagagggaaggtctgtgtcagtggagatggaagaaagaaatgagcttaacaactctggaaatggagttggcagggcttgatctcttcttcctggaatactctttccccctttatcctatccccactttccccttatttggctaacatcctttgcatgtctagtgggcagttgagtgtccaggtctcgaagctcagctccagtctggagatagagctgggagttgtcattcattcagatactttgttggcacttgtatgtgccaagttctgtggtggccattagggatatggctagaaacaatggtcctactccccagcttagagatctcactggagagtctacagaaaacctctaagaatggatgaaatctcacagggagagagaatagagtaagataaggctaaagacagagccctggagagcaccaacagcaaagggtaggcagaggaagaagaaagcaaaaaggaaaagaaacaaaagagaaaagaggtagcattgtgcagtgattaagaaataaactctggagctggactgcctgagttcaaggcctggctcctgctacctactagttgtctgatcttgggcagtttacttaaaatctctgtaacttagttttcttacctgtaaaatggaatggagataagtacctacctcatagtacatatcttcat

SEQ ID NO: 16351 - DNA, 1226 bp, Artificial sequence
  DNA replication origin
gggtggggttttgcagttttcaaaccacaatatccagcaaagtttgagaaccactgccctacacagccctccttcttctttatcttatctggagtcaggggcaccttcagcttctccaatcacctggccagtggctcttgtttccagtcctgctgttccagggtggataggccttcaggcggagacccaggaatccagctccagactctgtcccaagcagcctcttcagtccgggacgggacaggaagtgtccggcggaggtgggggtggaggtgattggcagttggagtctccaatgggccaggagcccccctatttcactcctctccttccattggcgcctgggcggagccacccccgctgcgggggcccagggcgggagggagtagaggccggggcagagggcgagggcgagggcagagggcgctggcggcagcggccgcggaaggtgaggcctggtgtagacgccaaagtcttgtcaggagtgggcggggcagggtgatgtatgatctgaaaggccgggagtgactaacgactgtcagtgtgtatgtgcctgtgaggctgtgtctgtgtgacagtatcattgtgtgcgattctgagtgtcacttggtgcagctgtcagctaatgtgactgcgtgtgtcagtgtgcatggagctggaggtgcatgtggctgtgcaagtgtgggattatgtgtgtatctgtcaatgcacatttttggtgggactgggttgtgtgtttgtgtgagagggactgtgaccacatgagggaatgtgttttgggaaggtctctgtggggtttgagaccatgtctgccagcgtgagagtgggtggctggctttgtgtgtgccaatgtgtgacttcagcagtagcagagcaaaagtgaggtttgtgactatgtgtgtgtcctgggtcctaacttaaaccgtgtgggagtacagctgtattcatgtattgggggacctacctcaagagcccatgggactgacctttctcttaagtgtccagcattgacagacacacccacaacacacgtggcttcccctccttcctctgctcaagaatccccagcatcaggtctactgctccttattttctgtttccctgcttggctcagtttcccttacgtgccgttttctgtccctattgctgtcttactagagatacctctgtgtgtttcttcacagctttgttcccctggtctctctgtgtgggtgcatttccagttt

SEQ ID NO: 16352 - DNA, 972 bp, Artificial sequence
  DNA replication origin
gagcaccccgggagtccattcccacagcgggtcttcatggcggcggttccccgcagcacctcagggactccccccaatagaggcagctgtcactcggggttcatccagtgacacgggggccaccttggaggcagctcccacgcaagcacctcagagtccccggagtactgtccacggccacaaacccgcccctcaggtgacggcccggtcccgccgcccccgtccccacttaccggggccgtccggggccggcggactctatactgccggccctgcgctgcccagcggagctcgagggccggcttgctgggctgagggcggacagcatgcagcgctggctgagctgccgagttgaggcgtgggcggcggcggcggcgcgtgggcggcggcggcgcgtgcgcccacgcgaggctttcttggccggcaggtgggcgcgcgctgcgttccgccccgcgcccccgcgccccgaggtactggcctcccgaatcagctaggggcaccggcgtgcttacggtggggggacgcggaagtggggttccatgggctcggatgagtagtgggcccaggtgccagttggcgccctctacgagcgccctggactgcggcgcggggactgaaacagccggccaactgcagcaagaacagtgtccgcccggagggggcgcagggctgaggccgctaacactttgttccgctcctgcccgtaagggtgagaatgactcttccagcgactttcgccctcgtgctctctcgccaagctgcccaccctaggcctccaggctcacgacgctggcattcggacactctctgcagtactccacaggcctccggaatgtccaaatgacccaactctgactgtgcactgtttcctgagagtattggtctcccatctccagcaggaaagctgggctgtcgtgtaacccactttttgctgcagcaacctcatccctcagactattcaaacagccagcc

SEQ ID NO: 16353 - DNA, 1455 bp, Artificial sequence
  DNA replication origin
attctcacccttacgggcaggagcggaacaaagtgttagcggcctcagccctgcgccccctccgggcggacactgttcttgctgcagttggccggctgtttcagtccccgcgccgcagtccagggcgctcgtagagggcgccaactggcacctgggcccactactcatccgagcccatggaaccccacttccgcgtccccccaccgtaagcacgccggtgcccctagctgattcgggaggccagtacctcggggcgcgggggcgcggggcggaacgcagcgcgcgcccacctgccggccaagaaagcctcgcgtgggcgcacgcgccgccgccgcccacgcgccgccgccgccgcccacgcctcaactcggcagctcagccagcgctgcatgctgtccgccctcagcccagcaagccggccctcgagctccgctgggcagcgcagggccggcagtatagagtccgccggccccggacggccccggtaagtggggacgggggcggcgggaccgggccgtcacctgaggggcgggtttgtggccgtggacagtactccggggactctgaggtgcttgcgtgggagctgcctccaaggtggcccccgtgtcactggatgaaccccgagtgacagctgcctctattggggggagtccctgaggtgctgcggggaaccgccgccatgaagacccgctgtgggaatggactcccggggtgctctctggatttgctgccatggggagtccccctgtggagggcactggcccttagggagcccttctgtgtcactgtgggagcaggcacaaaggtgctctcgagctggctcaatggaagaccgcctgggaacataggggagctgcaggagcctcgtgatggtggagcccccagagggccccctagaaaaggaggacctgagactgtgccctagaactgtgggaagcaacctctgactggggagggggatcctcccatgggatccatgagtgacttcccacggctccaaggactttggcctttatctccctataggcctacatgtgtcctcacttctgaccaccgtggcccagaggtggaggccttgtaggatctctttccattcccctctttccctattcggatttttcttctccatggtagcccagttgctccaggctgcattttagtggaggtagaaactgctgcgagagcacagggccccaagcgggggacgaggacaagtgaggcctctaaaggaaagataggagatttgagcccctgggtttgaccgtccagaaggaagcagtaagatcaagtggaataactgactttggcaggtcctggaacaaaagacctttgaacgaaagaataaaggatgtatagggttgttgagcaccagtgtgctaggcactatactaggtatgtttaaacatctcatgtaactcttaacaacagctttgtgaaattatccccttctaaaat

SEQ ID NO: 16354 - DNA, 1292 bp, Artificial sequence
  DNA replication origin
tcaaccctgagtggacacagcacatgtttcagagagcacagggttgggggtaaggtcacagatcaacaggatcccaagacagaacaatttttcttagtacagaacaaaatgaaaagtctcccatgtctaccgctttctacacagacacggcaaccatccgatttctcaatcttttccccacctttccccctttctattccacaaaaccgccattatcatcatggcccgttctcaatgagctgttgggtacgcctcccagacggggtggtggccgggcagaggggctcctcacttcccagtaggggcggccggggcagaggcgcccctcacctcccggacggggcggctggcccggggggggggctgacccccccacctccctcccggacggggcggctggcctggcgggggctgacccccacctccctcccggacggggtggctgccgggtggagacgctcctcacttcccagacggggtggctgccgggcagaggggctcctcacttctcagacggggcggctgccgggcggaggggctcctcacttatcagacggggcggttgccaggcagagggtctcctcacttctcagacggggcggctgggcagagacggtcctcacctcccagacggggtcgcggccgggcagaggtgctcctcacatcccagacggggcggtggggcagaggcgctccccacatctcagacgatgggtggccgggcagagacgctcctcacttcctagatgggatggcggccgggaagaggcgctcctcacttcctagatgggatggcggcagggcagagacgctcctcactttccagactgggcagccaggcagaggggctcctcacatcccagacgatgggcggccaggcagagacgctcctcacttcccagacggggtggcggccgggcagaggctgcaatctcggcattttgggaggccaaggcaggcggctgagaggtggaggttgtagcgagccgagatcacgccactgcattccagcctgggcaccattgagcactgagtgaacgagactccgtctgcaatcccggcacctccggaggccgaggctggcggatcactcgcggttaggagctggagaccagcccggcgaacacagcgaaaccccgtctccaccaaaaaaatacgaaaaccagtcaggcgtggcggcgcgcgcctgcaatggcaggcactcggcaggctgaggcaggagaatcaggcagggaggttgcagtgagccgagatggcggcagtacagtccagcttcggctcggcatcagagg

SEQ ID NO: 16355 - DNA, 899 bp, Artificial sequence
  DNA replication origin
atcgtctgagatgtggggagcgcctctgccccaccgccccgtctgggatgtgaggagcacctctgcccggccgcgaccccgtctgggaggtgaggaccgtctctgcccagccgccccgtctgagaagtgaggagaccctctgcctggcaaccgccccgtctgataagtgaggagcccctccgcccggcagccgccccgtctgagaagtgaggagcccctctgcccggcagccaccccgtctgggaagtgaggagcgtctccacccggcagccaccccgtccgggagggaggtgggggtcagcccccgccaggccagccgccccgtccgggagggaggtgggggggtcagccccccccccgggccagccgccccgtccgggaggtgaggggcgcctctgccccggccgcccctactgggaagtgaggagcccctctgcccggccaccaccccgtctgggaggcgtacccaacagctcattgagaacgggccatgatgataatggcggttttgtggaatagaaagggggaaaggtggggaaaagattgagaaatcggatggttgccgtgtctgtgtagaaagcggtagacatgggagacttttcattttgttctgtactaagaaaaattgttctgtcttgggatcctgttgatctgtgaccttacccccaaccctgtgctctctgaaacatgtgctgtgtccactcagggttgaatggattaagggcggtgcaagatgtgctttgttaaacagatgcttgaaggcagcaggctcgttaagagtcatcaccattccctaatctcaagtacccagggacacaaacactgcggaaggccgcagggtcctctgcctaggaaaaccagagacctttgttcacttgtttatctgctaaccctccctc

SEQ ID NO: 16356 - DNA, 957 bp, Artificial sequence
  DNA replication origin
gcccacggcagcccgagagccggcgtgctgggccgagcgccggcagcaggcggcgcgggcggagcggcaggctgaggaggcggcggcggcggcggcggcggcggcggcgcgcgcggccggagcacacccacccgccccggggggctgcggcgtgtgcacccgcgcgaggtgccctgggccggccggtgggcgcgccccgccccgcccagtcctcttgcgcctccaggagacgccctcgcggctccgcgggcggcgggtgaccggcgacgggcgcgcgggcgtggggcgccgtgggaatgcgggaggacggcggacggctccgatgagcagacggcccaggtgcccgtgggcgccccccacgagcgcccggcactgcggcgcggggactgcgccagcggccgactgcggcaaggacagtgcccgcccggaggaggcggcccggagggggcgccttgggggcgctggggccgctcaccgctcgcgttccgcgccgggggttgggtggggggaaggcggggtccgggtggatgccgccaccagcacgtgcccggggtggggagaatgactcatccagcagggcctaccagccgtcccccgcagggctccgggctcacgacccctggcactggggcactcacctttgcagtaccccactggcctccggagggtcccaacgaaccttcacataatcctcggctggcccagcctaccctatgcgctgttttctgggattattggtttttcatctccagcagcgaggctgtgctgtcgtgtaacccactttttgctgcagcaacctcatccctcacaatatccaaacagctagcttgtcagaaggccagcaattctgagggctataatgtgcattacaccaaactacatgctttgaagagggcaagaaaaagataaaatcgtaagatagccagcaactaattataaggaaaaattgaagatatg

SEQ ID NO: 16357 - DNA, 1477 bp, Artificial sequence
  DNA replication origin
agtccccgcgccgcagtgccgggcgctcgtggggggcgcccacgggcacctgggccgtctgctcatcggagccgtccgccgtcctcccgcattcccacggcgccccacgcccgcgcgcccgtcgccggtcacccgccgcccgcggagccgcgagggcgtctcctggaggcgcaagaggactgggcggggcggggcgcgcccaccggccggcccagggcacctcgcgcgggtgcacacgccgcagccccccggggcgggtgggtgtgctccggccgcgcgcgccgccgccgccgccgccgccgccgccgcctcctcagcctgccgctccgcccgcgccgcctgctgccggcgctcggcccagcacgccggctctcgggctgccgtgggctgcgcggggcccgcggtgtgtagagtccgccgccccggagccgcgtcccgcacccggacggtcccggtaagcgggggcgggggcggcggggaccgggccgtcacctgaggggcgggtctgcggccgcggacagtcctccgggactctgaggtgcttgtgtgggagccgcctccaaggtggcccccctgtgtcattggatgaaccccaagtagctgctgcctctacgccttgggggagtccctgaggtgctgtggggagccgcccccataaagaccccctgtgggaatggactcccgcggcgctgtctgcatttgctgccatagggagccccagcgtggaggggactggccccagagagcccttctgtgtcactgtgggagcaggcacaagggtggtctctggagctggctcaatggaagaccacctgggaacataggggagccgcaggaacctcgaggtggtggagcccccagagggctccctagaaaaggaggacctgagactgtgccctagaactgtgggaagcaacctctgactggggagggggatcctcccatgggatccatgagtgacttcccacggctccaaggactttggcctccaccgggatccctgtagggttccatgtgcccttacttgtatccccacaccgtggcccagaggtgggggccttctagggctgcagcctctttccattcctcctctttccccattcggatttttcttctccatggtagcccagttgctccacgctgcattttagtggagacagaaactgctgcgagagcacagggccctaagccgaggatgaggaccagtgaggcctctaaagcaaagataggagatttgagcccctaggtttgaccgtgcggaaggaagcagtaagatcaggtggaataactgactttggcaggtcctggagggaaaggcctttgaaggaaggaataaaggatgtatgggattgttgagcaccagtacgctaggcagtatactaggtatgtttaaacatctcatataactcttacaacagctttgtgaaattatccccttttaaacattgagactcagagaggtttagcaatttgccca

SEQ ID NO: 16358 - DNA, 1938 bp, Artificial sequence
  DNA replication origin
cctagatgatctcctgtcttccttcccgcagtgatcccttttgtcttattcttggttctttctttacaccccgatctcctatcctagctctcccctttcatctttcatctcactccccaagatccccttccttaacaccctcagaatctctagtctcccccaccccccattaagtcattagatctcagccccagtgtccccgatgcagggagcaggcggggctgcggaggcggtcgccagcggaagccgccactccagcagacacggtgcctggcgcccacgtcactgtctcccaggcccatctgtgctcgagggagcgggggtggggagggagtaatttgggggtgaagtgggggaggggagtgctggggggttgatgatgatagaagggtcaggccggaagctcccctttacttctttctttcctattttccagagacagagtttggacacccatgaggtcttgctagaaactgcagcttgagtacctgggccaagagcagagcaaggcggggggggggtgccagggtcctggagtcatgtctgtagattcttcactacctaccttcatgccaggagtcactatggggctcccaagggtaaaggggcatgaggtgtgaaggaagaaagagacttggggtgaaaggaggatggaaaggaagtggggttgggggccaggaggggagcagagatgggtgatgaatgtggggaaatgagcatgaggaatttgaggaaatggggttgagggggggaggtagggagagggggtggtgagaggatggtgagatggggtgagggggatgaggaggggaggggcatggggcagatgagccatagggtgggagtaaggagggcagaggaaaggagggctggggaggggagggaaggcagggtgggggataaggaaagaagggctggggaggggcaggaaggcagggtgagggatgaggaaagaaggggtgagtaatgaaaggatgaggcacagagatggggtgaggaggagtgaggaagggggaggggagggaggagggatggacatctctgtgtgacacagagatgggtaaggtggggtgaggggccctgcaccgctgctggctcctcagatctgggggctctcactcttccacctccacacctgtggggcccaggctgtgggtggctctacttcttcctattccagttctgtctcttttgcctcccccagccttgcctgtgccaacacggaggcagagagtttagtcaccagcctttacctggcccctgctaatgctaaagtgtaggctcggacctttgagggtgcagaactgtgccttcaggtgttggtggcacagactccactgtttgcctagtcctcggttcccgccctcagtcccattgtcctgggtgtcacgtgtgtgtagtgctcagtgtggcatggactgtgacagtgtggtctggagtctatgcaccttgtgagcttacacgccacactcatgcctcatctcctttgtaaatggggattggtgcctcagggggttgttgagagggttaattaaggtaacacaggtagtgcacttagttctgagctgggcatgtagtttatacccaaccaatggttaacttggttaactcaaccaagttaaccattactctacatgttcacagatgctgggagtgcgagtgcatctataaatctgtgagtctgggagttatttgtagtgtggtactggtaatgtgatttgtgagtggatctgtgcagttatttttgtgtggtggtgtgcctgattctgttatatgttgtaggtatatgattttgggtcagtgtacatgtgtgagtaaatgactgtgcgggcatgtgtctacatgacaaagagtggataaggtatataggcactgacacattgacaccatgtctgccagcgtatgcacgcatctgcgatcatgccagtcccaaacgcc

SEQ ID NO: 16359 - DNA, 1330 bp, Artificial sequence
  DNA replication origin
agaagccattctcagcccttctgagacttggccaacccctgccaaagccaggagaaccagagtctttctagcaatgtcctaggctggcagccacagctgagacctgcctttctgcctctgactgcttcacagcagggaggtgtacagggtgtccttccaggagtgaggcctgtaaccgggtaagggggaggcgcccaaggccctaggtgggcagggacaatggccctcactgctgcccccacaggccctgctgcaggtggctgggttgactcatggttctgggagtcacctttctctgacgaagaaaaggctccacaaaggcgggtactcccccattgccccccaccagcatgtcacgtctgtgggggagatggggtggggggtggggttgggagaggcagagaagaaagagcacctcgttgggggggggggcaaccgttttcggaaatggcagcaaaagccgtctgagagggagcgggggggggtggtctgccatttctgcctcaacccacaccttctttcccctgggactgggaaagaaccctagcacaccaagagggtgcccctagagaacgagagcagcttccaggcagagggccagtggaacggctcaccaaccacccacctccttttggtgtccctgcattacctccacacccggccagcttcctccctggtacccacctgctagctgctctaggcccatacatctcttgcctccgcagacacagggcaagctctttcaggatctgcctcctttttctctttctgctttcctccctccttcccttcccccctacccacaggccacgtgttggaatgacaaaggagccccatggcatggcactgcctttgatggagaagaatgaggaggatgttaaggtagaggcaggaaggaaaaatggggagaaaatggcgagggggactgttgaggtacagggaggggagatggctgatacagaaaatgaggtactgatggagggggatgagtgacagatggaaatggctgaggtggaaaatgggttaatgatgggttgaaagggaggaatgtggagagttgaaataatggaggaaatgtctgtggaaaatggatacctgaagggtttgagaaaaggaatgataaggggtgcaattcattcaaatatgtgggtgaggccggaggggggttcctgtatgtcacagaggggatgaggatgagttggaggaagcaggaaggcaatggaggggatggccgcgtggagggtttgactgggtatgggtgtgagtgcccttctccggagggacttaccgaaactttacaaacccattcagcgtccacgctcgaagtttt

SEQ ID NO: 16360 - DNA, 1852 bp, Artificial sequence
  DNA replication origin
tattgctacttggctgcctctactctattattgtacaccttgaaggccaggttaattaggtcctgttgtggggtttgagggctggaatttaatttttggagttttatttaatgtcgggagcagattgggtaataaaataaaatgcatattgagaataagatggccttctgacctttcagggtctagggctgtaaagcgtctcagggttgctgccaaacgagccatgaactgggctgggtttctcatatttgatgaaaaagagcctaaacgctaactgattttgggagaggtcggataaagaaaaaggagcgttaaccttgactatgcctttatatccagccatctttttaagaggaaattgctgggcaggtgggggaaggctggttgaggaatgaaactgtaagccggacaaggtgtgaggaggggaggtgataaaaggattatagggtgggggagcagaggctgaggaagaattgggacctggctctgcctggtgaggaggggagaggtcagatgggtctgtagaaaaggaagattagaaagactcagtgatgcttggggttgggactgaggggacaggtgggagggaaagaaggaagatttgggactggttgcattgggaacagagaccagggaggaaccgatgtgtaaaagaatgcctggacgtcaggcacctcagaccatttgcctaatttatgacaagaattatttagatcttgtaggatggaaaaattaaaagtgccattttctggctatttggaactactgttgagtttgtattggggtcaagcagcattgcagaagaaaataagatgcttagattttaggtcaggtgagagttgaagaggttttaagttcttaagaacacaggctaagggagaaggaggaggaatggagggtggaaggttgcccatagtgaaggaagcaagcccagagaaaagagagtagagacacggagggaaggggttcgggggttcttaccctccagaaaagcaggaaaggggtcggggcacagaaataaggggttggggtgcagagataagaggtcagggtgcggaaataagggattgcggtgtggaaataagggatcggggcacagagataagaggttggggtgcggaaataagggatcggggcgcagagataagaggtcggggcatggaaataagggatcggggctcagagataaggggtcagggcgtggaaataagggatggggcacagagataagaggttggggcacagaaataagggatcgggggttcttgcccccagaaaagcagagaaggggtagagacacggagagaaggggttggggggttcttgccccctagaaaagtggtacttgcagctaagggtgaaggagaaggggttgggggggttcttgccctctagaaaagcagaggagtagagacatggagagaaggggttggggggttcttgccccctagaaaagcagtacttgctgctaagggtgaaggaccaaggcaggtgtccccatgtggtcagacacctctgaaacatgggtgaaaaatcagagaggtgtccctgcaatgattaaacaccaagggaaggctgccttccttagtccgtgactggcgccagagttttgggtccaaggataaaatgtgtctcctttgtctctaccagaaaatgaaaggaattgaaagtaagagagggagagattgaagggtggcgccaagattgaaaggagaaagtggttgagggatagtgagagaggttggagaagagagtaagaagaggccgcttacccgatttaaaattggcgagatgttccttgggctggtgggtctgaggacccgaggtcgtaggtggatctttttcacagagc

SEQ ID NO: 16361 - DNA, 993 bp, Artificial sequence
  DNA replication origin
agggtaggcccggcggggcctggccgtgggcgcgtcagagaggtggagaccaggaaagagggaagggaagctagggggcgagtgaggggccgtggacccggcaggcccggctggggccagctgcgcacccgcgcgccccctaggcggggcttgcgttgggtccgggtcggagcctgggccggatcgtgctgtgtcatgcaggccccggcccgcccgattggctcccttagaacggacgtctgggcctggccaggtcttccggcccactccgccggcgcggcgccccggggctttggggcgccagtctgccgtccggcctaccacccgccgaaagcctttggtccccggagagagcaggccccgcgagcccgaggccccagccgggcccggtgggcgtggactttgcgccatgtgaaggcctcaggagctctgccaccgaggcggagcccggggtcggggaaggcccgccgagctcagggaagctcacagccgcctttttggagccgggtcggcggggccggaggtgggcatcctctgtgtgtgacctgagtcgtgaaggactgttagggagagggcgagccctacctttcgcttctggtcttcttactttaggcctgttgttcatactagaaagtttgagccagttttccttaatgttatgactcgtgggtggggagaaaggaatttttctttaacattttaggttcttgctaaagttggaatctcagttcgtgttttgtgcgcctttccagatttccaggtttcgtggtgtgcagtttagagttgcactaactcttcaaaaacacaaacgtgcgcgcactcctttccccaaccagctatattgagaaattacccgggctctggggctttctgaccccacctccatccttaggaaagcgttagataaaacttggctacctcagcccattcaatttagaatagagagcttttagaggcaaaaaaaaaaaaaaaaaaaaaaaaaaaaacacagcc

SEQ ID NO: 16362 - DNA, 850 bp, Artificial sequence
  DNA replication origin
tgtggatgtatgtagggacaaaatagagagcagctggcagcagttctctttgcataggatgagggtggaaagcacatggataggaattcatcctgtcactctccttgatcatggtagaaatggaaatctttaatactgaagggaaggggagaatgagccttgaagctgatacctataccaatacccacctcacccacctcccaggcctcaaaagtgtctaaaggtacagacgtattctgggacttgttgtttttgctggccttgctccctcagcatgttgggagctgtagtccttgccagccacagcctggcacagctgtttgatgccagctgctgcccaccccctgaacgaagagtgaggcttggcctactctgccctgcccccctcccctgcagtcctgccccatgagtcagcttgaagccatggtctagagccagactggctgggtggcaggggagtgaatatagagcgtcttgttgacagggtgggaactgagagggctctggggttaataagcagatgccaggtatgctggggtcaagtagggcatcatgtcatcccctggcttccccagggcaaggggtcaagagggcaactgggatgacctggaagtggtggtgctagggaaaaggcccctcctgaatctgtatggcttgggtggaggaaagaagggtagaaattagtgcaggttgtaccttctgacaaggttggttgcaggtaggatagtgcaggttgcgattggtgttctgccctttccagccatcccgcccaccacagggaaccaggattttcttagggatcccaattcttaggagaatttggtgaaatgggatagtggggtacaatgat

SEQ ID NO: 16363 - DNA, 1100 bp, Artificial sequence
  DNA replication origin
ttaaatggcagggcagggtgttgctttggactccggcagctgtcgggttaaggagaagggcggagcgaccttgggtaagcctacccccttatggaccaataggcgtgtgcctcttggagggggcgtgcctcgcacttgaggtcgcggggaggctggcttcctatggaccaatgagcatggtcgctttccagggagggcgtagcctgaggggggcgtggcggccgtggccgccgcggcgcgggtggtggggcactgggcggggcgggcggccccatcagctggtaggaaatggcctgtgagtcagaggggcagtggagtcggcggcgcggagccggggcggccccggggagggaccgtcgcagggaggggcgcggcagcggctggggggctgcgggcgccagggcccgctagtgttgcacacgaagctgaacagcgaagagcctagcagagcagggctcagcctgagccaccctttgtctgggttgggggcccgtggcagggaggaccggggaaccaaggggagggaccgggacgggacgggacggaagggcccggagcagcggccacctccgcggagccaatttgggagcggggtgagtgtgctagagggaaagagcaaatctccgaagctccagtatagtatggggcctgtcccaggctgtggggaggagaggagtgagaagggacctgggaggctgggcagggggtaagggatcgtccagaagaaggagtccaggagtcaggtgagtctgcctggcttagtttagagagtctgctaaggtctgctctctcccctctgaagatagagggctctaggctgggggccgaggggttggtaagagagaagaagtcgaccttcctacccacagtggtggtccgtgggaacagcccccctagcttgtgtggatgtatgtagggacaaaatagagagcagctggcagcagttctctttgcataggatgagggtggaaagcacatggataggaattcatcctgtcactctccttgatcatggtagaaatggaaatctttaatactgaagggaaggggagaatgagccttgaagctgatacctataccaatacccacctcacccacct

SEQ ID NO: 16364 - DNA, 1581 bp, Artificial sequence
  DNA replication origin
cccctgagattccttgcactaccttgcaatccctacggacctcccctattagtgcaaatgcacgcgcccacccagacatccctacaaagaggttagagttccggcggcagctcacaccggtgcgaaagcagcgagatagccccaacccggctcagagccctcaggctggtggctttggccctggctccatctccccacctctgccctgatccgctccgctcaggctagcagcctgccggccgaggccccgcccctctagacttgtcatcacagaagccgcacgtggccggggtgggacctcaggcgacctgcgaccatcactttgtctcctccttcctcctttggggccgccaccgccaatcagagccagcggatcctggttggagtgcgaccgcccgggtgaggcgtgagggagaaggggcggaaggaggaggggctctgagatgggagggggatcgtggtggaagggtcttggcgcgacttctgccaggctggaatccgagggggcgggtcctggtgaaaggcggagagaccgagaggaggcggggatcgggggtggggcctgggaaaagctgaggatcctggggaaatgcaaagaaaacgcgaaggaggtgcgaggtcagaagggggcggggcccgggctacaggggaggagctcgagaaattaaacgaggaaagggacaagtccacagaaggtggaaggtgggacaagggagagggtgggcccgggcgttgcgggggcggggctcagactgaaggggcgaggtttgcaggcggaggctacagctagggctgctcagtaactgccccaaccactaccacgtccccaagtgcaacgggacccacggaactacaggtgtggggcagggtgagcgtggaagaagggacgcggatgggggtgcgctttgcagacgatctggagactgctgtgtgttgagggaagatacgaagtcgcgggagcagttggggactcaatgtgtgggcaacaaggtgcattctccagaggcctctatgggggaagggcgggagcgctttgttgtgggggggttgcgaggtacattgtgagggggctgtctctgtctgatgtggggggttggaggaggtacatgaggggcaggggacatggaggtgctttgaaggaaggggggctgtttaatggagaaggagtgtagcggtgtcggagggtctgcgggcactatctaggggaaggggttgtaggcccaacttgaggcaggagaacagaacccccagtactttgacaaagtaacagtttagggcattgtagtaactacaggaagacacttgtgttctgggttctaagagcaagggtgttggggttagtggggtgaagaggccaatctattgcactcctgtctgctcagcttttaactccgccttctggcctgggcactcagagaggagtcagaccctgcttgtcactagggcttgtgtgaatgtctcctcagtctattttggatctgtccagctgagactggggtttcttccctaagctgaggtcccgggggacccttcccccgctgggttcctgtcaaccccccatcctagttcctgttcctccca

SEQ ID NO: 16365 - DNA, 1262 bp, Artificial sequence
  DNA replication origin
gtcctactgctcgacggagtgagtgggtcctctctgcagttccacagctacctcatatggcttagggcggatcctgccataggatttatactggcatgccaacactaagaagggcctgattctaccttgggggagcagccagagagggcagcatgagtaggaagtgtgcaaaggaccttcagagggggaaaaggggagaaacagatcaaccttccaggacaggcaagacacccctggtttgaggggttgagccttccaggacaggcaagacaccccctagtttgaggggttgagccttccagggcaaacaaggcaagatgccccctggtttgaggggttgagccttccaggacaggcaagacaccccctggcttgaggggttgagccttccaggacgggcaaggtgagacatccctggtgttgaggggttgagccttctgctaatttcaagggttgaacctgacacaacccccccgctgccctttcctttcttcttgggggaagagagagtagttccactcccgtaggtccctaccctaggggaagagagagagagacagagagagacagacagagaggagagcgagatagagacagagaggagagagggaaagagaggcagagacagagagagagggaaagacgcggtgggggggaagagaggcagagagagacagagaggggatagaggcagagagagacagagaggggaaagaggcagagagagaggggaaagagaggtgtgtgggggggaagaggcagagagagacagagaggggaaagagggagagagagaggggaaagagaggtgtgtgggggggggaagaggcagagagagagaggggaaagagaggcagagagagaggggaaagaggcagagagacaaagagggagtcaaagagagaaagagagaaagtcaaagagaaagaaagagaaaaatagaagtagtaaagaaaaaaacagtgtaccctattcctttaaaagccagggtaaatttaaaacctatagttgataattgaaggtcttctctgtgaccctataacactccaataccacctctttgtcagtgtaaacaagggtgtagcccgaaagcactgaggccactgacaatctgtagccttcctatcaaaaatccttaacccagtaaccagcagatggcccaaatgcactcaatctatagcggcaactgctttactaacagaagaaagtagaaaaataacttttagaggaaacctcattgtgagcacacctcaccagttcag

SEQ ID NO: 16366 - DNA, 1069 bp, Artificial sequence
  DNA replication origin
ctcgccctccaggggtcgcgttgcaggctagaggcgccggcggcccctccctccgggcgggttggaaaggccggcccctgtcggcgtggcgcgatggtccgatctgggttgccctcaggccgcccctccgggcggcgcgttggttcggtccgcccggcctaaggtgctcgccccctccccggctcccgcagcgatgggcgcagccgagtcacgcgcagagctttcccgctaagggagcggagaggcttccgccgtggcccaatcttctgcggcccgcgcccgcccccgcggggtggtgcctggcgacgcgcggctcccgggtgctggaacccagggaaaccttccgcgggcctccagggccggtgggtgtgagtcccagcttcgcctgaggcggcggttctcaacgctggcttcccagtagaacctagtgtggaaactaaccaaacaacagaaggagggctgacctcacactggaccgactcagaaccactggggtggagtggggtggggtgaggtggggttggcctccagtgcatagccagggttcggaacccctgatgaaacgtagaacccatgcgccccctgcccttcagggccggatgtgtgggggacatggaagatgcctgtgtgtgactcctgctgtttacagccagagggggatggggcaggcagtcctgcaaatgttatgggaaacccactgtattagtccgttctgacactgctatgaagaaatactatgaaggaaagaggtctgactcacagttccgcattgttggcgaggcctcaggaagcttataatcatggcaaaaggcaaagaagtagccatccttttcgcagggtggcaggacagagtgagtgcaggcaagggaaatgccagacgcttataaaatcatcagatcttgtgggactcactcactgtcacgagaagggcgcaggggaaaccagccccatcatccaattacctccacctgttcccgcccttgacacagggggattatgggaattacaattcaagatgagattttgggtggggacacagccaaactgttacaggtagttaggcatgagc

SEQ ID NO: 16367 - DNA, 1158 bp, Artificial sequence
  DNA replication origin
tactaattaggtaactactttctaccttatcaactcctacagctttccagccattgtttcatccctcagcgataccacctgcttccgcgtggaacccaaacccccaggaaactaaatctgctcaggtcacccacctaggaataaataaaaacaggtttcaggccctttgtcctttgtaaattccgccttttttttttttttaaggcctgtgttctttatcacggacactgttcacatagtggtaatccttgcctgactcagatctacttgttcctgcgtttcattcctccgctgctcaattacttgttcaaaacgcaaaggacaactggtagtgaagaccctccaccagcaacactaccatgtgccaggcaccgtgctggggaccggggatacaaagatgagtagtgtaccgtccttgcccccaggacagttccccgtgtccgcagggccggcctggagggccacagccaactgtgggcaacaggatcaccgtgcccttcgcggcaagtgagtgcagtagtaggggacggttactgccaagccaaaggttttctccaggtaaaactggatgacagagagacagagactgaagcaacgccggcgccgggcggataataaagggaggcaggggctaaaagggtggagggagcagaggacccggccgggaactggcagtagggaggcccccgctgcagtcgccggcctgggtgccgggcggccacgcttccccaaagccgtcacagggacttggggtaccaaggtgactactgggcgcgagtcgttttgtggggggagggtgtccccaagggggcagtttgaggagacggttggggatgcatctggggtggcgcccaaagggacggtgggtgctgggtgtttgaaggtccggtggacgcagagctgaagggtcaggagaaggccaagggtcagaagggctggggacgaggtctgcccagggggtcggggcggacgcagagggcgggtgcagccgagggggaagggctgaagggaagggcaggcgctgaaggcacataggtgggaagacaggccctcccctaagggagaccttggaacgcggggcagtgggtctgtgggaccctgcccgcctccggagaggcgttcctacctcgtttctcgcctcagcctcgtccttccgcg

SEQ ID NO: 16368 - DNA, 1237 bp, Artificial sequence
  DNA replication origin
ggtaaccccacgcgatacggactgtgcttgtattaattctcttttaagcttactacagaaatatcaatacagtacttgagaattcctgcaggactcagcctcgcttcctcgaggagctctcagcctgcctccgcactcgagacggcagctttctctccctccgcccaccgttccgccgctaggtggcaggcggctcaacgacgcccttttaaaccgtttgccccggagtggaccgccgggatcgcgtgtcaccacccaaccctagcgatgattggctatttcgccgaggccggaggaggaaccagcggcagaaccggaagcgtctggtacggcgagtgcacggagtcctgagactgcgtgcgcacccaggcaccgcgccgacttaaagaggccagttgcagcccctcctccggccttagggggcagaccgtgttcctacgtggagggcggaaccctcacactgaggagggctgggtcacactgaggggaggagtcaccttgagaggaggggtcacaatgactagtggatttcctcggaggtggggtctcactgcgtgggaggaacacagagcaagggggtgcagcactgaggggttctgacacactgacggtggcagtgccacactggggaaaagtgcccccgaaagggaggtgtctcactgaggaagggaggggtctccgagggacagcgttctttgaggggggtgggatcttgcggaaggacgggcttccctgcaggtggaggcttctctcttagagtcttttgggcaaagtagtaagagggaggtcccggctgggtggtcacagggcggaggacctggactctcttctttattgggaggcggcaggatgaagtgaggaggagtcggggctaagctgggtatgggccggccaaaggcttcctatagccccggggtatcacaacctcccgtgaaggtagaaggtgttagggaggccagaggttcaaggtgtcggagtcgaagagacctgggaaatgggcaggctgggccggggcgcaggccaggaaggtggacaggttgctaggctacctctgattgcggctgggcctgaggggcctacctttctgccccgttggtccctggagcccaggaatccggcaggtttctgagcccgaccctcaacggacagtaacccagggaggagaggggactccctgggcagctaagcttcgcatgcgcaccatcagcccttaattccctcccgttattcaagctca

SEQ ID NO: 16369 - DNA, 1246 bp, Artificial sequence
  DNA replication origin
gcccgcccgcccgcccgcctccgcccgcggcaagccagcccgccggcgccccggagcgctgccgccaccgtcaccgccaccgcccggtccaggcccaagcccaggccctgcgcggagcggagcggcgcggcgtccacccgggcccagccagccggcgcggcgggggcgggtccaggatcttcggcggatcttccattctcagggcgggagccggagtccgggcgcccgggatcgggctgggcccgcgcccatggcaagcgcggcctgcccgggccctggggaccctgccatgtgaggcaggcccgggctgggggcccggccatggccggggaacggcccccactgcggggccctgggcccgggcctggagaggtgccgggggaggggcccccggggccggggggcacgggcggaggcccgggccggggccgcccctcctcctaccgggctctccgcagcgccgtgtctagcctggcgcgtgtggacgattttcactgcgcggagaagatcggggccggcttcttctctgaggtctacaaggtaggaccggccgagagggcagaggggcgggaccgagccttcaaccagaggctgaaactagggggccgggagtgcggggaagagggtccagactccggcgacccgcccgacctgcccggccctcgccggctgctcctgcccccaggttcggcaccgacagtcagggcaagtcatggtgctgaagatgaacaagctccccagtaaccggggcaacacactacgggaagtgcagctgatgaaccggctcaggcaccccaacatcctaaggtgagcggccccagtctctgggcagcttgctgggcgggagagaaagggaaagatcccgcgggaaaagtggaactgaggaggagctgaggcctttaatagcctatccttctatcttccccatcctcttgcaggttcatgggagtctgtgtgcaccagggacagctgcacgctcttacagaggtgaggataggccaggaaggagggatccccaccccccttcacccccaaggataaagggagtcaacaggcctggtggatctacggaggactagtgagaggcaacaggatctcctctcaggggaggctttcctgaactttcctttaggcaaaccacatataaaaggcctcaactggtcttattctctgtatcccctagaacagtgctgtccaatagaattttcttcagtgacggaaatgttctctatctgtgctgtccaat

SEQ ID NO: 16370 - DNA, 947 bp, Artificial sequence
  DNA replication origin
cctctgttgctcctcactttgcaaggtctccttcgtcttctgtctgtctgcctggcaggcctgtagctgcccttcggccgcctgatgagccctctgttccacctgtagtgcttcctgactctgcgccagctctctcctggacccctgcagatcctctgcactctgtcccagctgcgttatcttgaggcggagctgctgcctcaggctgctgttagtgacttccagaaccctgttcgtctgctggagctgctgagacacctgcagatctgtttggccacagagatttggtggatgtcttctccagccctgccctagtgccctgagactgcagcatcagccctttttctgcttcttgcaactttttgcatcacaggctgaaatacaagatttgactgactaaagcgtaaggaggtactggattaggtgaggacaattcaggaagacaacagccctggctggaaaccaaacccaaagctaaggaggtggtggtagtgactatgatccctgctgaggaagatcagctttggggcgagagtcgggacgaaagtcgttcggtgtaagtgggaagtagggacagccttactcacagcgcactcccaggcagatggcggtcactcctaacagcaggcaggtgaggagcaggccgagcaggaggtatcgcaggcaggttgtgcggccttagggggacagtgggatggatgagggcagtcagcccccgtaaagaatgtagagaggaagggacaggtccgtgggggagacccctggggaaggcatccctaagaggagggcggtgcagagctgagggggcaagcatggtggtttctgtcgggtagcggggtgtttcgcaggtaggggagagggtgttccagaatcagtgctggtggggactcgggggcgttacctgggagaaggggaaggaaatatcagacggagagaggggaaggggg

SEQ ID NO: 16371 - DNA, 1399 bp, Artificial sequence
  DNA replication origin
ggaaatcatgtaatctcgcctagctatacctggggaatctgcctgatagttcctttgggggtcctctcggggaactgctctgatgccttcctggaggcctggctcatgaagccagcggttgtcagcgtgagactgggctagagaaaaaactctttcctgttcatctggggagagggtggaagtcaggatgacatttaagtcactgcaggttaacttgcaggacagagttagatatcggaattcctgtatatatttagcggggtctgatgagaaagagcccaaacactggctgatttgggaaaagtctgatacagaaaaaggcgcatgtacccagactatgccttcagctccagccacttctctaagaggaaattgttgggcaggtgggggagagctagtcgcagaacaaaactgtaagccagactgggtgtgaggaggggaggtgatagaagggttatagggtgggggagcggaggctgaagaggagctggagcctgattcagcctggtggggagcgacctgaggaggagcagtctggggaggaggggagaggtcagatgggtcggtagaaaaggaagattcaaaagacccagcaacacttggggttgggactgaagggacaggtgggagggaaagaaggaggatttgggacaagtcgcattgggaacagagactagggagagaatgaagtgtgaaagacgcccggatgtacggcacctccgaccatttgcccatttttcgacaaaaattatctaggtcttgtaggatagacaaattgacagtgccgttctctggccacttggaactattttcgagtttgtattggggccaagtggtattgcagaagaaaataaggcatttaggttttaggtcaggtgtgagttgaaggggttttcaagaacacaggctaagggaaaagatgggggaatcgagggtggaaggttgcccatagtgaaggaggtaagtttaaagagaaaggtagagacacggagcagggggtgatgagcagccctgggctgcaatgtgggtgagcagccaaagcaggcgtccccacaattgacttgccaccaagggaatgtgggtgaatgaccaaggcaggcatccccgtggtgatcagacaccaatgaaatgtgggtgaataatcaggcaggcatccccgcagtgattagacaccaagggaaggctgtcttcctgagtccatgaccagcgccggagttttgggtccacagataaaatgtgtctcctttgtctctactagagaggaaaaagaactggaattggaaggacagggagattgaagggtagcaagagagggagattgaagggtagcaagagaggctggagaagagagtgaaaagaccgcttacccaatttgaaattggtgagatgttccttgggc

SEQ ID NO: 16372 - DNA, 997 bp, Artificial sequence
  DNA replication origin
gcacctgcaggggcacccctacccccggccgccccgtacctgcaaacacttgtacagcacaaaagccgcgacggccgcggtgtacagcgcccccagaggcagcgacccggcccgggtccgctcgcgttgatccttgagcggtggtcgccgccggggttccgtggctccagagccggggtgggctgcgttccctgcggagggaggatacaggcgagtcagccgagctggggcctgggacccgtgcgcagtcccagccctcctccagcagccctagctggtacctgggtgtgcccggaggtcgggattggcgcggtctcctaggaccccggacagcgcagacacaagcagcagccccaccacacccaagagcgaaactgcgcccgccattgccggcccacgggtggagggatcgggcgggcggtgccgaagcggtccggcattggccggccgccccaacgcgcacgcgcacgcgagcaggccggccggctccggggaggccacgcccactccccgtagggcggggccagaccatatttgcataagatagtgtcattctagctttcctgtatttgttcatttcgtgtctattagctattctgctagccacaatgcctctgaaagcctatagtcttagaaagttatgcccgaaaacggtttttttaatctcacgccaccaactttctcaccctaatcataaaacacaatttctttagggctataaaatactactctgtgaagctgaggacgtggttcgtgctgaaggcctgtatcctaggctacacactgaggactctgttcctcccctttccgcctaggggaaagtccccggacctcgggcagagagtgccacgtgcatacgcacgtagacattccccgcttcccactccaaagtccgccaagaagcgtatcccgctgagcggcgtggcgcgggggcgtcatccgtcagctccctctagttacgcaggcagtgcgtgtccgcgcaccaaccacacggggc

SEQ ID NO: 16373 - DNA, 1322 bp, Artificial sequence
  DNA replication origin
ggagccggccggcctgctcgcgtgcgcgtgcgcgttggggcggccggccaatgccggaccgcttcggcaccgcccgcccgatccctccacccgtgggccggcaatggcgggcgcagtttcgctcttgggtgtggtggggctgctgcttgtgtctgcgctgtccggggtcctaggagaccgcgccaatcccgacctccgggcacacccaggtaccagctagggctgctggaggagggctgggactgcgcacgggtcccaggccccagctcggctgactcgcctgtatcctccctccgcagggaacgcagcccaccccggctctggagccacggaaccccggcggcgaccaccgctcaaggatcaacgcgagcggacccgggccgggtcgctgcctctgggggcgctgtacaccgcggccgtcgcggcttttgtgctgtacaagtgtttgcaggtacggggcggccgggggtaggggtgcccctgcaggtgcgggaccgccgggcgtggggatcccctgagcccgaatctcccatgggggtgccagggtaccaagaacaagacacagcttccctgtctgtaaaataaagacagtagtccgttggccttccaatattatgaggttattttgaggatccagggaggtaacggatgtgaagagcgtgtggtgaactgtaaataatgactatcacatttagttctcctacaatccagtgaggagtagtcacttgctcgaggtcacccagcgctggcaactgctggagctgggatttgaacccagctagcagtgtccatgctacaagagtggggccagccttggcacaggaggttgattgctgcagccagtgtttctagagttccagatatgaagtggtctcatgttctccttgggaggaggccctgaaatgtaagttgacagtacattttgaaaaacagtaccttccagggctgtgtctttagccgtgaccctattacgtacttgcattataaaatagaaccgatggaaccagtttagatatatgaaactagaagagatagctaataatgaccccaggtagatgtgacaggctaggatgaatgactgaatttaatgatgaactttgagaaggatagactagtaaattctgttcttggacctgagtacagtctgggagaaacataatgtagcaggaggtcttatgaaagagagttaggcattccagttgactgagttcactgtgggatgtgacaagccacttcccaaatcagtgctgggaacatggcactgtgcttcacctgccaatcagaatgcccctggagaattgtattctcctcagggcattgct

SEQ ID NO: 16374 - DNA, 889 bp, Artificial sequence
  DNA replication origin
acgacctgcagccccccagtgcagatgcagctgcagagcccggtactcccgcccgggacccagagccatctctagcccaggaggcagggtcagttgcactgcgtagggagaggcaagtgagccggccccgcccggtagggccagcccaacccccgggcaggcactgccgcgacggttcccttccctgcgccccgccccatccccaagtctcggcggggagaccccctcaccactgtggccattgttgcgcaggcgcagttctgggagcggcgggagctggaagcccaggagttccagggggcgcagggccgggcagaaggcggcgagctgggggcggatatccaccggggactggaagcggcccgcgcaggctggggacacccggggccagggcgggtcgcctggggtgggagagtatagtgaggaagtctgacgcctaggtcaggaacttagggaacccgggtagaaaaggtgagggggtgggacggtgggcggcgggtgggacgcccgggaccagtgttcagggacggctgtaggggagatccacagagctgggttcccagattgggtctgtgcagcgggtgggtgtctcacctccatagcgccaatgactctggtcatcccctgtataaatgaaaaggatgaaccgctcaagcttagagccccaatcccttcctggcgaccaaaacgatgtcacaaacgcagatgccttacaggagcattacgggtaacaaatgccttaagcgggccaggtgcaaagcacaggagaccgcacccaaactcaacaccgcagctgggtgggccaaacagcaatcctaccagcttgcaatcattgtcttagggtctgtaaaagtgagtggctgcttcaggccaggcgctgtggctcacg

SEQ ID NO: 16375 - DNA, 777 bp, Artificial sequence
  DNA replication origin
taaactactttatcctcttctttagaaggtttaaggaagttggagacagaaggtaagacaaagactgcgccaggaaaggaagggccagacagacagacttgaggtagaaaacagacctgctgctgcagtgaaagccccatgttgctgatatccaacatttttccaagctccattccagaccttttgcaaccttcttgcccctgtcctgcacctcaccaccctacttcctttccagtcactctgtttgatcctggaaccccagctaagtgctctgaggtcagggattggcaccagaggcggtcatggtttgatggggccacacgtgcccacatgcagtggtgaatcagagagcgacagccagggagtgcctgtgcagaggggtttcagcgtgggccatggtgttttgtgggtgggctcagtgcaggggctgggggtgtcagtaagtgccagggtgtcaggagtgaaccagtgctccgtggtggcgatagaggtgctctctggagggcaggaaaacagcatggagaccaagttcagaatttattaagcagcaaaggagggtggaaggggataggtaaaggatgaagccagtgccagagtgggtggtgggcatgatgggggctctccctaggctgctcccagcctggctgtgcaatgttggcaatttctgctcctcctgcctgctcccctccccatagagagaatggaaaggagaggagagaagagagctgaggtggccacgctggcgtggggctcagagggaggtgatgtcattgagtg

SEQ ID NO: 16376 - DNA, 1398 bp, Artificial sequence
  DNA replication origin
ggcggccgcaccccccggccgggccgtgcttctgcccctacaaggtttgggccgaggtgggggagggtcctggttgccggccccgcccggtccctccccgccttttaggcgcccgcgtggccgggacgtcccagtcccgctccgtcctcctcgcctgccaccggtgcacccagtccgctcacccagcccagtccgtccggtcctcaccgcctgccggccggcccaccccccaccgcagccatggacgccatcaagaagaagatgcagatgctgaagctggacaaggagaacgccatcgaccgcgccgagcaggccgaagccgacaagaagcaagctgaggaccgctgcaagcaggttagggccgggcccagtgcagcctgctctccccgcgcctagggcaagggtgggccgctgccatgggtcccccagccccgggcctgcccgccaaggctctctctcacccagggtgggggctgggccttcgcagtaccctcagggccttcgccagagccgcttctctcccctacaatagcctggggaagccccaggcccctggtttccactctgcctttgcagagcgcggttggtcctgctccttggggcctgaagttttctctgtaccctcaacgggtcccaccagtacccttgactgtactgtcccttttatgttattccgcttccatcccagtagcctccaaatcttagtagcgcccctacacacaccgcgtctccattctgggcctgggccccctcccagcctggctgaccaagtcccctctgtcccagctggaggaggagcagcaggccctccagaagaagctgaaggggacagaggatgaggtggaaaagtattctgaatccgtgaaggaggcccaggagaaactggagcaggccgagaagaaggccactgatgtgagtgtggacttgggggacaatgggaggagttagggctctgggaaggggccccccgggtatgggaataagaggattggggcaccttatccccttatgtccccagcgccaggagagaaatggtttcatctcagtaaccagggctagggtaaacttacacaagtaatccaagacagtggataaatcaaaaccacctaccacttcccccagaggacttagccctgtaattctgtttggttccagcttttagaatgtacagtgatcaagcaatgagtcattgtgggggtggaaggtataagaatttaccatctacctcaattaatcctccagctgaaattggagaggagactgcagccgtttggggatggggggatgtggatgtgaggtactagcctgcaggaggagggagagggatccagagatgagaccccacttgagttacaaccctaaggggccattagaaattccctggccttgacctctggc

SEQ ID NO: 16377 - DNA, 864 bp, Artificial sequence
  DNA replication origin
ccgcttgttctctcctccccttccccctcctcccggcggctctccacttcctttccccccaccccaccccagggaaaaacgaaaacaaacaccctcgcgcctcgcgcctccgactcccagaccccacgacccggctccggcgctggtttggcggcctgggtgggagaaggcacctcgccccggaccccctatgccccgcagctcagtgactcttcccctcgccctccgccttccccgccgcagcccggctccgcctcccaatggggaaacatcccaaaaaagggcagaaaagaaatttcagcataaagttggcccactgggaaagagaggagcgtccgcggggagcgggggagaagagggaaggcgcgcggaggggagtggggccaggcggagccaggggcggggagcggaggggctcgggacgcgtccgggtgggagcgggggcggggaacgcgcggtgaccagcctggccgcagccgcgtggaaaatatgcggggcacgtggggggcggggcggggagctgggtcctgagccgccgggtgctcgcaggaagggcctggctccaggggcaggggctgggaggggaggcgaggggatgagaggtcaggccggtcctgggggcagcaagcccggccacactccccaccgcgaccggggctctgggctcgcttcctgcttcagtttccccaagctcccgatgagactccgctactaccaccacgtcgataacgcaaacctagagggactcagggtaaactgaggcactcaaactgccgaggagctccgcctcccgagagacatttaatccggggggatttgcaggaaacttctaaattaagggtagcggctgctgcagctgagggg

SEQ ID NO: 16378 - DNA, 1000 bp, Artificial sequence
  DNA replication origin
ggtggtagtagcggagtctcatcgggagcttggggaaactgaagcaggaagcgagcccagagccccggtcgcggtggggagtgtggccgggcttgctgcccccaggaccggcctgacctctcatcccctcgcctcccctcccagcccctgcccctggagccaggcccttcctgcgagcacccggcggctcaggacccagctccccgccccgccccccacgtgccccgcatattttccacgcggctgcggccaggctggtcaccgcgcgttccccgcccccgctcccacccggacgcgtcccgagcccctccgctccccgcccctggctccgcctggccccactcccctccgcgcgccttccctcttctcccccgctccccgcggacgctcctctctttcccagtgggccaactttatgctgaaatttcttttctgcccttttttgggatgtttccccattgggaggcggagccgggctgcggcggggaaggcggagggcgaggggaagagtcactgagctgcggggcatagggggtccggggcgaggtgccttctcccacccaggccgccaaaccagcgccggagccgggtcgtggggtctgggagtcggaggcgcgaggcgcgagggtgtttgttttcgtttttccctggggtggggtggggggaaaggaagtggagagccgccgggaggagggggaaggggaggagagaacaagcggaggaagccgggagggagctgctagcctcgcccccaccctccagtcatagaggggcgggaggcctggattttgcagtgggctggggaccgtgggaacccgaggccgctggccggggcggtggggaggtggcgtggaaatgcattcagatctgtttagctgcctgctagccacacggagagcaaccctggcctgacctcgcagtgttcctctaactccgtggaagacgcctcatccaccagtagcctatgctagaccactgggtatcccctgcccttcgcgtc

SEQ ID NO: 16379 - DNA, 657 bp, Artificial sequence
  DNA replication origin
gggtagctgggggtgggggaagatagtatcaaaaaacggtgaagagagctgatgaggctgtggggactggccggaagctgctggcagggtggagtgggctggggccccggcagattcagatcgaggtacagcagcgttaataatactcttggagcgttaatactctggggaggggcaggcacttggggggccctagggcatgaaggcacttggggttggggaggggacaggggatgtactgcgggactgggcggggccaggccctggggtttggcaggcactttggggagtgctggggttgggcaggttgggccccgacagcccagaaggctttggtagtggcacgcacagtctctgggccgggtctgcattaaatagaagaggcttctttagtgctcatctcgaagctctgaaggcagaaacttgtactgctgctgccggatctgggccagtttcttccgcgcctcttccagctctcgttccttccgaagcatttcttcctgtgctgcgatgatctgagggtggagatcggggacttagttcagtgaggatgcacagcaggggcatagggtagttgggaccagcgcaggcaacatgactgccctcctgacagcgtccctcagcatctggggtgaagctcacctgggcaatgccgcc

SEQ ID NO: 16380 - DNA, 1808 bp, Artificial sequence
  DNA replication origin
cattatttccatttttacagatcagaaaacagactcaaagatgttaaatacttgttcaaatacttctccaaataataagttgtgaagccaggatccgaacccaggtttctgactgcaaagcccaagctttctccactacgccagccagctggagatgtgtcaggggtagttttcactccaggcagagaaatagcataagcaaagatggagaagcagtaaatcgtggaggagcattcagggaagtgagcaggcaggctgttgaagcacaggggtacctgcaagggagcagtggtggggaagtcagggttaggatggaaaggcagaggaagactggagaggggtatgaggaattttacttattggaggacaaaaggaagccaagggagtctttgagcagagaagagacataaccggaactggattttagaaaaataactctggcagttaccttggagattagttagaaggacactgtattagtacaaattaaaggtaatgaagccggagttggaatggcattgaggaagatgtcactcagaacaagtttggggaggtagaaatgacaggacctaataactactaaggtagacaggttagagtcccacagcttcctatcatcagcagccactttagcggctggggcagcttgagtttaggcgacgaattgggaagaggggaaaggatcaggttgggcagagaatgtgaggatgaggctgtggttacgggatgtggttaggctgtggggaaaaagggtatgagtatatgattagtagccactaggggcagatggggttgggttagtgactgcatcaggctgggaatggggaagacagggtgtagaaaaaggatgagaagacagggtgtagaaaaagaatgctggtgatgatggtgtttggaaaaatacatatacataagatacatatatgaccagtcactgcatcaggttgggggaaggggaatgattacatggatggtggctaagtcagggaatgatggggtgaggtcagaggccaggtcaggctataggaggttgagaagagctgggcctgtggtcagtcactaaatcagactggggtgggggtgggaaagtgaagggacattggcaatgtctaagtaaagctggagctgggatgggggatggggtacagccagtggctgggtcaggctgagtagaggatagtgctgtggtcagtggcagggtcaggctgggagtgaagtgggggtgtggtcagtggcctggctgggcgtgggatcagcaagacccagtttcctctttgggtctcgtttcctcttttctgttggggagtgggggaaggggatctacaaatggtccaagaaattaaaagaggcttagatccagggggtgacacacagcaggggatgggagtagggtattcagcagatgaccaggtggaatgtaggtacatgactgggtgaaaatggtaggagagtaatttaaaatgatgggaaagctcaggttttgatgagggtaaattcaggtaggatgtgcggattaaaggttggtgagggaggtagaactaaggatgggaacggatgataagatgagcatgggagagttaaaggcaagggaagtattttgtaaggggataggcaggatgggtgtgaaatgcagagtcagggatgagagttggagaggagggcttaataccaagagaacaagtgaagtgggagaagcagggctaaactttcaggggattcagttattcccttctcccatggcaacagtgattccttggttagcttcccccatagtcatcagctccttcttccctaggcagtccccaact

SEQ ID NO: 16381 - DNA, 1269 bp, Artificial sequence
  DNA replication origin
gacggccctgctgccgcctcgcaccccgagggcgggggttccggggctccggctccgccttctaccccaagctagaaaaaggaagagttctagcctgaaagggaactcgggcgtcgtcctggcgtcctctccggattgcgccgcaccctcgcttcctgccagggaggggctgccgggctttggcggctcccgagcatcgagaacggggccagagcagcttcctgcctgccccccgcgaccatagagcgcgggcccagggcgccgcccgcgggtgggggacgttcccaggacggaagtggccgagagagtgtcgaagggagggcgaggccggagcccgagggcgacccgagaagcggcggggcggcgggccggcgggcggggcgcagagccaggcagcgcaggtaggccagaccgggccgggcgggggccttagggtggggccgcggggcctggccccggggcgggcgggccctgcctctcttgcgtgtccggttcgggtcctattagttggagaggtcagcgtccagcgcatctcggcttgagctcggcgtgaagtaggccgtcttggggaagacaggcctttcctgggagcagtcctatgtctgggataggctttggggagcgtgaggagtcgggtggcagcggggcgcagggcggggacgggctttggtgttagctgatagcgggcatgtgggtaggaaagctttgggtgagttggggattaggtggggtccgtttaggaatcaagggtcgctataggagttaaaagctggggttaaaacttaagagttagtgtgagtcaggtccgttttagataggtaaggtttagattacggtcattatcttgtttgctgggatggccatcatacgtcataatttgagttcagggtcaggttaagggtcaacaaacaacaggaatcaggttagagcttgtttgagggattaaagaatgttggcatggtcggtgttaaggataaacagtgaaagcgtgagttaggaatcaaattataaatgaactttaggcttaggggtcaacatttagggttaacatcaggggatttggtgctaaaggcaaaacttagatcagtttcagggatcagggattggatatgagtctgtgctaggaaagggatgaatgtccaagccggtactgggaatcaggaaacaaattagaggtggggttaatgttaggaatttggggcagctttaggggttgtggtttgaggctagcatagttgaccttgagcagataaaatttaagaggttggc

SEQ ID NO: 16382 - DNA, 1113 bp, Artificial sequence
  DNA replication origin
gagccgccaaagcccggcagcccctccctggcaggaagcgagggtgcggcgcaatccggagaggacgccaggacgacgcccgagttccctttcaggctagaactcttcctttttctagcttggggtagaaggcggagccggagccccggaacccccgccctcggggtgcgaggcggcagcagggccgtcccctacatttgcatagcccctgggacgtggcgctgcacccaagcctcttctcagttggagggaactccaagtcccacagtgccacggggtggggtgcgtcactttcgctgcgttggaggctgaggagaattgagcctgggaggcgggtccggagagggctatggaaagccgccggcggggaatcccggccgtagagggacagtggataggtgcccgaggcctacagctggcctggggctcgtgtctgggcttcggacgttggggcccggtggcccaccctttccgtagttgtcccaaatggagctggaattggatgctggtgaccaagacctgctggccttcctgctagaggaaagtggagatttggggacggcacccgatgaggccgtgagggccccactggactgggcgctgccgctttctgaggtaggttggggttctgactggggaaagcgtgggatgtccatgaagtcaggtgatggtgataaggtcaaggcctgttcattggaaccctgcgcaggtaccgagcgactgggaagtagatgatttgctgtgctccctgctgagtcccccagcgtcgttgaacattctcagctcctccaacccctgccttgtccaccatgaccacacctactccctcccacgggaaactgtctctatggatctaggtgagtctgaaataagtttgcggggaggacagggttcatgggcctggctattcatactttcccttttgcagagagtgagagctgtagaaaagaggggacccagatgactccacagcatatggaggagctggcagagcaggtacttgacttgattttcaggagattactctcacattccccaggtgggggcaggattccccattcctctctgacatccccatgcaactgccgtccactttcttgttaccctaggaga

SEQ ID NO: 16383 - DNA, 1464 bp, Artificial sequence
  DNA replication origin
acagcaaagaagccgccttgggctctccttcggttgtctctgtaggtcctggacgggaagggtcgggcctcgtcgtcattgagccgacgattagctcgcccggccaaagggcgactgggcccgcagagaggggaggagccgcggggccagcccaccaggcaccgccccgggacgggcccgcaaggcaccgcccccgggacctcggcccggcccctgggccacggcaccgggtcccccaggattgggcgccaggtcccgccggccggctccggggcagcgcccgcgcccaggtgccagcccgtgggaaggtgaccctgggcgccgggatgacccgagccctttccggtctggcctgccgggcgcttccggccggaagggactccgcggagggtgggggaccgaagggaagtcccgcctctaccgcccagcggacgccgccgccgccgccgccgccgcgtacctagccaggtccctgaggggcgggcagatgaggcctaggggtgccgatccctagtgtcgactatgcgaggtgactagcggcggtgatcttgggctgggacgtggaactttgaggaaagggggagcggaggccagtttgggaactccgcgggggtgcccagggagaagaacccgtcgcacaggggctggggtctagggcccagagcgatgtcctccccctgggcagtactgagtcttcagtcgcctccctcccacccgcctacccctcctatatccaggagctccctcgggcaccacggtgctgaccacccctgtcctcagccctcagccctaggtgctcaccgcaacgcccctccctgtcaaggtgctgacctccgccccgccttgtttccttctagatctgattccggagctgccatgattgaagtggtagcagagctcagccggggtcctgtatttttggctggggaggcgctggagtgtgtagtgaccgtcaccaacccccttccgcccacggccacttctgcatccaggtggggatgctggcactgaaggtggtggcccttctgggaagaagccagattatctctggggctgaggcagagctcaggttgtcctgtagcgacaccacctcctcttgctcactgtgctgtcattgtaggagagggctctttaacagaagatgtggatgacatagctgtacgctttccttcccctcccccgttcccctttttacgcacagtctgctactctttatttaatggtttctctttgggattgtggatttcctgatcactaggacagccatctaaccttgttggttaagatggtgtgatagggagcttgggaaagcatttgtgaggtcaggaactacctctgatgcctccttttccttttcccacagtgaggccctggcctgggccagtgcccaaatccactgccagttccatgccagtgagagtcgagtagcactgcctcctcctgactctagtcagccagatgtcc

SEQ ID NO: 16384 - DNA, 1049 bp, Artificial sequence
  DNA replication origin
tgccgaaggggaagggatcgccagtggggattggtgcgtgtgcggaaacggggacagaagtgaaggttcatcgcctataacgaagatgaggtaggcatataggggcttctggaaagctagaggctgggctgagccaggagtcctctcccagaagttggggggcggtgcagaggtgtgggtcgagcccgcatgcgtgcctgctggggagggggtgagtggtgaggaccaggcccgctgggtcctgggggcgcggtggctggcgcgcaggtcccggagggggcggctggcgcgcactacacgcttgggaacaaggaaaacatccgccggaggcccggccgggcggcgctccagcctcggggcaggtgcgcggagaggaagtgagagcattccggcccccccaccccaaccccggccgctggccctctggtgagtcacagccgacccccgccgccggagggagaggggagctgcgggccagagccccggagggtctggaggagccaggagggtttctgggagcagagggtcacttagtgggcttctgtcgtggtgtcgctacgggcgcgaaacggacactgaacacagtctgactgtatggaggcaggtggggagggatcccctgggagaacttggcgggccgagagcagaccccagggcaaggaggggcccccgagggggaaaccgggagtcgggcaggtggcgtaacccagaaagggaaggagagccggattgattggggtgagagaggaaggaagcacgccaagttaggcctgggagaactgagggacctgaggagggaggagggagaccaacacagggtgggaaggcggaaatggccaaaccccaggcatcaggtctgtccagaggctgacgtagacagtgaagggtgaagggtaggttttaggagtagggggagttatgattatttggttacattttgggattatttggtctcacaggtagaagggagcctgctggtctctgtgtaacggatggcttaaaagcaaggttgtctgcgtcttggattactgtctgccattcagcctttg

SEQ ID NO: 16385 - DNA, 1651 bp, Artificial sequence
  DNA replication origin
gctattatattgtaagcacagctttctacagtaagttccatgagtcagcaaaatatctataaagagcctctccttggagaccatgaaacctgcattttaatctctcttttgcaactaaaaagccatgtgggattgggggagaggagcaagtaaggacactgcgaccttcctctctgggatttggttttcaattatctttaaatgagagggctaaacaatatatttatatgatcctcttagccctgccattctgtaattctttcaggaattttgtcattttggatttgcttgtctcataaaacaatgtgtagttgcttaaaaatcaactattctatttggttgacttggtctaaagtatttctcatgttgtctcgtcattcttttgactgttccttttttttttttttgccttggccagataggacaaaattccttttcactgcagtattgggagcctggaactagagttaccaacccctctgcgttaaagaaggagctgtcctgaggcttccatctctactgggcttgaggcaagaacattgttagggacggcctgctcttggcctctgtgccccagggattgcaaatgcatgttcctcaaaggtaagggctgtatcattcggctttctttgtattcacaggtacagcttgtgctaggcagccggtgttcaataaatatcgtgcctaaggataaagtggcattgtccttaatttcccccaccaaaccactaggtgtcgccttcatctcagggaaaccatgcccgtcctcgccctatacactcccaccccactccagggctccaggagcgctcttagcttgtgatttctggagaaatagcttgaaggggggagagaaaccgtggctcttagcgcgggcagagaatgggcttatgtgcatgtcctttatgacagttggagaaaaatccccaaggtcccatagcagtccctctcagccaccatgagatcatccctcacaagctgttcttggggtcagattggcactccagatatgagggccctagggagagcttcctaagggaagctgggagcaaggtggaaccccaggagagcgtggatgggcttccactgcggggagtgtcccgccggtccgttacaggctttccccaggcgccagcctgcgctgtgcaggagacaaaagaaaatcgaggccctgactgagcagatggtgcggaggaagccgggcgggctgcggtgggcctctgaggacacgaggagggcagggggcatggagacagcggggggccgagagttgagtcccaagcaagaaggagcctcgtggactttctaaggactggtgggaagtgtacagcaggggcccctggctgctggaggggcccgtccagggagcgggcatggtccgcggtggagtaagccgcactgccgtcgggagggcgctatggtttgctaggtgagggggctggtgaggataccacacgtctggggatcctcgactgcttcctggagactggaaccactgagggactcagggagttcagaggggagacccaagaagaacgggctgagcgagggggagaggacaaaccctggggtcgctggcgtgtgtgagatggaaatggaaggaggggcggcagggggaccaggggcgtgggggagaccagggtaggccctg

SEQ ID NO: 16386 - DNA, 1144 bp, Artificial sequence
  DNA replication origin
aagtgcccgtgtagtgtcaccacaaactcacccagcttgggagcagaggggccagtgcgaaccagggtacgataatggtcattcttagccgaaaaaccagaggccacagcacccgcagtcagcaggggaaggcgccagtgggaggcaaagcgggccacagaggcagcagggtacacgcaaccgggacctaacagcaggtcggggtcatggtacagcttgaggtccacagcgctcagcggtgccaggtactcagagcaggcgccttccagttcggagctgacaaaccgcaggtccacgggcagtgcccggcccagagcctccacagctagtgccacagcgggtcccacccgtggccaggcccaggcatagctcaggttgtgttctggcagcaccaccgccagcgtcaggttccgcgccccgggaggacgcaccccacctgccagggctgccaccaacagcagaagtgatggcagcgccatggggataaagcagcagccccaccgcccccagaacttggggctgctctggcctacaggggagacgcgagcaccccccagcctggagcctggggaagagggccaggaagaggaggagtaggctaggtaggctgggatgcagaaggtgctgggggccggggagaggagggggagatgggaggaaggcggggggcgggcaaggagtgggctaccagcctagggcaaggactgaggactgagaacggggtggcagggggagggagggaccgagggggcctgcggccaggatggggacagtgcgaggtgaagaagcctgataaatctaaagctgagaaggaaaaggggatctgggactgggatggggtgggggtggggggcgggtggtacaaagaaacggcctgggggaacctcacagctgaaagggccgggagggcaggagggcgctgcgccacataggaccaagggggtaaggtgggagggtgcccgcgccgcggaaggactgggatcatgggcaggcggggagcgaagcgaggcctgggccggagggcaggggaaggcaggggtaaatctccctgtgaaggattctcccggagctcctgcttggactaacgggcccgggcgctggtcccatccggagctacggcggccccgcccgtgtccccgctcct

SEQ ID NO: 16387 - DNA, 923 bp, Artificial sequence
  DNA replication origin
gggcacatttcagagtggctatcaatcacattcactactctagggcacaaacattgctcccgaaacttaatatcccctcattttcacattccaccttgatacaaggcttcacccctcatgctctcttcttccttgtttgcatctgcctagggtgttcacaagctcccatgatgaagccttggccctctcacaggtgctctgtccacgtgtgcttcttgatcccaaccaccacatacagctgctcaatgcctatctccatctacagttccccagtgctgagctttagggacacagcgaccctcctcccatgaccctaaaatagcccaggccacactcactgcgcccgttggcccggatgaagtgggtggcctgctcggggccccctggctctcgggcatacacctggtgctgcacactgaggttgctgccctgcagggcctcaaagacgccctcgatggtgaagtagtgaggccggtcatctgtgcgagcatccaggtacagcaaggcagcacgggcagtccaattgaagtgcccgtgtagtgtcaccacaaactcacccagcttgggagcagaggggccagtgcgaaccagggtacgataatggtcattcttagccgaaaaaccagaggccacagcacccgcagtcagcaggggaaggcgccagtgggaggcaaagcgggccacagaggcagcagggtacacgcaaccgggacctaacagcaggtcggggtcatggtacagcttgaggtccacagcgctcagcggtgccaggtactcagagcaggcgccttccagttcggagctgacaaaccgcaggtccacgggcagtgcccggcccagagcctccacagctagtgccacagcgggtcccacccgtggccaggcccaggcatagctcaggttgtgttctggcagcaccaccg

SEQ ID NO: 16388 - DNA, 864 bp, Artificial sequence
  DNA replication origin
caacaacaacaacaacaacaactactactactactactactactactactactactactactactacaacaatgtgaagggactgaggggtgggagaaagacagatgtctttgagggaagagggcaagggccgttggagaaaccacctaccctctgggctttggcttggttgttacaagtccttaggtcaagaccttgacttaggatggcagggggaggtgttgatcctcagggaggaaaggctcttggttgtggatgtgcctcagctgcaggtgctgagtgttgaaatgccttgcctgaaagtctgctatctgggaaggggacttggatatctgcagaacttcgcaaaggagctctggcatgacctggggaagtgggtagggacaaggggtctagggccaatgagggagggtcttgactgaagcctccggaacccgggccaggagagtaggcgccggtcaccagggcaaccggaacgcctagtagtctccgtggcaacggcggtctggtcacctccccggtgggtaaggtctcctgaggggcttgcattgggcctcgagggggcgagcccagagggtttacttctgaaaagtggggtgtgtgttgcgggatctctgtgagcgagtgtttgggtaggatctgcggagatctgtgcgtacgtccgggggagtctgggattgtgaggatagggttcctttgagacatctgtggggcggtcgttgggggctgtgaggatctgaggggacctcgggctctgtgcttggggtgagaaaggcagggtctcgggtagctgaggcgggggcggagtctgtgtgtcctcgaagcccagcaggactaagttggggaccaatagagtagggcggg

SEQ ID NO: 16389 - DNA, 1181 bp, Artificial sequence
  DNA replication origin
ggtgagaaaggcagggtctcgggtagctgaggcgggggcggagtctgtgtgtcctcgaagcccagcaggactaagttggggaccaatagagtagggcgggggcgggctttactgacagggaccaatcgagccggccggggggcggggcgtcacgccgacgtcaagtcgaggccgccgccgcggggcctggttatcgccggttcagcgcagcccggagtcgcccaggcctgaactcctacccaggtccccggcccccgccccgggcccgcgaggacaccggaggccaccccccgggggtggggagcggagccgcgggccagctctgcgagcgccccgcgctggcctgtccggccccgcccccgccccgggccatggcccagcccttgtcccggcccctcgtcctatcccaatccccgccttggcccccagccccgccctcgccccgcttcccacatcggccccagcccctgcctgggtccccatccaggacccccttccagtctctgcccctggcctggcccccatcccggcctcggccctcgttccaccccctgtcacaaatcccagcccaggccctgtcccagccccattcccagtgtttgcttaaggccctggctcaaccccgtcccttgctgcagtccccatcacagcccttccttccatcccactccctgcccttgttcaagccccagtgtccagcccagcccaacccattatctcagcctttgccctcatctctgtgtttacccaagtctctccctctagtcccccctatctctcatactctgcccctctcccagcctagactcaagtctgggtttcagctgccgccagccctattgctgctgttgctgttctctgtccttggcccaggggctggtgagtgcagaagcagggaagattgaggcaggaatggggttccggcagggaggggtgggctggagagattcaggagaggtgggacctggggaactagatcattggggagcaagtgggagaaatagagagtagagaggtcttacacaacagggattggcagggtcaaaagagtggtaattaattgggtttgaggctcagcaggtggcttacagtttctagcacagagactccaagattttttctggtgtctgtcctgaccccactttgactcttgcttttccagggaaatgttgtgggctttg

SEQ ID NO: 16390 - DNA, 1016 bp, Artificial sequence
  DNA replication origin
cttagggacagactttattttcctgtcctgatttttaagtttccctcaggcatttattatattctattttatgtaagctgcctcaaatccttcttgaatgaggtgagcttatggcatcctgttgcctttattcttgtagacaacaccttacatttactcttgcagatatctggtttcttttaatcccagccaggttgctacatttaatctcttgggcattctgttaccactgttcagtacctaggatcatttcacctgagttggagtgagtgtcttcatgctccacctgtcttggggtccaggtgaagatgatgggaaaccttacaattgcctttgtccacaattagtttctataactggcaacagccctccttctccttaatgagctagataggactgaaaaagagggtgttctctcttgcttggacagaattgaaacacttctgcccaaagaacagattcaaaattgggccttgccgtctcatcagtccttgaaagatttctgctgtggaggatctgttgtttttcagtttttctgttctgagaatggaggtgagagagcagctttggcgtggagagcgccgggaggaatgggctgtccttggaaggtgtgggttaacaggggtgggagtctgagggtggcggtgggtggagatggaggatgtggcggcctcacttccatacctgccctccccagagctccgtgcgccaggaaaacgtgacggtgtttggatgcttgactcacgaggtgcccttgagcctgggggatgcagcagtgacctgttccaaaggtgaggtgaggaatgggggaggagaggaagctgcagtgtgggggtggtggtggcgggcagaggtgaaggtggggagggatggaatggaggaatgataggctagggttccgggaagtgggagcaggtgggtgagggttcttgggttctgacccctcctccctctcactgactccttccttctcccttcagagtccctggccggcttcctcctctctgtcagtgcca

SEQ ID NO: 16391 - DNA, 870 bp, Artificial sequence
  DNA replication origin
attccgcagcgggcgagcccgcgggctcacctgacttgcccatggccggctccgcgcgctcctcgctccccgcggctgcgctgcactgcgctcgcccggcccagcgccgccccagagcccaggaccgggctgatgccgcggcccctcctccggcgccgcccggcccccgccttataaggagcgacagctgagggcggaggcgcccggggccaccccgtgggcctcccggagagctcacccctgggaagcagctccgcgactgccgagggctccccggatgcggccgcggggctcaagcctcccggaccccacaccgagctgtcccttcccggggcgcgtggggaagcccgcgcctgctgggccccgggtggctgctctgcgccgacgcgcggcgaggacagaggggcgcgcggtcgcggcacgaggggcgttccggccggcgccaccaggggacggcctctccctgccgcggcctgacacgacacacgcagccccggggtgtgcccccatctccggtgactctgggctccggagggcggctggtccggggagggggatgctcctctcctaggacacgccctctaatgccagtcggggtggaagcgccgccgcctctgacccgtccactcgcccctcattgcctcccagaccaagccaattcccacccctgcagtctggccccagacctgtctccccaacgccccaccttttccccatactccagtcaaactagatgtcttgtcattccccaaacatgttctgggatttcccacctccctgcctttcctcaggcggtccctcctccgggagtgctggccctggagccaccattccagtgctgcccatccctcggggtcggccggtctttcc

SEQ ID NO: 16392 - DNA, 1229 bp, Artificial sequence
  DNA replication origin
gagatcgcaccactgcactccagcctgggcaacagaaggagaccacgtctcagaaagaaagaaaaaaaaaaagtagcctaagggaatttgtggattttctccacaaatttctacagagaaaggagttgatttcccaagcagatatctcgaaagactcgctctcatctgccatacttttgctccatcaccatctgtcatcctgttaactaaatggcaacccattatatcacctttccatactgtgaagaaccccagggctcatacggccaccctcattgtacagacagggaggaacagagggaaggaggcttgctcagtatcacacagccagtgattggctgggccagggctgaaagccagacctgcctctacagcctaggaaggctggttaggaccaaggccagggaaagccacttgcgcccagcgctggcatctcctgagtccagatcttggaggacagatcctagaagggacctagccttactcatctgaagtggacaatccggatgaagcaggacttctgaatcctgttcaacagctgttctctaagagcctcctgtgaggcagaagcaatgctgagataaacacggcccctggcagccaggggtgaggacccggtgggaaacaggtctatggctgaactcttgtccccggcccactacaggaagggctgcagcgaggaaaacaccaggttgggcgctccctcccggggggaatcacagatgggctccagcccaggagctgagcctagagggatgggattttcaggctgagagttggggtggtgaaggcccggcaaggaaacctaggggaagggacctgtgcaccagcttctggacagctctagtgtagggcggaggtaagggctagggacccactcccaggggcccgaaggcaggactggagtgtgtcctttcactctgaggacaatggtgaggaaggtgttagggagcgacaggaggagagctgcgctgcagaaagttcatcccgacagccacagtagagaggatggggtgccccaggagaaagggagccagaccgagcctagcacagggggagcccggcacggcgcgggcgctcaggagagaaggaacaacaaatggatgagggggatgctcagggctgtcctcgggacagccgagcggggcaaactgcttcgcagcgagagctgttgtcacactttggtgacttttccaactctaagtctggcctcctgaaacaaagcagaa

SEQ ID NO: 16393 - DNA, 1087 bp, Artificial sequence
  DNA replication origin
cccacccagaagggcgggcagcaaaccacaggaaacggtgactggcgctgagaacgtgtcacttcctgcttctggagcacccctctagagggtggaaggccgcaaggctctacttgtgggtggaacaggtggggtaggaggaacgaggtgggcagagagtccctttttctgttttcctggcaccttctggtcagagaaactcccacccacttctaacaccatcctgggccccagacgcctgagtcggttttgaggaaagacaaggagcctggtgagcccagcaaaaggcagggggagcccagggcacagggcggctgcccagagggaccccggggcacagggtggccacccggagctttcgtcaagggaagcctttgagaagggaacatggacccacagaaggttcctccctgcacttgagtcaccggctctcaggatatcccttagaagccaccttctccctctcccctgggaagaggggacaggaattgactcaagtccacacagcaaagggtgccagagctaagactagatccaggttctctgcaccccaagctcctgaactgcaaactagtgcagaaaggggaagggagaaagccagggaggccgcaagggtggggaagggtgtggggtgtggaaggaggagtgccagcagcttgagccttctcctgatggccccagggagccatggcagttggatcaggagagcaccaggggcagggacaattttagaagtattgaggctgctggagagcaggatggattgcagaaaacaagactagacacagggtgaccagttcaggaatgaagctccatgcagctttggaaatccagtctcctatgacacactccatgaatgggaagagctctgagctggtggggcaggattcaccagctggtggccctcagagggagcagagcatgtagcatggggaagctggggatgtaatgcggaaaggagagctttggtctgtggtcaaggtcaagccagagaaatatggaagagattaaacaggaaggaaaggattgatttttttagagggctggttcctccctgaagtcagacacccaacctgcattgctgccc

SEQ ID NO: 16394 - DNA, 655 bp, Artificial sequence
  DNA replication origin
cgaggtagccacagcctcctcagctaccgcgaaaccagaaccacgatgaccacaagtttttatgaagggagcagccacgaacgccggcgctgggcgaactggtgtaatatgagtaagaaaacggcagctagcattgattgagctttatgacaagcccactactctccagtccttttctcatttaaactctaataataggccgggcacggtggttcacgcctataatcccaaccctttgagaggccgaggcgggcggatcacctgaggtcaggggttcgagaccagcttggccaacatggtgaaacctcgtctctactaaaaatacaaaactttgccgggcatgttgacaggcgcctgtaatcccagctactgggggtggggggtgaggggggttggggggttgggtaataaaagacaggggaattgcaacagagaaagagtaattcacacagagccagccgtgcgggagactggagggttttgtttttgttttttggggtttttttttttgagacggagtctcactctgtcgcccaggctggagtgcaatggtgcgatctgggcacgctgcaacctccgcctcccgggttcgagcgattctgctgcctcagtctccccagtagctgggattacaggcattacaggcatgcaccac

SEQ ID NO: 16395 - DNA, 896 bp, Artificial sequence
  DNA replication origin
cgggacggggccgaggcccggtcggttggggcgtgggggcggagaggatggagcctccgaggcgttaggcgactctgtcatctctgggcgtgcagccgtcgtttcctggcgcggcccgtgtgatggtgccgggaggaaggaagcgcagtgacagtgcctaagttggagccggggttccgggggtgaggaggcccgcggacggcggatctggcgagctggccgcgggctgggcgagcagtcacaataggaggcggcggcccagcgaggatccgcgggagctgcccggcagggcggagcctcccctcgcaggtactggccgccgcggccgttggctgcagcgcgagggcgggacgggctgcgggccgttgagagcctgcggggccgcgcccgagtcttgggctaaggtttgcctcggccgcccggcgctctttgttcccgcggtggcgaggaggcgcggtctcagctcgcggagccgccggcccgctgcccggcagatggcctcgctctctcgctccctccctttttgccgagacgcaggtgaaatgatgtcacccaggagaacgcggaacccggtcgaaagggtcctctctggcgtccttctgcttccgtgggtttctggataggctgcgttttgttctcaggggatgcaagttcttcctttcagggttgaagcgtgagagaggttggtttttgaaacgggagtgtttcaggttattgaggtccaaaaagaaataaagtttttgtttacgtctgtatggcttgtaaggtaaagtatttttctttgtgttgcaaaaatgatatatgctattattcagtaaaagttgggtatgctaattctaccgtaagtagaaacacacacatgtaattattgccaccattatatgaattgccatttc

SEQ ID NO: 16396 - DNA, 1764 bp, Artificial sequence
  DNA replication origin
cggaagcgcggccgccgcggtcgctgccgccgccgcctcagcagccgccgccgccgcgcactttcagcctcagtcgtcgtctcccaggccgggccccgccgagcttgggcccccgcgccgcccgcgccccccaccgccgccgccccggccggagcccgccgccacggaccgcctcagccctccgggccacgggcctctccgggcgggagcccagggtggcggcgcctgcggccgagcgccgggagcaggtacggggtcccggagcgggccaggcagggaggggcgtgggtcggtcccgcgggtgggggccggaggcgtgtggtccaggcgcccggccccgccgacggggaggagcgttgtccgggtcagctttgtccggccccggagcccctgcgagccctgcgcctcagccgcgccgagcgctcacaaagcgttttcccacccggtgggtagccccctcccccagggtgtgcagggcaggacctctctaggtctctgctcggcggaggaggaaaccgaggcttagagggggaagtgacttgcccaaggtcacatagccaatgagagccgtagcttggctgggacccagggccaccctgggccggcgcgggccccgagcagagggggctgggaagaggtcgatcccccggcccccaggagccgagggagacagatctcgggggagggggtcaggccctggaccctggcacacccacccagccctttttgggctggtttgggagtaatgatctcttacggggtgggacggaagagcagggggccgacttgggagcttggtggtgccctggggagccgcagcgggaaagacttctgtgcggggtgtgctctcggggagagggctttcttgagtgagtggggcagagcttcggaaacttcttatcgtggggaccgtttggtctctgccaggccaccttccccaccactgcactgactaaaccaattcagctggaattactgggagggaggcctgcccgcttttgtggaggcgcccgtaaggtgtcttttttcagtaaatggcccgaatttcgttcatgccgaaaccagaaatgcatacatggccttggtaaagacgtttacggcacagaaggccatgtgagttttttccaggtggtttggacctaccacacttggagaactccccgagaaagaacagctatcccaggcttgaagggggaaggaagctgggaggattgggaccgagtcacccgcctgcctggcatgtaatacatgggatttccgtttttatttggggtggatgatgaggtgggttgttttgactgcggatgtcccttggaaggggaaaggacttgcagttctagagggaagggagagagcaacgtgttacaggcagggacgagggtcccgtggagctagaaaatagaatggggaaaaaggagagggtattcagtcattgtgggggaagggagatgaaagggttgctgaagggcgggggacggtgtctagtctggagaaaaagattgggatgtttcaaagaaggtgccaaacgtgatgagtttgaaaggagtctgttggaggtggatggtagcttacaaggttgagtgtgaattggtctgcagtcacttattttcttttagtaaggacagctatacttttatagaaacgttctagcttgagcaccccctccccctcattctcgctcttgttctaaggatgcagacccacagggcctggagtattgtcttggaagtaaggcttgacaaaagagggaagggaaagactaat

SEQ ID NO: 16397 - DNA, 1778 bp, Artificial sequence
  DNA replication origin
gcggcggcagcgaccgcggcggccgcgcttccgctcatggcggggccgcgagcagcggctccggctgcgactcgactccggcgcggcaggcgctggctgggccccggccggcagcagcggtggcggcgacggaggcggctcccgaagggggaggaggcggagccgggaagcggcggcggcggcggagggggcggggacgtggagggggcggggacgccgagccgcggccgccaatgggcgcggggctcctcagccgcggctccgggggcgggagggcggcgccgaggggtatcctcagtctccgccgctccctgagaaggggaggcagagcgcgggccacccgccgggagagccctgctgcaggggctgccccgccccaggcccgcccctgaggcgcggccgcgggcctctggggccaggcctcgcgcgacccaggctggggctgcgcttgggctccgctgcgcaggggttcgcgcccgcgagggggccggaactcggcccagatagctactgctcgcagcccgcctgccagactccctcctccgcttccccgcactggagacgcagcctcctctcccctcctctgcctctcttggctgtttcctcaaagtttttccctttcagacacttaggaaagaaactctcccttctgttcttaggctgcgtttcagtgataaattagtccccgcggacccagagagaacagcagaggcagaaacgaaagagatggaaacgagctgcagtccctgagtccccgagaccatcttgaatgctgagcaggaaccagccaggctcagccctggcccctcgcccctttctctgactttctcactttacatgcccttgttgttagaagacttagatagaaacatccagcccagctgggcctagtctcaaaagatggggagggtgtgaggtaaggaaaggcttttgacctgtcccaacggctttcctgtgaggggaagaattctgcgagttggtgaccccctttgggccctcctccacttggatgtgatgttggtcactgaaaccgtttcctcctcatgtttgtctggctctcatttcaaagccgtagaggagcaaaataaacaaccatgtgttaggggtacctctaaagtgcaggcacgtgggtgggccagggtgcagctaaactgctgagtggatcatttcaataaaaccttatcctcagccattctccactgagcagagagagaaagagctctatttgaatctttgacaacagacatttcaaattccatgctgacacttaataggtgcctgatctttcattcgtgctggtctttctgtcatcagcaatgctagacactgggaatacaagaataaaaaagatacagtcgaggccttcaaagagtttacaatctcattggaggacagtgagatatttttagaagttaaaaacttacggatgagcaggagttcaccaaggggggcaggttgggggaaagtggactgggaaaacattaagattgtatttggccaggggacgtaagattttctgaatcccatccttgactttttggtcacagaggaagcaggtagtatattacttgctggagcttgggtcccagtgcccactgtagaacacctgtcaactactgcacggaggcaccttctttcctccgataggtctcagcagccttgagcaacattggatctatttctgtgccaaagtccaaaccccagtttcagctcttaaaaccccaatttgagcaaatgccttgaccaccagccctagaagagaacggacagatgagcag

SEQ ID NO: 16398 - DNA, 870 bp, Artificial sequence
  DNA replication origin
gttaagtagacacggtcattatccccacttacggagaagaaaaccgcgggtcggaaaggtcaaatatcttatccagggaacagggctggtaaagcgcggggctccgatgaaatcctccagtctcccgagagccaggagcaaactgggtttgggccgctgcgccccgcacagcccagaccccagccatcaactgcgactgcggcgggcaggcgggagaactgacctgaggggcggagggcacggctgagcggcgcccgacagaaggacaggggcctgctgtcctgagagacgcggctggtacggcgttcctaagaatcttttcgatcgccgggttgtggccgcttccgcccgccaagggaatcaaatctcccgggccggaaggggcggggacgcggcgggggcgcgcgcggcgccggatcccagggaagcggacgcgcacggcaggcgggggcgcgcacagtgccggggggttctcaccggggcaacggctcgcggtcgctgtggagccgtgaaagggatggccgggaggtccactgggctgcgaggggtgacttgaggccttggtcttgccccggagggcacgtgatgattttccaggtggcgtggatatgccaagtctccacagaacccaactttcttacgttctcttcctaaaattgacgtgccctctggcagtcacagttctcattttcgtcctcccttgcccactggccgttctcccacccagcaaagacaggaatacctccccctctccaaaatgtgttgccacgaggaataagaaccccagtagctgagactacaggcacgcgccaccacgcctggctaaattatttgtgggtagagacgggatctcgctatgttggccaggct

SEQ ID NO: 16399 - DNA, 914 bp, Artificial sequence
  DNA replication origin
ctggccagccgtgccgtccgggagggaggtgggggggtcagccccccgcccggccagccgtgccgaccgggagggaggtgggggggtcagccccccgcccggccagccgccccatccgggagggaggtggggggatcagccccccgcctggccagccgtgccgtctgggagggaggtgggggggtcagccccccgcctggccagccgtgccgtctgggagggaggtgggggggtcagccccccgcccggccagccgccccgtccgggaggtgaggggcgcctctgcccggccgcccctactgggaagtgaggagcccctctgcccggccagccgccccgtccgggagggaggtggggggggggtcagcccccccgcccggccagctgccccgtccgggaggtgaggggcgcctctgcccggccgcccctactgggaagtgaggagcccctctgcccggccaccaccccgtctgggaggtgtgcccaacagctcattgagaacgggccaggatgacaatgggggctttgtggaatagaaaggcgggaaaggtggggaaaagattgagaaatcggatggttgctgtgtctgtgtagaaagtagaagacatgggagacttttcattttgttctgcactaagaaaaattcctctgccttgggatcctgttgatctgtgaccttacccccaaccctgtgctctctgaaacatgtgctgtgtccactcagggttaaatggattaagggcggtgcaagatgtgctttgttaaacagatgcttgaaggcagcatgctcgttaagagtcatcaccaatccctaatctcaagtaatcagggacacaaacactgcggaaggccgcagggtcctctgcctaggaaaaccagagacctttgttcacttgtttatctgctgaccttcc

SEQ ID NO: 16400 - DNA, 1002 bp, Artificial sequence
  DNA replication origin
ggggcagctggccgggcgggggggctgaccccccccccacctccctcccggacggggcggctggccgggcagaggggctcctcacttcccagtaggggcggccgggcagaggcgcccctcacctcccggacggggcggctggccgggcggggggctgacccccccacctccctcccagacggcacggctggccaggcggggggctgacccccccacctccctcccagacggcacggctggccaggcggggggctgatccccccacctccctcccggatggggcggctggccgggcggggggctgacccccccacctccctcccggtcggcacggctggccgggcggggggctgacccccccacctccctcccggacggcacggctggccaggcggggggctgacccccccacctccctcccggatggggcggctggcctggcgggggctgacccccccccacctccctcccggacggggtggctgccgggcggagacgctcctcacttcccagatggggtggctgctgggcggagaggctcctcacttctcagacggggtggttgccaggcagagggtctcctcacttctcagacggggcggccgggcagagacgctcctcacctcccagacggggtctcggccgggcagaggcgctcctcacatcccagatggggcggcggggcagaggcgctccccacatctcagacgatgggcggctgggcagagacgctcctcacttcctagatgtgatggcggctgggaagaggcgctcctcacttcctagatgggatggcggccgggcggagacgctcctcactttccagactgggcagccaggcagaggggctcctcacatcccagacgatgggcagccaggcagagacactcctcacttcccagacggggtggcggccaggcagaggctgcaatctcggcactttgggaggccaaggcaggcggctgctccttgccctcgggccccgcggggcccgtccgctcc

SEQ ID NO: 16401 - DNA, 973 bp, Artificial sequence
  DNA replication origin
attcctaaactcttgacaagagctggagagaacacacatctcaatgcccgccccacagaagcagatggaggccctgtccctcacagtccttcttcttccatggtcaggtaagccaaaggtggggccccgtggggtcactccgagagagggttcgccatccttggtccactgtgtggcagatggttgccccatgcattcaacaaacattcagccatcttatctggaaagggttgtgcttggtgttagggcaagggagacggaaagagggaggagatggtgaggcctggcccctgtcctaatggaactcagcactgtgaaggagaccccaccatacagaatgatcccaatccagggtgaaacaatcacctaccgctgcgtgctgctgtgggctggacgttaccgccagctctcaacatgcaccctctcatttggtcctcagcagaccctggaggaacttgctgctgtcatccccagaaggggaggccagtgaggtcatctggccagggctgcagagctggtgaggtggaagcaggatttgggcctggaatcctcacccaccacagatggataaagcttcagaagagagggaaattacctgggcctggagggagggggcatggaatcagggaagatgagacttgtgggctagaccctggaggacaagaaggatttgggggaaaagagagagagagagaacagtctaagtagaccccatacctgaagcaagggcagggggcaggcaggagaggttcaggaaatggagagaggccactcaagagaaggactagtggaggctgaagctggaaaggtggttcagggtcaaatgaggcaagcccagggaggggaaggggattttcctgagtggggaagagggagccacagaaggtaaggtctctatgcgggagagtcaccaccagggcagtgagcccaaaagagcagcctgcaggttgcatcaaccacgagactgaatcag

SEQ ID NO: 16402 - DNA, 1366 bp, Artificial sequence
  DNA replication origin
tttagcctgtgaaactcactgagagcagagtgaggcttggtcacctttacttctccagcacctagcactgagagtattagatattttaggcacaatctcctgatagtagttatgccttaattttgtatagtactgtgcttttaaaagcacattcctatcaagcacctcatcttacccttaaatctccccttttgtagtagtgggccaaatattatccccatatgatagatgaagaaactgaggttccgtgaggttcggttaagtgcccacactctcccatgccaccccacctagaagcacacgtctaatcagtagcagcatctaaccaggcccctgctctgaatcttcttccagtggtaaattctgccacaccaaaatgacccaggcacagctagaaatctttgagaaacaccaaggcatgggaaagttgcctgacaactgtggtctggcaaatgttattctggtttgttttaaaggaaaataaggaagatggcgcaaactagggaccagtgaccttgacatcaacccagtcaagactgacggttgtgagcagcaagggacagacatcagtaggaggtggcagggcctgggtgagaccttggcatccacatttgccaaagtcaaatgcccatagacgattacaatcaaccatgaaaatctgtgaccaggaagtagaatttaatgtagcggtgtagaaacctttggtttctatgagtcccctggttctttccctccctgcctgccaagtgttcaatgtttgccttagctaacttcttttagccatgtctctctctctctgtgtgtgtgcgtgtgtgtgtgtgtgtgtgtaaaatgctctaaattacccagtgccagccgctgcatccggggctcaggtcctgtttcttaatgataacagatggctttgaagacgcagtggatcaatagggtctgaattcctaaactcttgacaagagctggagagaacacacatctcaatgcccgccccacagaagcagatggaggccctgtccctcacagtccttcttcttccatggtcaggtaagccaaaggtggggccccgtggggtcactccgagagagggttcgccatccttggtccactgtgtggcagatggttgccccatgcattcaacaaacattcagccatcttatctggaaagggttgtgcttggtgttagggcaagggagacggaaagagggaggagatggtgaggcctggcccctgtcctaatggaactcagcactgtgaaggagaccccaccatacagaatgatcccaatccagggtgaaacaatcacctaccgctgcgtgctgctgtgggctggacgttaccgccagctctcaacatgcaccctctcatttgg

SEQ ID NO: 16403 - DNA, 1961 bp, Artificial sequence
  DNA replication origin
taatatgtaaggataggcatctccccagcttttttggggggaggagagcatccagctgggtatcctcccgggtcctaccagcctgtcaggcaggaggggagacctgggagagactgacttaggctgacctggggtggatcgaccccgaggccctccctgagatctgagctggcatctgcttccgcaccgtcgttctgactcctctacccaggactagttacggtcaccatcacagtcagtaggactgtcaatcattgttttaagtactgatgtatatccacctagttggtcctcattttacacatagggaaacggaggcagagagggcttaaatagtctaaggtcacagggtgaacacgcactcagtcactcccttctgtggcactgcctcagggggccacatgtgctgggaaatgctgttgtcctgaagcagctcagcaactgctgggtcaagagaggggcaggtaaggcgctgagggccttggaggaaggaggaccacgacgacagctgtgtggtgtgtacagttgtgtggggtgtttgtgtggggtgtggggggtgtatttgtgtatgatgtgtgtgacgtggcatatgtgtggtgcatgtgtatgtgtggtgcgtgtgcatgtatgatgtggtgtatgtgtggtgagtaatgtgtgtgttgtctttgcgtgtgatgtttgtgtgtggtgtggtgtatgtggtatgtgtattgtgagtggtgtatggtgtgagtggcatgtgtgagtgatgtgtgtgtgtgtggtgtgtagtgtgtttatgtggtgtgtgtgttgtggtgtatgtggtgtgtgtgtgtgtgatgtgtgtggttgtgtatgtggtctgtgtgatgtgcgtgagttgtgtgtgtgtgaatggtgtctgtggtgtgtgtgaatggtgtgtgctgtagtgtaggtggtgtgtgtgagtggggtgtgtctgttttgtgcgtgtgagtggtgcatgtagtgcatgtgtgctgtggtgtgtgtgagttgtgtgtgtgctgtggtgtgtgagtggtgtgtgtggtgagtggttgtggtgtgtgtggtgtgtgtgtggtgtgtgtgtgctgtggtgtgtgtggtatgtgtgtgttgtggtgtgagtggtttgtgtgtggtgtgtttgtgtggtgtatgtggtgtatgtgatgtgtgtgtgctgtgtgtggtgtgtgagtggtgtgtgctgtggtgtgtgagtggcgtgtgtaatgtatgtgtgctgtggtgtgtgtggtgtgtgtgagtggtatgtgtgatgtgtctgtgtgctgtggtgtgtgcgtggtgcgtgaatggtgtgtgagtggtgcgtgtgagtggtgtgtgtgtgtgctgtggtgtgtgctgtggtgtgtgtggtgtgagtggtgtgtgctgtggtgtgtgtgatgtgtgtgagtggtgtgtgtgctgtggtgtgtatgctgtgagtggtgtgtgctgtggtgtgtgtgatgtgtgtgtgctgtggtgtgtgtgtggtgtgagtggtgtgtgtgagtggtgtgtgtgtgtggtgtgtgtgtgctgtggtgtgtgtgatgtgtgtgtgcgcgtgtgagggaaggaatttcggaggaggaggtggcaggtggcaggtggcgcaggtggcaggtggcgccggcacttagccaccaagggtggaggagggccttcaggaggaggaaactagcggcgagcagggggtcagaggaggtaaacgctgtgaacataccgccaagtccccatgctgggggtgcaaaacattgtcatgaaggataagattggggggctagctaggacaagattgtggaggacactgattatcaagctggaattatgcaatttctgtcgagagcacctggtcaccaccgcaggtctttaagcagctatggatgggaggcgaccctggcagcggcgggcgaagatgagttagaaggggacaggaatgagacaagaggaag

SEQ ID NO: 16404 - DNA, 1113 bp, Artificial sequence
  DNA replication origin
ccggcataggtgacaggagcttcccactgaaatcatgcgaatattaagctaatcaaagccttgcttgggaagggatgggactgggaaggcggccctaacgagctgctgcgtgtcactccctccaccctgcgcgtcctgcgctgtcccatttgtctggctgtaatctacatttcaaatgattacatgggaagctgaagtggtagtgacaaggataaacgaagcttgttaaactaatagctgcactaatgcccaaatatgtgaacttcccgacgcaggccgcatcccagcctggcggagctgtcagccccgctcccccgggctccgccgccagccgcggccacatgatgaatggccctgtcgaccaaactcatccggggcccaattaaacaggcagaaatgaactggagccgtcaggcagccggggaggggggacgcggggagggggaggctgagccagacacagaaaggctggtgggggggaggggagagcagagagagagagagagcaagagagagagcccaggcctagggggtgggagagagagggcagcctgggagaagagagggtcagaggcccaggaaagagagaagagacaccagggtgagagcgggaggagagagacagagacacacagagatagacggagacagagagaccgagagactgggaaggcagaaggaagagactcccagatagacacagggagcggggagagacagtcaaagacacacacagagacagagaggcagaagcacacacagagacagagtgaggagagacagctggagagaggcacgcaggacaggtggcccaggagtgggggcagaggcgttgccgctggagggggcggtccaggaagggccagaggcacggtggggggaatggacgagaaaagagggcgcgaagagaaaatgagtcccggcaagtcctggcagctcgcagcggcagggaagtcgttctgtcagaaaatggtcatttaatggtttgccgagcccgcgacagatatgtcatctgaggcggctcggcggcagtcccagggcatttcatttattaattaccagcttccagcagctccctcgtccctgctccatgtcgtcaccagcccggccccc

SEQ ID NO: 16405 - DNA, 862 bp, Artificial sequence
  DNA replication origin
atcctcttgcagcccctcttccacggctcccggtcttcctccgggttctggcaacaacattccatccccttgtccttcaggcctcagggtggtcgcagctccccgctggggctgcaccctcccacggtggcttcctgggccctgccagtttgcaccacggtacgctgtctcatcgttaaactctcctcccttaaactctttgagtgggccgaccattttctcccgagaggccctgactcagaggagcctgatcctcccagggctgtgtgcctgtcagggatggaaacaggagctggggagtcgtgcaaatgctccgggagaaatgtcgatgcacggctgcccccgtggccgaggcttctgcagcatgacgtggcacgcgcttcctctattcctttaacaagccttggctgggaggcttccaggggtccgtttccatgctaggcaggcgctgtcctcatggagtttacagtcaggggttaggtgctactgtgggaggcacagggctttgagcagcagaggaggagaggagctgggtggaggggccaagaggaaggaacaaccaaactgagaatccggaggacgggaaagagatgtctgagaaaaggagctgggggagcgacgcagggacagtggtgtttctggcagaggaaacagcaggtacaaacccctagaggagagccagatcaggagtagggggcgggggcatttgacagctgtcccccctgcccggggaccagggagctgaagtgcattcacagaggagaggtcggggagagaaagctgtgaagggggcactggaggactgcagccctccctgccccaccccaagccccactaaggggttctgtctttaccttcaggg

SEQ ID NO: 16406 - DNA, 1643 bp, Artificial sequence
  DNA replication origin
ggctgagcgcggcgcccccgggaaggaggccgcccgctcgcgccggcctccgccaagcatttgcaatttaattgacattggcggcaggaagccaatcagtctaagtcaattgacgttccgagataaaactaatcggcggccggcgctgcccccgccggcgcggccgcggcggggcccggggcgcagcgtggaggcggcggcgcgccctgcaggtcccagcgctggcgcgtggctcggcccgctgattgccgcgcggcccgcggcggccaggagaggcccgtaatgaatgactttatttgccggggccccgctgagaacaattgagtttgttatgctaacaacggatgccagctttccggggccccggggggcgcgggcgcggcggcagccgggagctgggcagcggagcagatgatgcgcgccggggcgagggcgccggacgggggtgccgggcgggggtcggacggagctggcgtcgggacccggcctggaggggcgaggccggttcggatggcggacgcgcagcgtggaaccgggatgggagttcttgatcattccttgatgttggacaggcaggtcctcctgggtgcgactgccactctttcttccctctgtccccgagcctgagtgggggttctgatcttgctggatgatgccctgacataaacttttttgtctcttgcaccggtggaaaattagaaaaaggcacaaacacaaaggcatcactttttccagtgacctgctgtggcttgggaagttcgggactggattttgaccctgccacgtgtgctttgcgccctggagggaaggccttccttccatctctgtcccctgtgtgtatccccatgctctgtggccaggcgccggcctcagaaagctcttcttgccctacacagaaggctgcctcatggagatggctggctctgaggccccacagccttctcctgcctcccccttcggaccttgagttccaagggcagaagtcgtctcccattcgtcccagacgccctcagtgcccagcatagggcctggcacacacgtggaagtagtagtgagggaatggacttctctcttctttgcgatctcttgctttccctctggttgcagacaccagagtccccttttccagttctgttttcaggcatgctggcattccctcactcactaaacaactgagaaccaacctttcatccaaaaaagccctggccagggagagataatgtaacccgtgtgatgagtgtgtggcaggcacctgctatgtgctcagagttggcaaaggtgtaataagtgcttgctgagggcttttccctttgtcatggcactcagagatccctggtgccacccggtgacaatcaccaccccaccccccatttgaagacggacaaactgatgcccagcgtgtttgagaggcagcatgatgcagtggaatgggtctaagctgggaatctaacactagtttgctgtgtgagctttgtccattttcttcccctctctgagcctcagtatccttatctataaagtgggggagttggagatgatggcctctgaaggccagttgagtgtgagttgtctacagggaagagggacccaggtccctgctcccagcccagctctctttggctttatagtgtgaccactgggaa

SEQ ID NO: 16407 - DNA, 1964 bp, Artificial sequence
  DNA replication origin
ataaagtcattcattacgggcctctcctggccgccgcgggccgcgcggcaatcagcgggccgagccacgcgccagcgctgggacctgcagggcgcgccgccgcctccacgctgcgccccgggccccgccgcggccgcgccggcgggggcagcgccggccgccgattagttttatctcggaacgtcaattgacttagactgattggcttcctgccgccaatgtcaattaaattgcaaatgcttggcggaggccggcgcgagcgggcggcctccttcccgggggcgccgcgctcagccttctctttgcgccacgttcggccgcagctgaattcatttctccttccacgtcgcgcaggaaatccaggtgacctcctggaagtcgtctgccctccgcccccggccctggggactcctccgtcggagcccgagccccgaggactcccggccggtgggcgggagctaggcccacggggcgcccggaccgcggggccgaggaggaagggaccggcctccccgcagggacctcggcctctctgccgagctgtattctcacggtggcaccgcggatccctggacctccttcaaagatcttgggatatgactcggtgcgcccttgagcgactcgcttcctgctcctctcatgcctggctttcttcaccggccacgagtaggctcgaaggagatggtggccggggtcccgtccagcccatgcccagtgcctgggtgtccagagggaggaaggcctggcagcatcaccagcgttcacctggtgctgacgctgtgccgagccacggatgggcacagtctaatcttcccccacagccctccgaagcagatactgttactgtccgacttctacagaggagcgaagtggggtgcaggccagagagtggccagttgggtttcaaacgcctgcggctgcgtgcctatacgctgcattcagggaaaggcgctgtggaggaataagaaagggaaacggaaaacggcccagcctagacctgggcacctcccactgccaagaactgtaccaggtgttttgcctctgttatggaattctcacagtaattgtatgacctaagtatatagtccccattttacagatggggaaaccgacccttggagatgttcagaaatgtgtcccttgccacagagcgggtatgtgagatgaactacaatgatactctcataggcaagagagctttacagcttataaagcactttctcatgcacttcttctcgccgaatttgcacaagaatttgaagaaggcgtcctgctctctctggtgccagtaggaaaatcgaggcccagcatgggttgcccaagatcaccagcaagggagtgccaagccaggactccaagccccgccttgaaggccttgaacgagatggctcaggcacaggctctgctcgttccctctccccattctttggggagctaggaaggagtcatacactggggtctgctggaagatgctcggggccatggggaagagcaggaaaggggaaaggggctcccacgaaggaaggcatttgctggaggaaccataaattaggcccccaaacagttgtttttcgcccattgtctctgcctctctgcctgcctgcctgcctccttaaggttgtctcccgagagggaggtacgcaggttcttaactgataaaatgtgccagcagttaaaagatacaaacctgaccaatcgtccttttcagaaaagagatgttcacggaacaaaagtactattcagaagtgctggatggcgtttgtgtctgagacagaaaggaaacgaagagcgagaagatgaagaaggagggagggggagcggcggggagcgggggaggagaaaggatcaggagctggaagggttgtccagactcagtgggtcctaaccgaggctccggaagggcaggacctgactcagaccacaccgcaaggccacggctgagtcaggatgagaaacccaggctt

SEQ ID NO: 16408 - DNA, 1298 bp, Artificial sequence
  DNA replication origin
ggagaccgaggggtcgaggagggacctcagaagcatcgaggccgcggaaccagcctggcagcccccgggtctctccgccccctgagtgaagtcaagggccgattgttccggcggcctcctcaaagctgctccttcctggggccgggggctgctggctgtcccggaggcgggcccctacgctatgcccccgaagccgcgggcgccttggccgcagctaccccgggctgggcccggagctgctgcttgagccagccagggagggaagccagccggagttgggcacccgctcctagcccgggtgcgctagcaccatttcccgcctctccgcgcagctccgggcggtctccagcagggaggctctgagagagaccccgaagctccagcagtgttttctgagcccagctcgcacagtgcctggcctggtggcgaggctccctatccgccctgggcagccccttggcgccgggaggcggcggcgtgggccggcctgcagtctggagcgccccgatggaaatacactgtaagcacgacccgtttgcatccatgcatagtaagtaggcggcgagctcgcttctctcactctcccgccgggaccgggttgggggtgccggaccgtgggtcaggtactaaggccggaaggatctcggacctctgcagccgcgcagctaactttgcaaagtgcagggatcccaggcaggggacctgaaacaacgcacttggccgcccgggctgaggcacctgggaatcccgcctccggcaacgcgtagcttgggcagcgagctgcagcctttcaaggctccggcggcgacatttcagctctttcggagaaccctggcttggacccgtagagggctccgggccaggccagttggagggcagtaagttgtagggagaggccagtcagagtctcagacagcgccccacacccctactccgatggcgcctttttcagccatggggctgatccagactggcgcttggagggatagtggggccctgacccgtgtctgtatgtgtggaggaagaggttgagagctaagcgaggacaccggggctagggctccaaaggcgtcctggagttgaggagggggctttgaaaaatcaaggaagtagcggtttctgagttcagcttctgcttaggagccggccagttcatacagagacccttaaagaccccattgggtccttctctgcaggacgccttttctcatggcttctcccctttaaaaaaagaggataagaaacgaaaaagaaagaaagaaagaggaagccaattagttaccacgcaggcacccccg

SEQ ID NO: 16409 - DNA, 1328 bp, Artificial sequence
  DNA replication origin
aaagttcccgcggcccccgctgctcgcccatcgctgggaccaggaacggggacaccagcgacggactcttcctcgccggggtgtctacctcgtgccaaccaactcttcgagccccgccgccctccctcgtgggtctgattccactgtctttccgctgcctcttccgggacggccgccgtgcctgccccaggcgtggagtgaggaacagaggagagagcagagggtcccagccaccaaggccgccggggctgccggggctgagatggagccgcagtcggctctgactgcctgcgttgccgccgccgccgccgtcgctagccctccgcctgctcggcgcgcacagtgcgccaccgcgccgccccggagccgctttcaggacccgctgcgtgtggacagcgccgcccggggctcagctccctccgggcgggggcggggcgggggctaacctgccaatcacgctccaccaagccaatcagagtggcgtcagccggccctggcccgaaacaccgccccattggctaagcagcccacaggctccgcctgattagcggacacctgggcaatgggagagaatggggggcggggcccaggcggcggcgccacgttcattgacaaacgcgctggactaaggcctagtggatcgcggctgtggggaggggaaaggggcccacgcagtgcctggagagtcccgctgcgggtcccacgcgggctggacctccccacagcgatgctgggatcctgggacgctctcaaggcttgagagcagtcgattgaagggtgagaatgggggaagtctccaaaaaaaccaaaaaacaaaaaatgtatgttggaggaagacaaggagcgcagtagggatcctgtaccatcaggctcgtgatgggatcggattgtgtgcatcggagtgtgtgcatatctgccagttctgacctcactttcctcttctgtaaaatgggcagagtggggttaactagattttactgaaggctccttccacggaaatatttcctaattttatttcctaattttatcaagtacctactaaaccaccactggctcctcgtcgtccaccctcctccctcactccacctgcagggccctcattgctgcattaacgaaaggcagagacgttgggggaagggggagaatatctcacactcctttaaagttagtaactggggcgcaccagggcgcacctgggtggaggggctaaggctttgggccaggttgcccaagcagagtggctggccctctttcctgcctcagatcaggaactgccagaggctttgggagctggtgttgcgcttctgtccaccggagaaattccgcac

SEQ ID NO: 16410 - DNA, 1539 bp, Artificial sequence
  DNA replication origin
ttgctgcccagggtggagtgcaatggcgcaatctcggctcactgcaacctccgcctgccgggttaaagcgattctcctgccttaacctcaggagtggctaggattacaggcatgcgccatcacgcccggctaattttgtatttttactagagacggggtttcgccatgttggtcaggctggtctccaactcctgacctcaggtgatccgcccgcctcggcctcccaaagtgctgggattacaggcgtgagccactgcgcccagtcgcccagttaatttttaaatttttaaatttttttgtagagacagcgtcttgctatattaccccggctggtttcgaattctcggccttaagctatcctcccacttcgggctcccaaacaggtgagagctaccccattagccaggcaggcattcaaactttatcaggcccagagggacttgagtatggtacttcagttagcaccatcccatgtaggtggtggtgggggtgggggtggggggtaggggtgtgtggcaattgtttaaaggcattttgttcttttcttcccagtacctgcatcaccctttatcttcgtgttcctaaaatttgtgatagaaagaacaatgtgtagccaatggatagcttatgttattttagtgtcaattcttggtatgtagtttagcaaaagcctcttcttttttcctttaaaaattcactcgtggccgggcgcggtggctcacgcctctaatcccagcactttggcaggtcgaggccaggagttcgagaccagcctggccaacatggtgaaaccccgactctactaaaaatacaaaaattagctgggcgtggtggcaggcgcctgtaatcccagctacttcggaggctgaggcaggaggatggcttgaatctgggaggcggaggttgcagtgagccgagaccgcgccattgcactccagcctgggcaacaactgcgaaactccgtctcaggaaaaaaaaaaaaaaaaaaaaaaaaaaaaccataaagaaagaaaaaaattcactcgtagctgctacaagaagtgtaatggctcatgcctgtgatcccagtgctttgggagacagaggtgggaggatcgatacctttaagcctggagcttcacaagacaaagaactcagttgaaactgctgcttatcggatcacatattaagggcaacttgaattgatgatcccaggttgccctcatcaaacttggcccaaataaattctccacttatattaactttgcctcagtttttcctttaggtcgacagttatttctaaagttctacagatgggtttaccttgtattaaaataaggtgtgagaagggcaaatgaagccagaggctcccagcacaatcttgcaaccttcagagacttccaaaggatcagcattaactccaatatttagcaggagtgcagctcttcgagattcacaaagtgttaatctgttgcctagaattccagagagttggaggcgcccagtgtgaactgtgttccgcctaaaagaaaaagcgaccagcctaagatcatgagcgca

SEQ ID NO: 16411 - DNA, 913 bp, Artificial sequence
  DNA replication origin
gcgccttagtaaacacagtccaagtctactcgttttacatgaggaaagggtcacagctcccgaaattttggattctactgctgcagctgctgcttctgacagcagaggcgggaggtggcccaggactactcggtcctcaaagactggactctctctcggcgcgccgggacctccgcgcttcactgactggcttccctagaagactgggggccttgcggggaaataaaaagggcagacacgccaccctcaccgaggccctagacgcccagccgctctagaatcacggcattagcccttggaaagccagggagacgcggaccccctagacccgcagcccggccgcgtggggcggcgcgcaggtgacggaccaggagctgcgccctgccacgagtgaggggcggacgggagacgtcgaggccggcgagggggcacgcgctagttccacagcccggcgggcaagaaggagggtaggcaggggtcccgagccgcgggcggcgggggtccgtcacacacatactcactgccgcagctgcgaacaggaagcaccaaccgggaaccaaaacgcgtagagggacggggaggggcgaggacaaatgaggtaaggaggccgcgtccgcgcagacccgggagggaaggcacttccggggacaacacagctctagtcaccgcctttccgtccccgcccacctgccgcgcctgatgtgcgcatgcgtagtgggtgcgaaccgttctctgccccgcccataattattaggtttgccttccttgctttcccccttccccttcccaacttctcttgaagctacctaggctgcatctattatttgaatgactcgtacgaaggagatgctatttaccgggcaaaagccggggagttcgtgccctctacccccgcgaggaaaactacaacccc

SEQ ID NO: 16412 - DNA, 777 bp, Artificial sequence
  DNA replication origin
gcgcgaccctaccctcggcgggtatcctgcgggtgacgaacaccttcatgagtcgcaccggtctcatccgcagtgcagccgccgacccggacctggcagtacagaagctggcccgggaatgtagctgggccggggcggggccaggctggagtgggcgggagagacgtcgcgcgcggcgtgcgcagggggtgtggcttcgcgagagggagcgccgggttgcggctgagcggtgactgtgcgtgctcggggagtgacagtaacagtgaccctacacagtgtccttgtgtgtgtgtgggggggtgcgcctcgtgccactggggaatcagggccccgggggagagggggcagtatcccgtccaaggcctcatgggagccctgctttttctacacgctcagggtcctgtttccacaggctcaggccttaagagactgaaagcccccactttttctgtctcttgggttggcccagggtagaaacccaggttccaggctgtgaggaagtccaggacacacagagaggtcacgtgtaggtgttcaggccaacagcacagccaggggcccggctcacagccaccgtcaatgaccagaggtatgagtgaggaagccttcgggtgactccaggccaactcccacctgactacagctaaaactgcaagaaagagcctttaggagaatcactggctgagcccagtcaaccccggaaccataagagatgataatgcactgactgctgttgctctaagccgttcaattttggagtaattctttatgcagcaa

SEQ ID NO: 16413 - DNA, 1177 bp, Artificial sequence
  DNA replication origin
agctcacggattcagtcggtagtaaacacaaccagacttcagggaccgtggattggtcagtttttccgggggctaagtaaattcctccaggttccgcgcgccggctggctgcactcctaccccggccccgcccttcccattgctgattggttgcagcccaactgggagaggcggaatggggcggagtaggcgctcttgcattacgtcacttccgcttatcctcgggcgccgccgccgtgttctcagagtgctgcggcgaactggctggaggagctaggggactagaggcggggtgggaggggggcgggtggaagggggaggaagtcccgtaacggagacgctggtcaggacgttcccacctcctctgacactgccgagtccgatcggagaggggtcaccgcctccttcagcgaggaggaggggggcggagcccgactcaggtgaggagaccccgtcagcgagtatcgtgatggcgggcgcgctcacgtggggaaggttgagcaccaggggcgcgccaaggcgtcggggagcgcgcagacgtgtactggtgcccccggactactctggctgtctttcggaggggagcattgttaccgttggagccaaggggccaggcgggttcttctgcgcaggcgtccccggtgtcccgacgccaggctgtctgcggggtggggcgggggctggtactcctgtggatccccggctggcgacgtaggttcccgaatggggtgggaaaggcctcaggaccagcggcctggcgggatgaagagaggatctgctgccctgcgggatgtggtcggacggctcccttgcccccatcctgggtcttgagcgacgaggtttcatttcaccagagcaaggccataggcagactgccatcgggagccagcggccgaccctggaggggtggagccagtgtttcggaatgccccaacttgttatgagaggactgaagtgtttaataggcatttattgaatgcccactactcccaggcttcgtgcgaggagctgtgggggatgcggtggtaagacactgccgtcccatcttctcctgtttggaggacagatttgtatgtaaataataaaaggcagtgaattaaggggtgttgaaggttagttttttcctttcataatggtcatttttttttaagtcagtcagcattctggcatagtgaag

SEQ ID NO: 16414 - DNA, 1115 bp, Artificial sequence
  DNA replication origin
cgcctggccccttggctccaacggtaacaatgctcccctccgaaagacagccagagtagtccgggggcaccagtacacgtctgcgcgctccccgacgccttggcgcgcccctggtgctcaaccttccccacgtgagcgcgcccgccatcacgatactcgctgacggggtctcctcacctgagtcgggctccgcccccctcctcctcgctgaaggaggcggtgacccctctccgatcggactcggcagtgtcagaggaggtgggaacgtcctgaccagcgtctccgttacgggacttcctcccccttccacccgcccccctcccaccccgcctctagtcccctagctcctccagccagttcgccgcagcactctgagaacacggcggcggcgcccgaggataagcggaagtgacgtaatgcaagagcgcctactccgccccattccgcctctcccagttgggctgcaaccaatcagcaatgggaagggcggggccggggtaggagtgcagccagccggcgcgcggaacctggaggaatttacttagcccccggaaaaactgaccaatccacggtccctgaagtctggttgtgtttactaccgactgaatccgtgagctctctgaccaatcaccctttgccttacaacatgtaaaacggttatcaaatgccttttagggcgggatttatcactaaactgctccaggtttggactatagaaatgcggctgttcgctgcaaccaatcaaaaccctctgtggtttaggctagcgggctttccgcctaaatccgccaatcacaacaacgactgcgtgatgtctgagggcgccggagaggcgggccctcagggcaggccgtaccgccattggctggttctgaaggatttttccaccctcgtggtgcccggcgctttagtgacccagggctcttctccggggtgaattcccttcgctgaacacacacacacacacacacgtagagggctggagattgagttcccacttcatagacgttgggaaagataagattccaaaaagctctttaggtttaactaagccaaagtccagggtgaaaaccgcgaataaaaaacgctgtccatcggatggcagttaggtcgga

SEQ ID NO: 16415 - DNA, 1167 bp, Artificial sequence
  DNA replication origin
tcatctctctagagcagaggttctcaatccagggaaatccactctggtgctactggcatctaatgagtagagactagggatgctgcccccacagcaaagaattattggcccaaaaagtcaatagtcctgaggttgagaaaccctgctctagagtatgaactctgagtggggctaggcctgatttggctgttttcctagaagcttgcagcacagggatgcagaggggcaggttccataaatgcttgttgaaagaacaaatgaatgaaagatggagcctgtccccacatcccaggctgctgggcatcagagttcttcaaagctccatttgctactactcccctttttctcccctcactccctcccacatccacccactcccaggggccttctgagccctgcagagtggagacagctggcaactgcttcacttaccaggatccgttgattcctcttcctggggttggtggaatctttgttctcatacaaggtaaagcgcatgttgcctggactctgtagcttcccgttggagaactggactgtaagagtgcagcccaagaatgagatgagagcagaaggccacacaatgtaccacacaatgtacggtgggactagactgtcactgggagggagtgtcagaatggggatggcaaggaagctcgggtcctgacccaaagggaactggaggagatccggggccagctgagaagaggaggtagggaggtgggagaaccctggggaggggctgtgacaggagggaatgtctcgcggaaggaggctgacagcagaggcctggtacatacctaaagtgacagaaggaacccctgcccagtgaagagagggaaatgggggaggcgggagacctggtgggtgagggggtcagcagggtcctggacacagctctggggagcgggtgagtgggatgtcccaatctggctgggaggtagtgacagaaagacggacaggggagccctgacagagcccaggggagtggtggagactagaggggtcccggccccgctggggagaagcccaacggagggcgagaggacagctgaggtaccgagacggaaggggagagggttagaggagcactgctccagctccgcagtctttacccagtacagctctctggctcccgtcgggcgccccacaatactgccacctcgc

SEQ ID NO: 16416 - DNA, 1732 bp, Artificial sequence
  DNA replication origin
tccgtcggcgcgcctgagcctccggatgccgggggaccgcggagccgcgggcggcctgagggtacgcctcatggtcctgccagacccctgatgcccgaagcccgaccagacgctcagcctcggccaggactgagcggcgcctcctgggtcggtcgcctggggaagcgccccgggtcccctcccccggccgcccaagttcgcccgcagcctctgcgcaccggccgcttacctcacagggcgctcgcccaccgcggagtccgggccgcggccgccggtgccctggaagccacccgccgcccccgctggagccgcagcagccggtaggattgcggcgtgcggccagccccgcccgggggcggacagctgcctggggatcgtgcggagccgccgccgtcatgtgacgcgcaaggcggcgaaggatgccgggagcagctggctggccggggctgggcttcccgaccaccgcgcataaaagctgtatctgcaggaggggcaccgggaggcgggaggaaggcagacgaggagggggcgcgtggggcttcgggtactgcaaaggcgagcttgcggaaggacgattcaggctcgtgttgcgtggccccagaaggggcagaaatagaaccagtgggtggaaactgcagggaggcatgctaaggccaatacagtgtaaataagattcctgcgagcaccagttatctaacagtataaggagcagtttcctggggtgctaggcaccctgtagatgagcatgtagggtctgggttcattcactgaacaaactgaccattggctacctgccagacaatgtactaggagtacatattaaattagttgtatgtatggcgcttagcataatgcctgccacaaagtaaatgctgtatgtttgttgctgctggtgccgttactattatgggcacaaaagtgaacaaagcagatatggttcctcttctcctgaagttaattctgtagtggagaaggtagacggtaatcaagtgtcatttaaaccaatatgtgtttaaaattgtagaaaatgcacggaaggagctgtaatttaaaaataggggccaggtgttcatgcctgtaatcccagcgcttttgcaggccgaggctggaggaaagatcacttgagctcaggagttcgaggttaacagtgagccatgattgtgccactgcactccagcctgggtgacagggcgagactcttgtttcaaaaataaaactaaataaattagggaccaaggaagggtagtcaaggaagacctctcagagtaagataaagagttagccaaatggaagaggggcagggtaagccctgtgaaaactcttggaccaggtgggttgggttggaggagaaaagatcgctctttgtggaaatggaaaacgtctagcttgtctgaagctttttaacgggaagaacaatataagtgaggtcagaaaggtaggtaggggccagatcacgcagcacttaataggccatgataaggattttaaaattgtacgtaacaggaagccatcgaaggggtggaggatttgataccttttaaagcagtatgtcagctactatgtgaagacaggagttaagggtggaagcagagattggtagcttaacctattaactgggcccgtggaggtgctatttattgaaatgggaactattgtaaggggaatatatttggaagcggggggagatcaagaactcccatttgaacttgttaaatttgacactgccagttag

SEQ ID NO: 16417 - DNA, 1089 bp, Artificial sequence
  DNA replication origin
agcctcagtttccttctctctgtaaaataagtagggtaatcctcaccgcatataatgattagaagcattcctaatagtgctggctagcaagtaatgaatgctgtttcgtctccaggaactcttattttttagaacactcctaggtggtaggtattcttattatgctccctttgcaaaggaaaaaaaccaagaactgagaggttatggaacttttccaaaattacataggttaaaaagcagcattgggatttgaacctaggcagtttggctcaagactacatttttttttaacactatgttatgtgtctcttattacataaggtaccctaagaacataaggtgtttggtgtgcaggtgtggggtgaggtagagatggcgccacacgggtaataggatcactgtggattcacgtgatgctaaggagttaagactttgctgcacgatcaagaaggaacaatggaggtgtcttcagcaggagagtcactggtcaggtctgtggttgaaaaagatcactggcagtatgtgaaggatgaaaataggaaagactggaggcggttactacagccttggcaagaaatggtgaggctccaacgaaagcaagggcggcaggatgagggggaggagacatgtgtaagagaagttaaggagacagagttgattggacttagtgtccagtagagtatgaaggccaggaagaaggaagagtctagactgtccctttggtttctagtttaggtgcccagaggaaggaagtgccactaccagttgagatagggaagcaatgcaaaaggggtaatttgggggtaagatgtgggtttggttttggctgtgttgagagtggggcacctgagggacatttaggcgatgtccagcaggcagttgtgtctctgggtttggaagacagaaggtttggctgaaaccatgcagctgatagaattgcctggtgagagtgaagggagaaaggccaaggagggacatgagggcaatggtaaaggaggctgaggggcaagagggaccagaatgagaatctgaggagagcggggttaggggctgggtccggcacctagagaggctgacactgacgcaggt

SEQ ID NO: 16418 - DNA, 971 bp, Artificial sequence
  DNA replication origin
agggaccagaatgagaatctgaggagagcggggttaggggctgggtccggcacctagagaggctgacactgacgcaggtagctaggaaatggagggggacagggcaaaattccatggggaacatttgtactcaccggacaagagaatagttcttatcttactttctgacaagtgctatgctttttggtgtttaactgccttggagagagtaatttgatgattaatctttatctacaaaataatttttaaaattaaactttattttgagaaaattgtagattcacatgcaattgttaagaaataattcagagagccagaatacttgatttttaaaaagctttcattatttccactatggcttcagaatcttccacccttatggtgcttctgtctcctggggcagaactttgtatactacaaagacgggtgaggaaagcaaaaggctcactcagcccgtggatctgggtggcagagggctggggcactgacagaaaagggagctttgggtgcaattacgtaggaggtctttcagcgatggagccactcaggagtttctggatggactcctggatttggaaatgaaggtcacaaaggaggagcacctgccttcatccagacgatgttggctccaaagtgctgctagtcttcccccaccgcccttggatgaaggatgcacttgttaacatctgcctgtgcaccatccccagaatgatctaacatcccagtctgatggtgcctcaaccctactcagaactcctcccatgaacctgccagtgcactgggaacacggtgcaaactccttgaccaggaattggcccctgctgactcccctgctttatgtctcaactcctgccactccctctgtgggatctctctcatcttggggtctttgttcctgtggtctcaacctgaaaggctctctccacactcctccctttcactggccaattccactggcctttcaggtttcc

SEQ ID NO: 16419 - DNA, 1101 bp, Artificial sequence
  DNA replication origin
caggccgtctccccaaaactttgcggtgccaggacccctcccttacctgcagaggaggtgccgcccgcgcggacaaggacctagcgggctgacgctctcggagaagggcggccccgcccagcggcgggcacggtcgcggccaaggctcgggaagcagcgctgctcgggctcggctcgggctccgcctcccgcgccgaggctgcagccggaggggttggccgggccgggccgcgcccgcgccgtctggcggcggcaggtgctgaggctgcagctgcgcggccgccagctgccggcgccgcgacccccgccccgggggaggagccccgcgcgccgcctccgctggctccgaggtcccggcccgccgcagtgggcggtcccgctcccacccgggccctgcctccgccgcctgcctcagctcaccgccggggcacgcagcgtccgctgagtacccaggggggagactgaggctgggagaggaaagggactccccaaggtcacccggaccagcggtggttgggccagaactggaacccagaagagttcccaaaacgacccccttctcacgcctccttttccccaggaagagccccagctacggggagccctgggggactcgccccctgacccccacgccccgcaggtgttcggctgaagggagagggagagcgtgggcccacggtaggcactgtggaccacctcccctgtctctgtaaactccttccgcgctgggaaactgtgttctcctagctttcctcggccctctccagccactccctcggtctccttgagggttcctcaaaccagaagctctaaaatgccggagcgccctgggactctgcactcagcccttttctgaccccctgagccgtctcacccactcccctggttctggtcctaccgcctctctgagcatgatacccaaatgcatgtgtctgtgcactattttccgtgctgaactctactgaacacctacgaggtccatatcctgcattagacactggagatacaatacacctttaataaagcagtccctgtcctcatggaatgtacagtctaggactattaaaatacagtccagttcctgtaacaataacccaatcc

SEQ ID NO: 16420 - DNA, 1120 bp, Artificial sequence
  DNA replication origin
cggggctcctcccccggggcgggggtcgcggcgccggcagctggcggccgcgcagctgcagcctcagcacctgccgccgccagacggcgcgggcgcggcccggcccggccaacccctccggctgcagcctcggcgcgggaggcggagcccgagccgagcccgagcagcgctgcttcccgagccttggccgcgaccgtgcccgccgctgggcggggccgcccttctccgagagcgtcagcccgctaggtccttgtccgcgcgggcggcacctcctctgcaggtaagggaggggtcctggcaccgcaaagttttggggagacggcctgtccccacaccccgggcctgcgcctcggcttcctccgcgccgccctccgcctgcaccaccagtcccgggtgacccgcgcccgcctccggtcctcgtgtccccaagcccggctcgggggcgcgtccgtgggctagctcaggacctgccatcgtgaactgtttgcacagtagcgatgtgtgcttaagtttccgagatctgcatggtgtagtgagtggaaacagcggcaacgcgggagggggagagacctgggttcaggtgcggccgcggccagcgccaactttctgagtgacctcagaccaaccctctctgtccgtcctcgatggccacacctgaaccagaaggggttcgccagggacgatcagctgcagtgccaatgcctgtgttgtcattttttgagtagaggggcatccctgagtgtctcagctccagaactcattgcgtgtggagaggaatgagccacagaagtcagtctccagggtcgcgtcgctaacttgcagcagctttgactgagctttagtgggggcgttgagtcagcctcgggaagcaggggatgcccctagggttaggagtcaggactctggcttctggtggctcctctgccatacacccactgtctgtgtgaccttgggcaagtgccccctgcttttgccacctataaaatagggtggaagtcgtgttcactagttgttcgctgtctctttcagctgtaaactctggagaagcggaacctccggatctctgcatttagtcagtttgggtggaggcaatatttcaccaagaatccatctagcactt

SEQ ID NO: 16421 - DNA, 742 bp, Artificial sequence
  DNA replication origin
agaggtattggaaatagatcttgaagaacatgctggagttaaccaggcacggaaaaggaagacagatcattcaaggccgagggggcctggaggaatgacccgaggaaaaggccatgacctgaaaggagctctccctatgggtggctggaacgtggcagggaaggctgccatgggggactgggtgcctgaggaggggctggaccatattgcaagaggggaaaagggagatggtgaaaagagataggagccccaccacgagaagggcagctagactacagaggagacctcagcgccattctgtgagggagacactagactgaaggggaggtgtcaagaccatcctgtcgtgggtactagactgcagaggagggttcagggccatcctgggagagggggaagagcctgcagaggaggccttagggccatcctttgaggcaagggaggactagactgtgcatgaggcgccatggccatcctgtgagaagggcaacaaggccatactgtgagagtctgtaactgttgtgggggaggccaggctcttccccgtaagcagggcagccatcagagggtttaagcagggtgtgatgaggtcagagagaagtttgagaaagatcactctggaggcttacaggaataaagagattgcaacctggctcagtgctccccagcctcctaccattaatccttcctgagaacctgccgctggatgagttttcactgtcctacaaagcccatagcaccc

SEQ ID NO: 16422 - DNA, 1062 bp, Artificial sequence
  DNA replication origin
acataaggcgcggttcactcggcctccaaagagaacagataaggtgctgtgaggagtctaaggagagagaagtcattttggagtgaggggcagagtagtaatcagggaaagcttcctgcagaaatcagcattaattaaaactagcctgtcaagaagtatttattgagtatctactgtgtgtcaggtcctggatctgatagatagaatttggatatgtcaagaatgtagaaaaaaatcattcatttattgtcaacaaatatatactatgcagtggcattgggaatacaaccacgaacacggcagacatagtctcctcaaggaacttataattgtaggaaagacacagaaaaaaaaatccattactgactgagaggtgatacaaagaaaccaagaaaagatgccaagacagggatagaatgaaccaatcttgccaaagtgatcgtcaggaaaggcctttctgaagagggaatgctgaagctggggcctaaagtataagaagccaggaatggaaaagtgagagaaaagggaatagtatttgcaaaggctcacagtgtgtttgaagcatttcaggatcagcgcaactggaacatagcaagctggaggaagagtgataggagatgaagctgggaggggcatgcaggagctgggttgtataatacaagacctcgggcagggggttagattttacatcaggagagacacataatcatatggcaaacagatggagtggggattggggaaagcaatgagaccagctagaaggtcttttcctcccactggaaagtggctatgagcttattcagaggcaaaggacacaagagcggtggcagggagcggaggaaagtgttcagtatggctcagtgtgaggcgcagggactggtaggtgtggtgtgagctaaaacctgaaggcgtcattgaagatcatttaagccatggtgcaagccccactggggcatttcagcagacagtcggaagccagggccatctctgagcagagcagagatgttaaagctgggctttagaaaaagccttatgggagggccaggcgcggtggctcacgcc

SEQ ID NO: 16423 - DNA, 1163 bp, Artificial sequence
  DNA replication origin
tgggaggccgaggcgggcggatcacgaggtcaggagatcgaaaccatcctggctaacacggtgaaaccccgtctaaaaaaaaaatacaaaaattacccgggcgtggtggctgcctgtagtcccagctactcgggaggctgaggcaggagaatggcgtgaacccgggcagcagagcttgcagtgagccgagatcgtgccactgcactccagcctgggcgacagagcaagactccgtctcaaaaaaaaaaaaagaagaaaaagccttatggggtggagagttgggggggtgggaatgaatttttagtgttagtattttaaaatcgcagccgggcacggtggctcacacctgtaatcccagcaatttcagaggccgaggcaagcgaatcgcttgagcccaggagttcaagaccagcctgggcaacatggtgaagccctgtcttttttttttttttttttaagaaaaagaaaaaatttgtaaaaaaaaaaaacaaaatcgtcctggaagctgataatggatggattggagcatggattggggatggctggtaggtgctagaggagctgtggaaagaaaagtccacaggggggaattgttgggccaaggaggaatccaaccaagctgtagtttcttgaacgggagatatttcgggctcattcaggttggagtctctctgaatgggtgagacctcttaggactgcaggagtgaaggaagagtggctgataaagaggccaaggcttgggcaagccgcttcgtgtctctgatggaggaagaagagtgcccaggggctagaatcatcctggtcaaagccctgatattctgttgtaggctggggcagtggcgagggaggttgtgtactcaggaaagggttgtgtcagctcgagggctctgctggctgtggcaaagcctggggaagggcaaggctgtgggatgatgggccgtccaaatttggtttcacctgttaacgaaggggaaaaaaggtgctagactcagttaatctccagaattggaagggcctgggaggggaaagatctagttaggttaatagaggtttttttacagatgcaaatccctcccgcaccctcaacacaaaacagctttgcaggggccatttcaaattatggcaatgaaacatattttggggtaaaaaatttttgtttttct

SEQ ID NO: 16424 - DNA, 909 bp, Artificial sequence
  DNA replication origin
ccgggaacggaggtagggagcgagtagttacctgtgtgagcgactgagcatctgggcacctgatctgggtggcagagtcggtctgtagttgtcagtgaccggtggccgcgtgcctggggatgagtggcctgaccagtcagtcctgtgaggctgagtatgtactggtgtctccactttacactgggatcagcgagggattaagaattagtgcattacgtgcaggccacacacaataggtgacatgccactctttttttttttttttttttccgagatggagtctcgcgctgtcgcccaggctggagtgcagtggcgcgatctcggctcactgcaacctccgtctcccgggttcaagcaattctctgccccagcctcccgagcagctgggattacaggcgcccaccaccacgcccggctaattttttgtattttttagtagagatagggtttcaccatcttggcctggctggtcttgaacctcgtgatccacccgcctcggcctcccgaagtgctgggattacaggcatgagccaccgcgcctggccagcatgcccaactcttaaaggcacaacaagttcagggtgaccacaggcagcttcttccaaaacctatttgtcacaaggcaaaggagagactgagaggaaacaggtttggatgtgctacccaaggaatggctgagatagccagtctgtgtatctgggcttaaatgaaagatggcaaataggtgatagttacttttctgggtcaacttgactgggctaacagatgcccagatagcctggaaaaccattatttctgtgtgtgcctgtgagggtgtttccaggacagattagcatttgaatcaatagaagatctgccctcaccattgtggacaggcatcatcctattcattaaagactgaaaaggaac

SEQ ID NO: 16425 - DNA, 897 bp, Artificial sequence
  DNA replication origin
ttggccctgcagtctggcccgggccgccggcacggaggggagggaggtgacggctctcccggggcggaggcagttgaggactccggagctccaggcagccctagctctccggagcgcggggccggggacagcgatggggcgccggggcggcgagggcttcgggcgggtggagggggatgggtcgcatcagccccgggatgtagtggcgagggcggcccggtggctgctgcctgcccctcgtggggcgtcggctcctcagccccggctccggccgatccgtcccctccagggctatggggcccaaagggaaacatgatcaacgcccccgccccccgctccgggccactgccccgccggccgacacctcagtgcccctgttcagctgccacttccggcgtgcagcggcctaaccccaccggctggaaacccgcgccgcccctcggccaccgtccgccggggaccgggaaagctgagacaccgccgggtttggggcgccgcagtcccgggaacggaggtagggagcgagtagttacctgtgtgagcgactgagcatctgggcacctgatctgggtggcagagtcggtctgtagttgtcagtgaccggtggccgcgtgcctggggatgagtggcctgaccagtcagtcctgtgaggctgagtatgtactggtgtctccactttacactgggatcagcgagggattaagaattagtgcattacgtgcaggccacacacaataggtgacatgccactctttttttttttttttttttccgagatggagtctcgcgctgtcgcccaggctggagtgcagtggcgcgatctcggctcactgcaacctccgtctcccgggttcaagcaattctctgccccagcctcccgagcagctgggattacag

SEQ ID NO: 16426 - DNA, 870 bp, Artificial sequence
  DNA replication origin
cagcgcgtcgcgctgcgccccaacctcggggtcggtcacagtctgcgcctgcgcgggccccggctcgctagccgtcctgcgggacgccggcgctgatgggtgagtgtgggacgagcgtggggaagcaccgggctttcttcgcatgaggttggagggaggggaaacgcgctgaagggcccgctggggcaggctgccgccctgggggcccatccctgtcttctgcgcgctccggctgccctggcccggtccctgcgggccccacccaggcggcgcgggcggaatcagttctgagcctcctcggctccgggctcccccgcctgccgcgggtgtttgtccggctgctgggcgacctttcccgcgaaggcgctgtcccttcattcgggcgcgccctgggctggggaggcacctccctggtgcacaggaaccgcaggggcggggaggagccgggagctgcctgcgcccgggggacagcggggatggcaccgcgcaagggcctctgcgtcccgggagactgggatttcggcctcacctcgggacccctgactgtgaagtgtcagaaacggaagaggacttagtgatcttgtccaaccccctccccgcctttcacaggttggggaaatggacgcctggagaacggtaagttcagctacatagcctggcagtgcttgttctgcgacagcatattgcatcgcgttgtaggaagctcacttgtacaaggattttcggggacgatggtgttggtggtgttagtctccatccattatttggtgttcagtttagctagatggagtatgtcagcacctcaacttcctgcaaaacctttgttttgcatctcacagctctacctagctgatcttaattcccaccttc

SEQ ID NO: 16427 - DNA, 1430 bp, Artificial sequence
  DNA replication origin
ctggggcaacttgcagctggagctcgaggggcgaggggagaggaggagaaatgggcctctcgacaggagtctggcggcccatgccctgccctccatgaatccctaggccccagtcttattttaagccagaacccaggatttgggttctgaaactgcattctagagctgcgccccaggcgtgtttacagccgcctaattcttgtggtgattgtttctggaggataagcctgggggtttttcctcctcagaaattagtacactacctcaggtcagccggtctttccccatagccgctatctgctgtgtgcaggaaggcgactccttccaaggctcagaactcaccgtccatggcagctgaacattaggttcagagaagcagagggggcacaactcgatggggaaaggctggggtgtggcctcgactgcgccactggctggccatgtgtgtgaccttgggcaagtcttggctgcctcaagggtaagacagagatgatggtccgctgagggctgtcgtgaggaggaaaccagaccacggtgggaagctgccacatgaatgccggccgttatccctaaagggggggcttgggaagggaggcctccccagacatgtgtcggcacccatgcagtgcagtggagggacagagagggcacagggtcagccagagctccgctgctctgctcaagtgaagagctacccctgtccccagccactgcatgccataccaccaacagcaagcgagtgggcgggcaggcagacaggcaggtagtgctggagtggctgggagggcttcctggaggaggtggcggtctttcctgggctcaggcaggggtatcagcaatagggcacactacggtgggggggctgcaagtgaggaaagtggcagtcaagagaccagtttacaacgttgcagagtttgtggggaggtatagagcaaaatgaagaaaaggagtttggggatagattttgagggctctagatgctaaagtctttggggctttgccataaatggaggaagcatgaaagtattggagcagaggtgtgatgtgcactctggaagatgagtggcaagggagggtgcggggtggggttaggtgggaataaagccacactggggacacgtggcagggctggggtggaagatactgccccagggacgcttagagttaacttccacaggactgtgcacctggtgggactcaagcagagaaggtctgaggacatttgtccttaccgaagtcctcttctccaggctaacaagccacagcttagtttcttctgggcagggatggagggtcaaaagtggccaccaccaagtccttttctctctttctacacaaactgaaacaagcctttccccttcatgcctgatacccagaaagcccttttccctaatcaagagcctgcattttacctttgcccagtaaaggtt

SEQ ID NO: 16428 - DNA, 791 bp, Artificial sequence
  DNA replication origin
accccgctctccaaggacggcattccaggcagagggaagaagaacagtgcagaagcctgaggcagtagcatgcctcggtggttcagggagcaatgcagagatctatatgactgagcggagcaggtgaggaggaggtatgaaggcagctgagggctgagaggtgtggggcagaggatgtcggaactcacaagcattgaagaggccttcctcgctaaccctgcatgagatgggggcagcagagggttctgagcagagaagccagccacgcatctgacttgggtttttaaagggtggctctggagattctagagcagagagggcaccagcaggcagaccactgaaagcagggctttgacagcaggtgatgagaagaggggcagattccagcgtgtggtgaaattgggcctcaggatttcctggcagagatgagggagaagagccaggatggctgcagggttttggccccgagcagccactgatgcagtagattcagcagctgaggcctaggggtccagagtgggacactctctgccctctggggtcaggaggtgcctgagatcccagggaagaaatggatggccctctgtctgggtctgtgggaggaaatggggaaaaccgtcaggaagaggaggcctcatgggagatgggtccagaggaaggtgtggatggggcatccaagacagaggggatcccatctacagtggctgagattggaaggggaactctgctgtgtgcagtcaggggtggccagagcttggggcatgccatggtatatttgccagggatagagg

SEQ ID NO: 16429 - DNA, 1266 bp, Artificial sequence
  DNA replication origin
ttgattctgaaacactttgctgagaccattaaggagcatcgacagaggaccttgcttccacaatggaattttccttctcttcctgtttggtattttccagtaatatttctattaatgtttcactttcagcggcactaacttcctgagagtttgagctttcctaactcccgaggcaggaagaactgaattttcctctaaatcattcagttcctttccagtttctccaaggggagctgtctctggatttcccattatgctgtaaaggaaggatcttggaggtgggtccaggggatggagagagaattagagccccactgagtgactcaggcccagtgttttccaagcaacacgtaatactcctggtcagaaaggggcttcccacggccgaggaggggagagtgactcgacaggtgggtgggtgggtgggggaagcgaattccctggcccactgccgggccttgacttacaggctggacccagagttcccagggggctgtgagagcccatgccaagtcctttcttctcattcattcattcattcattcagtagacactgttgagagcctgctgtgtgttggggattgttctgtttaggtgctgggaatagagccatgaacaaagcagataagagtctatgctcccctgagcttgctctctcatgacaggagtcaagtaaatacagttacgtcaggggtggggactgtggaggaaagtaaagaggaataaagaggcgatggcaaacgtgaatttggggtgggatgctttttatgtgggtgctcagagagggccttgctaagagttgtgatggcatgaaccaccccgctctccaaggacggcattccaggcagagggaagaagaacagtgcagaagcctgaggcagtagcatgcctcggtggttcagggagcaatgcagagatctatatgactgagcggagcaggtgaggaggaggtatgaaggcagctgagggctgagaggtgtggggcagaggatgtcggaactcacaagcattgaagaggccttcctcgctaaccctgcatgagatgggggcagcagagggttctgagcagagaagccagccacgcatctgacttgggtttttaaagggtggctctggagattctagagcagagagggcaccagcaggcagaccactgaaagcagggctttgacagcaggtgatgagaagaggggcagattccagcgtgtggtgaaattgggcctcaggatttcctggcagagatgagggagaagagccaggatggct

SEQ ID NO: 16430 - DNA, 1479 bp, Artificial sequence
  DNA replication origin
cctaggtagccacctggctcccagctagtcgtcatctaggtgtggcatcctaggtgctttagaaacccagagtccaagcttccgaggggtgccccaaactgcctccagggagaggtgggatcttccacggactgcccatgcagatcaaacaggggaggggatattctggggacctcggggaggggaggccaggcagaaaaactagagggacattcccttcctcctctctcctggcaaacaaaaaagatccctttccaagcaccagatggcaggtaagagcctgtctccctcctgtctggacatccagtcctaaaaggaactcagactcttaatcagtctcccccagcccaggcctgggcaaaggtttacctttgggggaagaaggtggggagaacaacagccacgcaccagggcgctgagaaggaaggagctctcccaccgggcctcagatttaatcaaaacactgccttccaccagaagacagaacaagtattattttatgggggaagggagggcttcacaggagtgtgaagggggaggaggggacctagtctggctgtaattaactcgtctgcttcaaagggaggaatctaggtggcctaatgcgttaggaagggggctgtcacaaagtccccccgtgttcctgggaccttatggggtaggggtgaggtcaggaaggaagcaggtgaggataggaggggtggggtctccttccagccgggcctgataggctgaccccctcccgcgcgcagcgggaggaactgacgggttcgatgaggagcgctcttgcaggcagcgcatttcaaccggaaaagcacgcgtggaggttcccggagcagctccggtaccaggcagcccggatttggaaacctagagctgggggtggggcagggcagggccgggcagggcagccgcgagagatttacatatacacgctggagacagccggtccggatctgccaccaagaaagctgtgtaatattgggcgagtcccttccttgctctggacctcagtttcccacctacagcgtgagcggagggtggaggctgggataaggggtgtcaggagtcaaagctcttcgaagtcctagacagctctgactctgactttactccttggcagccagaaggactgactgggtccgtcttcctggggcaaggctgggccgggcgctctcgctcagaggggacgttctggaagcagcggcgaaagaggtggggtcaggaggccgccggtcccaggaaaagggcgcgggaggaggcagaagcgggaagcagcacgccagccccgacccagggtcctaggccgaagctgaagtagagactcaacaccagagcggcgggtgcctcggtttccccgtgcgcaccgtggctctggaacctcgggaagaggccaaggggcaccttaccttgtccttcttgccggccccgctctcctccgcggctgaggcggcgcacttgttgagcagtttcttgcct

SEQ ID NO: 16431 - DNA, 1221 bp, Artificial sequence
  DNA replication origin
ccgcagcggaggagaatgcggccgggagagacagcgagcgacggaggaaggcagccggcgcccgccggagcccgcgcgcccgtgcccgtcccggcggcgcctgtcgctgccactgccgccgcctcccgagccgccgcgtgtgtgacactcaggccgccagagcccgccccgcgccgccgccccgcccccccggagcccgctcgcgcgccccgccccccgcccgctcccgcagacccagcaccgcccatccccgcgagcctggccccgggccgcggcccaagccccgcccccctcgcgcccggggccggggtgggcgcacctctccgctcctgcacacgccacctcccgcggctgccctggcgccagcaccagggtcttgccccagggcgctggggtcccgccgcgcagccggctccacctagcttgcagctcgccgccgcctcgggcgagaggttgcctggcggagcctgctacgcgcagaggccaaacctttccgcagtcccccgggaccccgcgcgttgttcactccagggatccccctgtcggggttgaggagggagagtggattaacacggaacctgtctagtttacagcgtggcccgtgtggaggaaatgcagtgcctagtgcccttagggacagagtggctgtccctcttccttaaagggacagactccggttcagccccgtgcgccaggtcttcggaggaatctttatgctaatgagtgtattagcagtccagatgacggatgtggtcgggataggcggtgggagccgggcccagcaccaatccgagagcaaggctaggggaggtcggaatgtttgcttaccttttcacctctgaggaagtcgaggctttagccctgttcgctgccagccggcggggagcaagttgtgggaacatttaatgccttatgttgtaggagctggcaaggatccatttaatacaggacctcggccgggtgcggtgtctcacgcctgtaatcccagcactttgggaggccgaggcgggtggatcacgaggtcaggagtttaataccagcctggccaagatggtgaaaccccgtctctactaaaaatacaaaaattagccgggtgtggtggcgggtacctgtaatcccagcagctactcggaaggctgaggcagagaattgcttgaacctgggaggcagaggttgcagtgagccgagatcacaccacttcactccagcctgggcgacaga

SEQ ID NO: 16432 - DNA, 1398 bp, Artificial sequence
  DNA replication origin
gagtatccactggatttggcagttagcagtgcatcagagagatgtggagagagctgctttagaggaagcagaagccaaagtgcagggatggggaagtgagtgactggaagggatgagaaaggggagtggagacagccccctgagagctattgggcgcaacaagagagagggtagtttgatggagagggcgttattgacaggaaggtgccagtaggatgggagtgactgcagatacaggagagacgaaggagaacagagtaagggggcgggggctggactgcctgcatccaggtgcaaggggaggtgaggggggggtcggcagggagggagggggctcgttcatacctgctgccggggtgctctgtatcctcaagtggagcaaactcatctgtggagggagagaagagtggcgaatggagcgggggggggggggggctccgggagggcgggggaagtgtgaagtagctcttaagtggagtgggggagggttagaaaagacggtgacaggcggtgctaagcagagaccagaatctggaagggtgccaggttgtgggtgtgggggagggggctgttccgccgcagctgcagctacagccaggaggtgagggtgaggaagctggagggaggcatgacttttggagtgggcgggctcaccgggaggatgaccaactagatggtccagattgcctggaaatggaaagtccctcatcccaggaatgcctgaggccaaacaaaccagtagagttggtcacctactgcagagtgatgaaaccctggcccccacgggggtgagcgtgctggctttgtgatcggcgctaggatgcaggctgggggtggtgtgggggtgtaagggtagcctggacactcaggaaataggactggggggttgggagggaggttaaggacctaagggtgtcactcacctgtcttcctggttcctgaatagtgcctggccttccaccaggcactaaatatttttccagagactgtgaaaccagacattcttactacttttaatttttgccatagtcacatagcttctgcgttaacgtaatattctttaaaatcagctctttaacaagtatgtctaaaaggaaacaccctttaccctatatggacaaaaagaaaccacacagagccccaccaccaagcatatattggcggctaactggatctgctgcttgacaagggaactgcggtgcccagggctgctgtctgtctgttaccctgggagatgagtcggcttgagagaggcatggacgatgtgctcgcacccaacggagccctttctccttgagctgctgagaagaatggggcttgaaagagggacagctttgctgtgtgactgaattccatgttcctttactacctgcgatcatcttgcttccctcacttcgg

SEQ ID NO: 16433 - DNA, 1010 bp, Artificial sequence
  DNA replication origin
taatatttttaaatagaacttgaatagaatattatttttagaagaagggtttgtaatgctgaaaaatattatggtctttcattcttctaaatgacatataatttgaagaattttgatgaaattggactactgtatgtgaaaatttacaatggagaggaggtcgcggcgccggaggccccagaaggctcgaaggcgccgcgggctggggtcggtggcttagggagcccgtccggccatggtggccgcgggtagtggttggcgcggctgcgctgcggcccggggcagtgcggagccgggacagtcgcggcgctgacgcccgcgggccccagctgcagatatgaagcggagccgctgccgcgaccgaccgcagccgccgccgcccgaccgccgggaggatggagttcagcgggcagcggagctgtctcagtctttgccgccgcgccggcgagcgccgcccgggaggcagcggctggaggagcggacgggccccgcggggcccgagggcaaggagcagccgcctgccttggcctcccaaagtgccgagattgcagcctctgcccggccgccaccccgtctgggaagtgaggagtgtctctgcctggccgcccatcgtctgggatgtgaggagcccctctgcctggctgcccagtctggaaagtgaggagcgtctccgcccggccgccatcccatctaggaagtgaggagcgcctcttcccagccgccatcacatctaggaagtgaggagcgtctctgcccggccgcccatggtctgagatgtggggagcgcctctgccccgccgccccatctgggatgtgaggagcgcctctgcccggccgagaccccgtctgggaggtgaggagcgtctctgcctggccgccccgtctgagaagtgaggagaccctctgcctggcaaccaccccgtctgagaagtgaggagcccctccgcccggcagctgccccgtctgagaagtgaggagcctctccgcccggcagccaccccatctgggaa

SEQ ID NO: 16434 - DNA, 923 bp, Artificial sequence
  DNA replication origin
gggggggtcagccccccgcccggccagccgccctgtccgggagggaggtgggggggtcagccctccgcccggccagccgccccgtctgggaggtgaggggcgcctctgcccggccgcccctactgggaagtgaggagcccctctgcccggccagccgccccttccgggagggcggtgggggggtcggccccccacccggccagcagccccgtccgggagggaggtgggggggtcggccccccgcccggccagccgccccgtccgggagggaggtgggggggtcggccccccgcccggccagccgccccgtccaggagggaggtgggggtgtcggccccccgcccggccagccgccccgtccgggagggaggtgggggggggtcggcccccccgcccggccagccgccccgtccaggaggtgaggggcgcctctgcccggccgcccctactgggaagtgaggagcccccctgcccggccactaccccgtctgggaggtgtgcccaacagctcattgagaacgggccaggatgacaatggcggctttgtggaatagaaaggcgggaaaggtggggaaaagattgagaaatcggatggttgccgtgtctgtgtagaaagaagtagacatgggagacttttcattttgttctgcactaagaaaaattcctctgccttgggatcctgttgatctgtgaccttacccccaaccctgtgctctctgaaacatgtgctgtgtccactcagggttaaatggattaagggcggtgcaagatgtgctttgttaaacagatgcttgaaggcagcatgctcgttaagagtcatcaccaatccctaatctcaagtaatcagggacacaaacactgcggaaggccgcagggtcctctgcctaggaaaaccagagacctttgttcacttgtttatctgc

SEQ ID NO: 16435 - DNA, 1239 bp, Artificial sequence
  DNA replication origin
accccccccacctccctcccggacagggcggctggccgggcagaggggctcctcacttcccagtaggggcggccaggcagaggcgcccctcacctcccggacggggcggctggccgggcggggggctgcccccccacctccctcccggacggggcggctggccgggcagaggggctcctcacttcccagtaggggcggctgggcagaggcgcccctcacctcccggacggggcggctggccgggtggggggctgacccccccaccaccctcctggaagggcggctggccgggcggggggctgacgcccccacctccctcccggacggggcggctggccgggcggggggctgccccccccacctccttcccggactgggcggctggccgggctgggcgctgacccccccacctccctcccggacggggcggctggctgggcggggggctgacgcccccacctccctcccggacggggtggctgccgggcggagacgctcctcacttcccagacggggcggctgctgggcggaggggctcctcacttctcagacggggcggttgccgggcagagggtctcctcacttctcagacggggcagccgggcagagatgctcctcacctcccagacggggtcgcggccgggcagaggtgctcctcacatcccagatggggcagcggggcagaggcgctccccacatctcagacgatgggcggccgggcagagacgctcctcacttcctagatgtgatggcggccgggaagaggcgctcctcacctcctagatgggatggcggccgggcggagacgctcctcacctcccagactgggcagccaggcagagggactccccacatcccagacgatgggcggccaggcagagacgctcctcacttcccagacggggtggtggccgggcagaggctgtaatctccgcactttgggaggcaaaggcaggcggctgggaggtggaggttgtagcaagccgagatcacgccactgcactccagcctgggcaccaccgagcactgagtgaacgagactccgcctgcaatcccggcacctctggaggccgaggccggcggatcacttgcggttaggggctggagaccggcctggccaacacagcgaaaccccgtctccaccaaaaccagtcaggcgtggcggcgcgagcctgcaatcgcaggcactcggcaggctgagtcaggagaatcaggcagggaggttgcagtgagccgaga

SEQ ID NO: 16436 - DNA, 894 bp, Artificial sequence
  DNA replication origin
tggggggggcagccccccgcccggccagccgccccgtccgggagggaggtgggggcgtcagccccccgcccggccagccgcccttccaggagggtggtgggggggtcagccccccacccggccagccgccccgtccgggaggtgaggggcgcctctgcccagccgcccctactgggaagtgaggagcccctctgcccggccagccgccccgtccgggagggaggtgggggggcagccccccgcccggccagccgccccgtccgggaggtgaggggcgcctctgcctggccgcccctactgggaagtgaggagcccctctgcccggccagccgccctgtccgggagggaggtggggggggtcagccccccgcccggccagccgccccgtccaggaggtgaggggcgcctctgcccggccgcccctactgggaagtgaggagcccctctgcccggccaccaccccgtctgggaggtgtgcccaacagctcattgagaacgggccaggatgacaatggcggctttgtggaatagaaaggcgggaaaggtggggaaaagattgagaaatcggatggttgccgtgtctgtgtagaaagaagtagacatgggagacttttcattttgttctgtactaagaaaacttctgccttgggatcctgttgatctgtgaccttacccccaaccctgtgctctctgaaacatgtgctgtgtccactcagggttaaatggattaagggcggtgcaagacgtgctttgttaaacagatgcttgaaggcagcatgctcgttaagagtcatcaccattccctaatctcaagtacccagggacacaaacactgcggaaggccgcagggtcctctgcctaggaaaaccagagacctttgttcacttgtttatg

SEQ ID NO: 16437 - DNA, 1947 bp, Artificial sequence
  DNA replication origin
ctccctcccttttcctaggtctccccttaaaagaggggaactggctcctcccaaggctcctttgccccttctctgagctatccacaccccccttgttgcctggtgaggagcagcaggggattctaaacaaagacatcagggaactggaacaagaatggatcataaccatcccagcgcctgccaagtcccccacccctcacacacacacccctgggctcccgcaaacactccctggctcaggcccagcgcggggccttctggtgagaacccctccctgggagtgcagccttctgggccgctttcttctcagtaggactgagctgtcaggcgcctcccagagatttcaagacggctcccctcccccaagggatgcctttgtctttgtctccatagaagaggcagcagcagggggtggggtttggaagaggggaaatgagacagggtccttgcacccagaaagcctaattggggtgaagggtggccagacacggatgctttttgtgtgggtcataggagctcagaggactgagaggtccctgccttctggaaggtagtcagagaggacttcatggaggagatggcctttgggctgtcctggaaggacagtagattagatgggcagagatgaggaggaagagtgtttccaagtgaagggaccacatgacccaaggctcggaggtgggagagaaccaggggtactggagaataggaggtgggcccgtgtgagtggccctgaagagtatgggtggagatgctggggaaatggggaataaggccagagaagtcccaggccagccggatggcagagggcttgattgtcagctgaagagcatgagcctggtttctcagcccatggagagcaccgaaagttttgataaggataacggccctggtccttggggtggagaatagaatgagtagggtgaggtggaggcagggagaacaatgtggaagggctatggcctggacagggcagtggctgttagggtggggaaagatgcacatgtgaaaatcaccttcaacagaaggaaaagcttacagaacatggactggggggaggggtgagagagaacaggtagtcagggatgatcctcaggccacacaagcaggcccttggaggtgcaagtgggtcaggtggagagtgtggttggggcgggggtggtagttttctgagcacaaaagtctgtgtccctttgggcatctgtggctgggaaggagggctttgctccgggtaagatgcaggtgggaggctgcaagcatgttgtatgtggcagggctaggtgctgtacccaggcagacccaggacctgtcacaggagaggtgtctcagggaagagagcagaaggcagtagcgggcaggagcaggggatgagcagccacttgccgccacatagaatgagtaaaaggagagttcgggggttttttgcactcagaggtgattctgaactggaccttcctttccattatcccattatcaatgagcacctcccacgtgccagctagtggcagaaccatggtggcttccagccccagcccctatttttaaagaagtttccatctgatgggggagagaatgggttccaatattaggctcaccatgctcagtgccatgagagagggacagagggacaggtcagggaaggaaccctcaaggaggtttgctcacagggacatggggaaaggacaattccaggagaaacagcctgagcaaaggcctggagacagaagtccatcagtgtagactgagcccaggcagatttgggaaggggagaaggggagacaggagatggagagacagaggaagcagctctagaaaggcagattcaggtggatgcaggtgacctgggttctggctatggatgggagctgtagtgcaggcagcaaggagggagagtggggtaggcagaagggaaggatgatggaagcttttcataaaggcagaggcagg

SEQ ID NO: 16438 - DNA, 1018 bp, Artificial sequence
  DNA replication origin
ccctctcgtcttgctagtgttacattgtcacctccttcttctgtgtcaaatttccccctcccttttctccccaccccccttccttctctctctcccatctcttcttctactttgtgaggacacagcaagaaagggagaaggcagtcatctgaaaacgaggaagacagccctcaccagaaactgacactgttggacctgaatgtctccattcaggttccacataaccatctgtgatctaactgaaggccattgggccaaaaacacgttggttgatatcagtttggtctaagtaaaatttttttttaaagaatgttgtagccagcctccaaatggttcccagtgaaccctgcctcctggtattcccagctgcctgcattgtggggttccctcccacactgtatcagggatggtctgtgtgaccaacagcatatggtagatgtagcggtggtgtgcccggaattggtgggttctttgctcactgacttcaagaatgaagccgtggaccctcacggtgagtgttagtttttaaaagtggcgtgtccggagtttgttccttctgacattcggatgtgttcggagtttcttccttttggtgggttcgtggtctcgctggatcaagagtgaagctgcagaccttcgcagtgagtgttacagcttttaaggcagcgcctctggagttgttcattcctcctgctgggttcgtggtctcactggcttcaggagtgaagctacagacttttgcggtgagtgttacagctcataaaggcagtgtggacccagagtgagtaacagcaagacgtattgcaaaaagcaaaagaacaaggaacccacaccatggaagaagacccgagccagttgccactgtgggcccgggcagcctggttttattctcttatctggccccacccacatcctgctgattggtccattttacagagagccgattggtccattttacagaaagctgcttggtccgttttgacagggtgctgattggtgcctttacaatctctgagct

SEQ ID NO: 16439 - DNA, 1921 bp, Artificial sequence
  DNA replication origin
ggcgggcgcggagcggagcgcgaagcagaggcgccgccgctgtcccggagcaagccatgccgcgcttgtctctgctcttgccgctgctgcttctgctgctgctgccgctgctgccgccgctgtccccgagccttgggatccgcgacgtgggcggccggcgccccaagtgtggtccgtgccggccagagggctgcccggcgcctgcgccctgcccggcgcccgggatctcggcgctcgacgagtgcggctgctgcgcccgctgcctgggagccgagggcgcgagctgcgggggccgcgccggcgggcgctgtggccccggcctggtatgcgcgagccaggccgctggggcagcgcccgagggcaccgggctctgcgtgtgcgcgcagcgcggcaccgtctgcggctccgacggtcgctcgtaccccagcgtctgcgcgctgcgcctgcgcgctcggcacacgccccgcgcgcaccccggtcacctgcacaaggcgcgcgacggcccttgcgagttcggtgagtcagggtcggggattgggtgggtagagaaggagggattccaaccctctggggtgtggagcgaaggatccccctgcccagtggtggacggcgctgcctggcactcagtttccccttagggagcagtatttcatatctctcctcgtgctcagagagactggggcgagaatccttggagacgccactcactgtgctagtcgaatttttggtgagcctgctaccccttttggtacttaagtacctgctgatgcagtcacttatttgtaggcatggtatgtttgcccagcaggagactgggagttaaggagggggatccgagttcccaggtatccagcgctaggtggattgtttgaatggggaggaagggaagttgaggttgggggaggaagggaagtagaggataggggaggaagggaagttgaggatgcaggaggaggatgagttccagactggggaatcagtagtcaccaggccacagcaccagagcaccagggcccccggtgtgggaaggggctgagctgggatgctgagggagctccatccaggagaagtaagacctttggagacgtaaggtctgaaaagattgtggtgctattaggggcagactcaggtttcgtgcttctaaaacatatataatttggagagtcctgccttaagtaaaggaatagaactgctagggacttagaaacttattatgaaatgctagggacttagaaacttaagcttcattaacatcacagtaaaataatctctgagtgctatagttgcccaccctctttatgtaccttttgaaaaccaaacaaaaagaaaccaaaacgttagcactgctttaccggcttcctaagcatgagtgtattccacccactaggttttgaagtgccgctgtgtactttgcctggagtgggcagtgctgagtttagggtgagtgagaaggtggccagtgagtcccaaggagcctgggtttcggcctggagttcaggcttctgggaaataattctggcctgagcccagagaccaagtccagactttagtgcctaagtcagtgtaatgacttagcttcaagaaagaagcctggggtggggtgagacctttccaagccttaagaagtatctagtagtctttcctctcaagtagttcaggtagatgtacccaagtccaggagacgcaatgggttgttggagatggggcaggaagcctccagtcctgggaaatgtaaaaccagtgtgtggccagttgagcacaggaaagtcaccattggctgttcctagctgaagctccccatggaggacagagctggctgggggtgcatctgtgctgccgctggctccctgagtggccctggacgggtcccttcccctctctggccatatcagccccagtggagtcattgttgaggtccctt

SEQ ID NO: 16440 - DNA, 1822 bp, Artificial sequence
  DNA replication origin
ctgggttcacgccattctcctgcctcagcctcccaagtagctggtactacatgtaggtgcccgccaccacacccggctaattttttgtatttttagtagagagagggtttcaccatgttagccagaatggtctagatcttgtgacctcgtgatccgcctcggcctcccaaagtgctgagattacaggtgtgagccaccacacccggccttgaatttttttttaaattcaagattttgtcctaatttctgaacatggcgtgtcttttaaattgcataataatgttttcctgtgacaatgtttttattcctcttccagacaatccttcctgacgacatgtctgaatgaaagtaaggtatgatttcaaaaatgtaaagttatgattgctgaaaaggacacactgattttgcaataatgagagaaaaaacaaaatcctagtatctggaaggtccaggaagggggaaggcattcgtgatctctgttgttcaaggccgttcctgaaagctgtctcctcctgtggaagaaaccccccctgtgctgcctttcctagctgcggagaatgttttgaattcagactgacggccgaggcaagatcacggggcagggcagactattgtcaaagaaaaccagtgtcagacagaagttaaagcagcaaaggcaacttttattcagaagctatctcagtaggggaaaagagacatcagtacagaactgggctctattccaaatagaacaagtacaagtaggaatttatggccaagggacaggggtcactggacacaaaattactaagaggaagcatcagggataaggggggttctggttaaactaacttaatagattctctctctcattttggctggagcaaaactttactgttcaggggctctgctgggccacgtgtcctcaggataccaggctgctctgccctcctctaaggcattcaataatattagcgattaaatagcaaagctcatcccccaactgtaatgtacaatagaggtcccattgtgacattcctgaggagtctggtcccatgaggtcaggaacgcaagaggcagagagggccccctgatgcagagggggttaaggccacaaacgaaaaggagaagggatagggtttgggggcagctgggctggtccaggaacctggctggaggcatgcaagctcccttccccttccccccgcaccctccaactctgtgtgtctggaggaaccggggggagaccctaagcatggggatgcctgagggtttgcagtctggctgtgtgtccatcctacccagtgctcaggtcctccagtgttctggaccagtcagggggctcccaggtgcatctagtagcccctcccatgccagggcagggctttccttcatcggaggaggagctgggaagggcttgacagcgggccgggcagcccgttggtcttaaggccagagtccccaggttggccacgtttgccacataagagaataagggatgaaaaggaggaactggaggatctgtaggccgagtcaggagctagagggtctggggctggagcccggttaggggctggtccagtgggggtcccgccagcaacagccttatgggtcccggcattggccagaaactccttgtccaggcgtcagagcagctgctctggtgtgtgcggaagacgctggcgcgtgtggtgctaaactctaaactggggttggactgggaaagccagggtgcttcagggcggtgggcatggagagcccaggggtgctcctgcccgagccccgctgcccctgccctgtggctcccacgagtgctgcccatctccatccttgagcccagtct

SEQ ID NO: 16441 - DNA, 1828 bp, Artificial sequence
  DNA replication origin
atctgtaggccgagtcaggagctagagggtctggggctggagcccggttaggggctggtccagtgggggtcccgccagcaacagccttatgggtcccggcattggccagaaactccttgtccaggcgtcagagcagctgctctggtgtgtgcggaagacgctggcgcgtgtggtgctaaactctaaactggggttggactgggaaagccagggtgcttcagggcggtgggcatggagagcccaggggtgctcctgcccgagccccgctgcccctgccctgtggctcccacgagtgctgcccatctccatccttgagcccagtctgctcctgcgcccaccgggcagggctgagggccgcagctgggctcccctctctcctggagctccccggggccgactcggatccagcccgtcccgggactggctgcgcggggcagggggccgtctcggagaggccaggtggtggtggtcagcccccgtctgggtctcttcctcccggcctagtgcctcatcctcgctgcgggcaccaagggggcggctctgggctgagaaagctgaggagtcactgtcctcagagtaggagcggggatgcggcgggcagctgatcccagggcctgggagcctcggcccctgctttatgctttgtaagcgaataggggtcacctagggtccggagcgccggcgctctctcgcggggaccaggctaccagggcaggggctaggggtgggcgacaccctctgcggggacagggtgcggaccctcgacgggggcgggcggtgggtggtggaggagcggcggcgcgggtcctgactgtccaggtagcgctccagcgggtcgccacacccaggcgcgccgtcaggcggctcccgggcaccctcacagagatcaacaggccggagtctcccacgcggaacttcccctccgaggcctttatcttggggagctgaccgggtgcagaggcccagtgtctccctcgccagctcgcggagcatttcgggctcgcccagatcagtgcgccactggccgatgaaggtggccgcactgtcgcgggccacgaagaagcgcagcgccagccaccctgtgggcctggaaggtcacacttcgggatatgcagacagcctcatgggttcccatagacgggccagccgagccactgtgggcgggggtacaaaccaggatcgctgtgaggatccggcaggcgctcagagcagactaagccgcagagcactgcaccggcctgtcactcaggccgaatggctggtttacctgctggctctgagaaacctcagtgcctcagtttcctcatctgagaaatgggtacagtaaattacctgcttggtaggattcaatgggataatttttaataagcaacttagcgtctgtaaatactggctacgcagcctttttttttttttttggagaggggattaggggctggctgaggcctccctcacaggcagagaggtgcccactgtgaagggctgggacctggagagatgaagacaacgactgggacccccagtggataggaagggaacccaggtcccgacctcagggtgggagacctccatggttcagggctgtgcccagcccacctcctgcgggaaggtaccggtttttcccttgatcccccttccctaagggcagtgccatcaaaaaacgacatagcagcagtaatggtatcagtaacagcaatgaagtggttagggctgagtgcgtggtgatattatctccattttacaggtgtggaaactgaggtgcggaaagggtaagagctcgctggaggtctcagagctgtgggtggagccagggcgtccaggctgcgcc

SEQ ID NO: 16442 - DNA, 2165 bp, Artificial sequence
  DNA replication origin
tgaatggatactggcctcctgggttttggacttgcattgggtgtgtggttctatttgtggttttttcctgggaaatttcttccctttgaattgagaaagcttacccaatgcctgtaccatcattgtaccctgaaagaaaagaacatccttttaaattcagggactcataggtgcaagggactgtagacttgtctcagatgagatgttgaactttttacatttgagttaatgctggaatgagttaagacttttggaaacttttgacaaggcatgaatgtattttgctctgtgagaaggacatgagattctggggtaccagggtcagaataatatggtttggctgtgtttctttaccaaaactcctgtggaatgtactccttaatgttggaggtggggcctggtgggaggtgatgtaatcatggcaggaggggtttggggttggaaggaaaaggggtgggtagggtgggaagtaggttggcagtagggtggtgggagggtggtgggtagtaggaagggggagtagtctgcttcagaggcagaggctcatgggaaacctctgctagggcagtgcacctgcagctttgcaggcttcagcccccatgtctgctctcatgggctaggctggtgtggagtgcctgtagcttttccatactgaggatgtgaactgttggtgggcttatgaatctggggtctggaggatggtgacctcctgtgtcggggctccaagcccatgtttcccttctgcactgccatggtagaagtttcccaagaggctctgcctctgcaggaggcttctgcctgcaaacagtgggtggtggtgtgggtggtgtttccttcaccagtggttaatcttcttgatgctgatctcctgatagtgagttctcatgagatctggttgtataacaggatgtggcacctcctttctctctctgtcttgctcctactcctgccatatgaaatatctcattgtcgcttgtccttctggtatggttatgagggccctgatcagtgtgggcctcatcagtggacctagtcagctgggacttggtcagtgaggcctatttattggggggtgtggtcagcaggggtctgcttagagagggtctcattagggggatctagtagtggggtcttggtgagtggggacctagtggcagccacttgtttggtgtctggtcagtgtaaaactaggctgcaggactttgtcaatggagacctggtcagctggggcttagtggtggccttgtcagcatgggccgggtcactggtgaccagctcaaggggtgctattcattggaggcctggtcacatgggacccagtcagcagggcctgctggccatgtcctcatcagtgaggcccttgtcagtggggccctggtcagcgcagcctggtcagtggaacctaatcagtggcggcctgttcagagagagcgcattcagtggtggctcttgtagcagtggtctgtggggtgacctggtcagcagggatctgagcagtgggtgcctattcagtggggcctactcactagggtcacagtcaggggcatcttgtcacctatggcctggttaataggggcctggtcagtggcagcctgttccctggaggcctggtcagtggggcctcatctatggtgccaggcaatggggtcatgatcagtggaacctggtcagtgaggccctggtcagtaagaacctggtcagtgaggccctggtcagtaaggtcctggtcagtggggtcctggacactgttggcctagcagcaagggcctggttagtggggcctggtcatggggttctaatcagtgagagtgtggtcagggaggacctgatgtgtgggatatggccagcagggacctggacctggtcagcaggggctgctgagcactgctgggagatgtcaggtgcaatgcacgttattgagggccctgtggacagttgggatggcccagtagtgcccaaagacccagtcaaaactggacaaagcaggtgtttcgatggacctgggagatcttgctcagagattccaacaggacaaagggaaaggaagggccacagtggccagatagatggtcacagtctatgggctgcacaggatggaggaagccagggaacaggcagggtgggcagcagggtgcagggagaggcaggtgcatgctgggaggtca

SEQ ID NO: 16443 - DNA, 1066 bp, Artificial sequence
  DNA replication origin
gagcttcagcagacgaggagccgagcaggggcagggcctggcgggctctcaggccaggtgcactcgcgatccagaggccgcctaggccgtgctccaccacctgggcgcccaagctgcaggcgccctctacctgctggcgacagctgcctggcaactcccaagatggctggcgctcccagcctggcagaaccggggctacatgtcgccctggctgcggccaagccaggcggtctacccggcggcggctgcaccgggacaggaaccgaccccccagtcccatccccggtggctgcggagggcccctgtcagcggccccgatctctcttcggaggaggagcgggtcgggagtcagggccaggcaggccctcaggcgggaagggatgcactcctgggattccgggacgtcccgcgggagcccaggagaacccgcaagccagcgacgcgtgcgcccgtgctgcaggtgccccctgccggccacgagggcttgggagcggcttccggagtcccggctggcgctgagttgtaggcgcgcgcctaactggcatcgcggggactcactcggtctgagagttcggagcgctgaggttcaggcgcgcgcctaacggcttagctgggctcactcggtctgagaggtcggagtctgcgagtgtcgctgctgaaggctgtggtggaccgggctggatcgcggattctgagctacattgcgggtttgggggtggatcttggatttgggggtggatcgcgggttgcgggggggatcgcgggttgcgggggagatcgcggatttggggcggagtgggggtggaaaggccacgaggagccgccgcggctcaggagcgggtggtgggcgtctgagaagtcgccaccatgaggaagctcttcagcttcgggagacgcctgggccaggcgctcctgagctccatggaccaagagtatgcgggtccgggttacgacattcgggactgggaactgcggaagatccacagggctgccatcaagggcgacgccgcggaggtggagcgctgcctgacgcgcaggttccgggacttggacgcccgcgacagaa

SEQ ID NO: 16444 - DNA, 1719 bp, Artificial sequence
  DNA replication origin
cttgtcgtttctatcctttttcttctgtatgttgatataaacagaaatcactgaagacttcagtcttctaggctaattctctaactcagtgccctgcaaatgtggcttattaatagtctttgtccatcttaatgaaaacataatttgcagcaataatattgagattcacctggtgtattaatattttaacagaaatttaatgaactgaattacaagctatcaggtaaatcaagtaggccacaggttcagtaaaaaggaaagcaccttctgaacgttgatcctaatacctgtgagcattcacgctctgaaattatagctgagtgcacactgtgtgccagacgcggtcctacgtgcagggatgtacaatgcccaaggaactgccggtgccaggatgtgggcttgtcaaaaggggcctgcagtgtatgtgaggagacctaccacgggggacacactggaaaaaccaccaagatggtccagcgcaatcagtgaggcaaatgcatggggaggtggggagcgagagctgcagaaggaacggaggctccatagggagcctagagtggagagaagtccctggagggaggggctatggaggtcctggtggaagaaagcctggggagcccggtgggtgtggattagggtcaggaagggatcagtgagtgaagagaagcgtttcaaggagtgagtgtgatgtgtgtgtgtgtgggtgtgggtggtttgtgtttatgtggcgtatgtgagtatatatggagtgtagtgggcttggtgtgtgggtgtgatctgagtgtatgcatggggtgtccatggtgtgtgtgtggagtgtgtggtgtgtgtgtggtatgtgggtgtatgggggatgtttgtggtgtgtgtgtgtggaaggtgtgtgtggtgtgtttgtggtatgtgagtgtgagtgtatcagggatggcggtggtgtgtgtggtgtctgtgtatgtggtgtgtgtgtaggagtggtgtgtgagagtttgtgtgatgtgtgtggtgtgtgtgatgagtgtgtgtatgttcacggtgtgtgtgtggaatgtgtgtgtgttttatgtgtggtacgtgagtgtgagtgtatagggagtgtttttggtgtgtgttttatgcatgtggtgtgtatggtgtgtgtgtatgtggcatgtgtgtgagtggaggtagtgagtgttgtatttgtgagagtgtgcgtgatgtgcatgtggtgtgtgtgggggtggtatgtgtggtatgtgtggtatgagtatgtgtgtattggggtgtctatggtgtgtgtgtgtggaatgcatcagtgtgtggtattgtttaatactgtgagtgtgagtgtatgcgggagtgtttgtgtgtgtgtgtgatgcatgtggtgtgtgtatgtggtgtgtgtggatgtaggaagtgagtgcagtgtgtatgagtttgatgtgtgtggtgtgcatgtggtatgagtgtgcgtgtattggggtgttcagagtatgtgtgtggaatgtgtgtttggtgtgtgtgtggtatgtatgttagtgtaggtggtgggtgtgatgtgtgtgtggtgtgtgtggtatttgtggtatgaatatgtgtgtgctggggtgttcatgtgtgtgatgtgtgtagaatgtgtgagtttttggtgtgtggtgtgtgtgtatggggggtgtttatggtgtgtgtgtgtgtgtgtgtgtgtgtgtgtgtgtgtgtgatgtgttgtcagggaaa

SEQ ID NO: 16445 - DNA, 1060 bp, Artificial sequence
  DNA replication origin
gccgtcccgcgcctgggtcccgcgctgggggaagcgcctactgcttatctctgtctacctcaggtctgacttttgatgccaaaatctgagcccctggggtgcctctcccccgcctcccgtgcaccagggtctgcagcagccactggggcctggttgcctgctgcatctggcggccctggagggggccatgggcccctttgcacccgcccgcctcggtgtctggggaggggctgcgcagggccgtgggctgggtcgtctctctggggctgcgtgtgttgcgctcccgtgtgtacgtgtgtgtgtcgggaatcctgcgtgtcgtgcctgtgtgggcgatccggccccctggctgtgggtgggactggattctaactcaggggacttgggcctgctgttaacttcgatgattgtagggacaggtggggcgggaggtgggtgggcacggggctgggtcctgggcggcctggcgactccaggagaaggaaatcactgaaggcagtggtcgtggaaatgggagggggtcgcagggggtctgtggggcccggtcctggatactgggtaggaagccgtggtttccagagggtactccctgcctcaggtggccccattcaaccccagccgtacccatctcccgccactgcctgtcggtgggggtttaaagttggggtggctttctggggtgcagctcagcatcccctcttatgcagactgggatggggtcgggcacctccctcagccacgaggaccctggacgggttcgagttctcttggggccgtggggctagctgtgtactgggcggggaccccacactcgaggccgagcgggggctctccctgctctgagatgttgggggacaggcagcttctggaatcttcagtgggacccttaagtggccgtcaggacaggcgggagggtgggcatggggcactggggagagccggggtcgttaagggtcacgcatctgtacagtctgaatttcctttatctttttttttttttttacccactttgtccctcttttcccctaattgtgcttttgcatttttttttcttggcaaa

SEQ ID NO: 16446 - DNA, 1376 bp, Artificial sequence
  DNA replication origin
aggcgggggagaggcaccccaggggctcagattttggcatcaaaagtcagacctgaggtagacagagataagcagtaggcgcttcccccagcgcgggacccaggcgcgggacggcggctctggggagaggagccctggaggccggagggcagacacggacagggtccaggcggttctgcgagtggggcccgattgcgtcttggggcgaaaagacacccccttcccggggtgattgtgctgctacggtgccggccccgggaaggggcagggagaacctagctgcccaccaccccctcctggaaagggggtgtgtgtcaatggccctgagatcagaagaaagtggggtcccgtccccaaagacaaaggaaagtgaaagtcccctcccacagcccgacgggagagtgaacctagactcaggggctcagaagccccccagccccctcccccaggggtctccaaggctatgcggaggttgggcggttgggagtcgggggagttggggagtccccttcctcaccgacccccaatgccggtggcctaacagggctcccagggcccaattagagacccaggcttaccatgggaatagctgagttaatccccaccccaccacaagagaaatgaaagcccggagctcccgtgtaggacgcgacagcccagccggtcaccaggcgggtccaacaaggtccccagaccctgccgagcatttcagactcctgcctttctgctccagcagctccagccaaaataacccccagctcggctgctgtaaacccactttctcctaggctggcagaggggcactgacccacagggttggggggcagcctcccttctcggcctcgatttagtcaccgcacaactcagggagctcgcagccccggcacaaaagcggtcgggagaagaggaagagatagaaggaggagaatgttggggtgtggggtgtgttcagtaagccagggccccgaaatcctcaccctgagctaggtctggcttcacccccactccccagtattgttagtccccaaaagcagcccttttggacaagagaagaatcccaatgagaaggccacattcatccctgagacaggagcctgggggctgtgacaagaaccacccccgccccccaggccccaggccctttttccagcagttgctactttttagataagatttccaggccgggccgggcgcagtggctcatgactaatcccagcactttgggaggctgaggagggcggatcacctgaggtcaggagttcgggaccagcctggccaacatgacgaaaccccatctctactaaaaatacaaaaattagctaggcgtggtggcgggtgcctgtaattccagctactccgaaggctgaggcaggaga

SEQ ID NO: 16447 - DNA, 1113 bp, Artificial sequence
  DNA replication origin
ggcctcgccagtgcgcatgcgcgaggcccgagccgccgctttggtcacagtgaccgccaccattgcccggggatgggtccttgagacttggcgaagtaggagccctgtgtgatcgtgcgtcagagtcggggctgagaccagccctggccagggcagttaccaggacggtctccggaggccgggattcgcggagggtccaccagcaggaagaaaccccaggaggaagaaaactcagacagatcgccggggaggcagcgcgggatcccagcctcaggcgtgcgcggacggtgtgcgggtgagtctccccaaaagtggcgcccttgtgatgtcgaggacaggtctccctgtgtgcgcgtgggctgctgtctcaccggtggctcgtagtcgcggagaccagaacccggcagcttcaggggctgcctgggggtgggtgttacctgctgtatgtctgtgtccgttatgggtgtgtgtgtgtgtgtgtgtgtctgcgtgtgtgtgcgcgcgcgcgcgcgcgtgcgtgtctgtgtgcccactaccgtctctctcttaagtctctctctctctctctccctctctcccttctcgctctttccgtcgccctctctttctgtctctgtccgtctgtgtgtgcgtgcgccttgggacacatgttccctgtgcgccggaggctgggtttcttgcacgtcggcctttcttctggtcagcctctccccgcgtctctgcctgggtgttgtggccggttggcaatcgttttcccggcggttccggcttgggggtctgtgaaggcctgggcaacgtgggcatctgcgtcggagctgcaggggttttcatttcctccccatccggagcagcctctttgctaggctagatccagacgaccgctccccaaccaaggacaacggcctcccaggcgctcattgtccacccgcaggagggtgcccgcagaccttccagaagatgcttctcacgcctcttgccctgccctctgccctcatggagaaatctagccacagctcgacgcagggacggagaaggaagccggcaaggggatggggcaagcctctctctcactcaaaggcagtatagaagtccaccacagaggcatatccagta

SEQ ID NO: 16448 - DNA, 816 bp, Artificial sequence
  DNA replication origin
gcctttgcaggcgacagcacgccttgtggccctggggatctttctgtgccccggcgagagcctttccgcctcactgcattgtaaccccattcccgatcaccgggtgggatccatcatcggatcccaagaggagtccgcgcagcccagccgacaccccgaagctcctccttcaccgagaacccaagcagaagaccgatcaaggaggtcctgacgacaggactcctatgggtccgaccctgggtctcccgcaggcccctctggtagtcctcttcccacccgccgccccgggctgcgccgcagccgccgccgcaacctccagcaccgccgccccagtccccgcagccgccgcgtcgccgccattttttaaaaggtccgcagcctgactctgccgagtaagggggggtggggcgggtgagtcggcctcgccagtgcgcatgcgcgaggcccgagccgccgctttggtcacagtgaccgccaccattgcccggggatgggtccttgagacttggcgaagtaggagccctgtgtgatcgtgcgtcagagtcggggctgagaccagccctggccagggcagttaccaggacggtctccggaggccgggattcgcggagggtccaccagcaggaagaaaccccaggaggaagaaaactcagacagatcgccggggaggcagcgcgggatcccagcctcaggcgtgcgcggacggtgtgcgggtgagtctccccaaaagtggcgcccttgtgatgtcgaggacaggtctccctgtgtgcgcgtgggctgctgtctcaccggtggctcgtagtcgcggagaccaga

SEQ ID NO: 16449 - DNA, 1746 bp, Artificial sequence
  DNA replication origin
agcccacgcgcacacagggagacctgtcctcgacatcacaagggcgccacttttggggagactcacccgcacaccgtccgcgcacgcctgaggctgggatcccgcgctgcctccccggcgatctgtctgagttttcttcctcctggggtttcttcctgctggtggaccctccgcgaatcccggcctccggagaccgtcctggtaactgccctggccagggctggtctcagccccgactctgacgcacgatcacacagggctcctacttcgccaagtctcaaggacccatccccgggcaatggtggcggtcactgtgaccaaagcggcggctcgggcctcgcgcatgcgcactggcgaggccgactcacccgccccacccccccttactcggcagagtcaggctgcggaccttttaaaaaatggcggcgacgcggcggctgcggggactggggcggcggtgctggaggttgcggcggcggctgcggcgcagcccggggcggcgggtgggaagaggactaccagaggggcctgcgggagacccagggtcggacccataggagtcctgtcgtcaggacctccttgatcggtcttctgcttgggttctcggtgaaggaggagcttcggggtgtcggctgggctgcgcggactcctcttgggatccgatgatggatcccacccggtgatcgggaatggggttacaatgcagtgaggcggaaaggctctcgccggggcacagaaagatccccagggccacaaggcgtgctgtcgcctgcaaaggcactgacccacgagcccactgcctccctccttcctgggtggagcaggggcctgccttcatctccaaggcccgggggctccggcatctcgacgcggcttccggcgacacgggcaaagagagacagaggctagtccgagccggagccagtgtgaccacacgtggcactgacgtcccccaagagcacatgcagtgagcctgtgtctctgaggccgtagtgggcgacgatgagacggacagtgatgtccaggcctgcgcccgggggccactggagacctgcccctcaaagcggaggaaacgccaagcgcacctgaaaacctgcgagacagggcctgtacacgagtccaatactcctacttcgccaagtctcagggacccatcccccagcaacggtggcggcgcagagaagagcacggcgccggcgcaggtgcagagagacaggaggctgatggggggaagttgaggcacctggggcagagaaaaaaatgcatcgccaagcggtttctgggtcatctactgacgaaaatgtcttcccatcagcccttgcgctggtccccagggaccctggcatccgtcgttggcgcccagggtgcgcgtcgggccactaggggtaccccaactcggacagaaggcccatgagttgaatttgaagtttgtgggaatagaggtgaggcaccaggggcagaaaaaaaacaggagacctcgcctcagacaagcggggcctgggtcccccatggatgaaagtgccttcccattatgctgtaccctgggcagagtggacagtgacgaccctggttcgagcccagggtgcgcttcgggaccgcttgcggtaccagaaagcgaacaaatggtccatgagcggaaggtgaggcacctgaagcagagaaagtaaagaaacgcgccgccgagaagcagtgcctgggtccctcacggaggaaattgtcttctccttagcccgttcgcttggcact

SEQ ID NO: 16450 - DNA, 2319 bp, Artificial sequence
  DNA replication origin
cgggtgaaaactaatggacccttctagttctctaacccaggtacctagcagctgagcacaccgacacagaagacccaaaaatgacgcaccacttcctcagcatgctttatatactgaagttacggatcctggactacatgttctgattggatgagagaaaaacctctaggcctactctgattggactttattttcatgctgtgattggttatcttaagacttgctctcatgcaatcagaacatgaagtctaggaaccggcatgcgcataacctccgtatataaatgatgctgaaaagctgttacggttttttttttttagggttcggtgttttactgttgagctgctcagtgcccagcttagaggaccaggaaaaggagtcaccggccatatgctggaggcttgagacacggcacagcggcgcagctcgcctcgctatggttggtggtggcagtggagcttgcgattgccacgcggctggaggggtaggaagaggaaaatcgttttgggatagatagaggggtgggtaaagagtttggttattgccaaagggaaaaaaggatagcgaggaggagaaggcgttgcaaaaagacgatggggaaaagatggtggggaaaaaaggttttgggtagatggaggtggaaagacagggtgtggagcgggagtgagggaaggttttgcagaaagacggtggatagaaagtttatgggtggatgaagggggaaaagatggtggcaattggggaggggagagagtggtgaggtgggggaaatgggctagcagtagggagagagggttttgtgaaaagacagtggggagagaagtttttgggtagatagaggagcagaagaagatagcaagtgggagaaggaaaaagggtaactagcgggaggaagacaaggttttgcgaaaaaacagtggcagaaaagaaagatggtggcgaaaagacggtaggtaaaaagtgtttgggtagatggaggagggaaagagggtgacgaggaggagaaaggagggtggcgagaagggagcagggaaagaagggtgggaaaaagacgggaaaatagtttgggatagatgcagggcaaaaaaaagggtgacaagcaggataggggagagaagaggacgagtgggaagagggggcagactttgtgaaaagatggggaaattttggggggtagatggggggaagagagaggtgagcaggagtggggagaaggctttgagaaaagatggtggggaaatgtttttgggtagatggagaagggaaagagtggcaaggaggagcaggaggaaagacaatgaggaaaacagtttttgggtagataaagggggaaaagagggtggtgagcagcaggagtagggaaaaggctttgggaaaagacggggggaaaatgtttttgcttagatggaggaggaaaagggcatgatgacagcaggagggggaaaaaagagggtggccagggagaagggggaaaatacggtgggaaaaaacgggagaaagtgtttgggtagatggttggggaaaagcgtggtgagcgggagaatagagaaggctttgcgaaatgacgggggcgggggcggggagaaaacgaaatgatggtggggagaaaacggtgaaaacgtttgggggtagatggaggaagagaaagggtggtgagagggagagggcgaaatgcggtcgggaaaagaaggtggggaaatggtgggggacaaaagttttgggtagatttttaaaaataagattatttgtattttcacttttgagtagtttgagttctttagatattttgtgtattaacctcttgcctgatgcatagctgcaaagactttcttccattctcgggttctgtcttcattatactgattgcttcctctgctttggaaaaggttttaagtttaatgtaattacatctttgcttttgttgcttgtgcttttgatgtctatttgaaaattccttgtcctaaccaatttcatgaagcatttatcctatgttttcttctctggtagtttcatagtttcaggttctgtatttaaatctttattttgagtagatttttgtatatggtaaggtaatggcctagatgtattcttgtacatgtgggtgttgggttttcctagtacagtttattgaagagattgtccttcccgaaggtgtgttcttggggcctttgttaaaaatgaattgaccgtaaacgcgtgaatttatttatgatttctctattctgtttcacttgtctatgtctgtctgtctcattcgttcatctctcttgtctctcccccgccccttttattgagagtaccatactgttttgatagtac

SEQ ID NO: 16451 - DNA, 897 bp, Artificial sequence
  DNA replication origin
tgaggccaggtgggctgtgcgctctgcggccctgaggccatccaaaggaagctccgccatcctgcgccagtgccagatctgcagctgcaaaccgcgcgtgtggcactggcagcagtgagggcgggtgggggaaggagcagtccctgactctgcctccatccctctccagctacctgacactagccacacagacttcagggtcagagcctcagcgttcagccaatccgcgaagccactcaggtggccgcggagtgcccttgccagcaccctatctcccttctgaggaggagcggggcgggctgcaaggccagacaggccctccttctcaggccgggctggctgcgcgcctgcgatcctggggctgcccgggcgatcccaggagaaccggcgagcccatcggcgcacgcccagagctgcagccccacctgctggcgcgcgccgccagggagcgtcttctgggagcccggcagcaactgccgtgcaggcgcgcgcccaacggctttgcgaggctcactcggtctgagaggtcggaggctgcgagtgtcgctgctgaaggctgtggtggaccgggctggatcgcggattgtgtagattatagatttgaaatagcggagttggggttggatcggggctttggggttggataggggatttggggctgggtcggccggggtcggggagggggttggtgaaaaggtgacagggagctgccctcgctcaagagccggtggttgggggtctgagaagaagtcaccaatatgaagttattcggcttcgggagccgcaggggccagacggcccagggctccatagaccacgtctacacgggttccggataccgaatccgggactccgaactgcagaagatccacagggcagctgtcaaaggcgacgccg

SEQ ID NO: 16452 - DNA, 2073 bp, Artificial sequence
  DNA replication origin
cgatatgagatgtggggggacctgggtgagaataatatgatttggccctgtgtcactaccaatactctcgtgaaattgtaatggggaatgttaaaggtggggcctggtgggagatgatttaatcatggagaagagtgggggttggaggtgggggagtggggagaataggagagattattttgtgggtgggggtgaaaaatgaggggggacggattcttcacaactggtgaaacactatctccttaatactgtctgcgtgatagtgagttctcttgatgattatggagcttaaagattgagtgaatattgtcctgctggggtttggactgacatttttgtcatttttctggggaatttcttccctttggattgagaaaccttacttaatgcttgtactatcattgtatcttgaaagaaaagaaatgccttttgaactcagggactgataggccgaagggactgtagccttgtctcagatgagactttgaattttttatatttggaatgagttaagaattttggaaacttttgaacatgcatgactgtgttttgctgtgtgagaaggacatgaggttctggggtatctgggtcaaataatatggattgactgtgtgtccatataaaactcatatggaattgtaatccttaattttggggcctggtggtaggcgatttaatcttgaatgggagggggttcggggtggtaggaaaaggaggggtagggtggggaggagtaggttgtcagtagggtggtaggaggatggggggtagtaggaagggggagtagccttctgcagaggcagaggctcatggaaaacctctactagggcagtgcacctgtggctttgcaggctttagccccatggctgctctcatgggctgggctggtgttgagtgcctgtagcttttccatactgagggtgtgagctgttggtgggcctatgaatccgggatctggaggatggtggcctcctttttgggggctccaagcccatattttccttctgcactgccatagtggaagtttctcaagaggcttggcctctgcaggaggcttctgcctggaaacagtgggcggtggtgtgggtgcaggatcttcttgatgctgatctcctgatagtgagacctcatgtgatctggttgtctaacagggtgtggtacctctttcctctctctgtcttgctcctacccctgccatatgaaacatctcattgccacttggccttctggtatgattaggaagggcctggtcagtgtgggcctggtcagtgaactagtcagttgggacttggtcagtgaggcctatttactgggggaatggtcagccagggtctgcttagagagggtctcattagagggatcgagtagtgcaggtcttggtgagtggggacctagtggcagacaaatgtttggtgtctggtcagtgcaaacctgggctgcagggcttggtgagtggagacctggtcagctgtggcttagtggtagccttgtcagaatgggctgggtcactggtgacccggtcaaggggtgctattcagtggaggcctggtcacatggcacctagtcagcagggcatgtcctcatcagtgagacccttgtcagtgggaccctggtcatggcagcctggtcaggtcagtggaacctaatcagtgggggcctggtcagagaggacttgatcagtggtggcttttgtagcactggtctatggggtgacctggtcaacgggggtctgagcggtacatgcctgttcagtggtgcctagtcactaggttcctggtcggggcatctggtcaccgcaggcctggttagtagggacctggtcactggcagcctgttccctggagacctggtcagtggggcttcatctgtggggccaggcaatggggtcatgattggtggaatgtggtcagggaggccttgtcagtgaggccctggtcagtgaggccttgtcagtgaggtccttgtcagtggggtcctggacactgtgggcctggcagcgggaatctagttagtggggcctggtgatgggggcctaatcagtgagagtgtggtcagggaggacctgatgtgcgg

SEQ ID NO: 16453 - DNA, 1579 bp, Artificial sequence
  DNA replication origin
tccagattttttttcttaatcacatgaaattttaataccacagatatactatacatctgtttatgttctgtatatgttctgtgctttatacgtaaaaaagagtaagattttttttcacctccccttttaagaatcagttttaattcccttgagaatgcttgttatagattgaaggctggtaaggggttgggctcctctttcttcttcctggtgccagagtgctcccacatgaaggaataggaaaggaagatgcaaagagggaaatccttcgaacacatgaagacacaggaagaggcctcttagggctccaagggctccagggaagcagctgcagaggttgggtggggtgaggggccaggatccactgaccctggggccaggcaggaatcactctgttgcctggggctcagaaggcagtatcacccatggttcctgtcattgctcatgtattttgcctttcaacaattattgagcacctactgtgtgcaggccctgcctggacactggggatgcgcagtggatgcactgggctctgcctttgagggttgcagtttaatgggtgacaggtaattataaggaagaaggtgagtgcagagtgggaggcttggaggctgtggggcttggggtgggggagctcacatccagcctctgggccaaggccaggaggcttcccagaggaggagacagagcagggtattgtggtggggggtgtcctttttggggctgggatctgcactttacagtttgaggggatgggcagaggaggctgggcttcattctggaggtggggacatggtgaggtgaggtttagaaagcacacctgagccgcagtgtgtaggatgctggaaatggtggagatgggcctgcgaagagagtgctgggaagtgatgacccaggagcagcagccgggcacctaacaatgggtcagcaccgtgggcatggagacaagggccgggattgatcaatacccgagaagtacaatgtacaggacttgggctccatttggatggagtgggtgagggaggagtcagaaatggcttccggtttccagcttgggcctggggattggagatgtccccactgagagtagggcacaagtgaggaaattgtttggagaggaagatgataagttacatcatggatgtgctgagtctgagttgcctatgggacttggaatggggggtggcaaaaggtgtgtgatcttgagcaagatattcaactcttctgggccttggtcttctcatttgtaaaacggtgataagaatattacttcccatttgtgttgctgtgaatattaaatgcgctaccacatgtaaaatgttgagaatcgtttctagctcagagtaagtgctcaataaacaccattatgccttttatatggtctggagctcagaagtggaagacagggttttgtgaagtcatggctttgtggatgtagctagattgtggagtaatggcaggagggtcgggggcatggcacaaggtaggtggtcaagagacactggacacaacccaaatgtccatccacaggggaacagatacatacactgctgcgcaattgcacataatagaatcctct

SEQ ID NO: 16454 - DNA, 1363 bp, Artificial sequence
  DNA replication origin
tttcagctggggcaatgctcatcacactgcatagtaattgctcagttaggccaggcacagtgtctcacgcctgtaatcccagcacttgctgaggcgagctgatcgcttgagcccaggagttcaagaccagcctgggcagtatgacaaaacctcatctctacaaaaaaaaaaaaatacaaaaattagtcaggtgttgtggtgtacgcctgtggtcccagctaatggggaggctgatgtgagaggattgcctgagcccagaaggcagaggttgcagtgagctgagataacaccactgcactccagcgtgggtgacagagcgacaccctgtctcaaaaaagaaaaaaaaaaaaagcttaattaattaacggtttttcttcctaagggctgggatcataccagtttgcttcactgcagtgcctgaacatagtaggcatagtagattcaataaatctttggttccttggctggttgttgcctgctctgtgctgatgagaaaggagccaggcttccaggattcccttggtgttcttggctccctgctctgtctaactctcccctgcctctatggtaccttcccaggactgtctttgggctgctgcttgcattggtagggtctcttcttcagggctgaggaggctggtcatgggataatgagacccctatacgatgctgcatgggagctggagttggatgggggccagtggaatatccgcgcaactctgcatccccctccatctactcatccctggttttgtttctctggagtaaggaatagagcaaggactgggatgggtgagctatgaacagagggtctcagctgaaaagtggaagatgttttattccatgcctggacgtctctcattccctctgcttactttttgctgctgtgaggtcaggggaatttaggagccctgaggaatgctgctgctctccctagcagggcgaggtgaccctccactggctcccatccaaccccacctcccatgctggaggtaaccacagaagaggagagagaagtggacagagcggaaagacaagaacaccaagagaatcctggaagcctggctccttcctcatcaccacacagcaggcaagacacagtaagcaacagataaccaccaaccagccaatgaactcaagatttcttgaatctactgtgcctagaatgttcagtcactgcagtaaaggacactggtacaatccagcctgtgggaagaaaagcaatcaattgagcaactactatgcagtgtgatgagcattgccccagctgaaagagtgggcactgtggggcatgtggaggaagtgaatggcctagaggagggggtagaaggctcccagagaaagggaaattcaggtcaagaaa

SEQ ID NO: 16455 - DNA, 1203 bp, Artificial sequence
  DNA replication origin
acaaacatttgttggccaggcatggtgactcatgcctgtaatcccaacacttcaggaggccgaggcaggtggatcacttgaggtcaggagttcaagaccagcctggccaacatggcagaaccccatttccactaaaaataaaaaaaaaattagctgggcgtggtggcaggcacctgtaatcccagctggggtgggggctgagatgtgagaatcgcttgagcccaagaagcagaagttgcagtgagccgagatcatgccactgcactccagcatgggcaacagaacaagactccatctcaaaaaaagaaaaaatttttgttgagcacctacttatgagtcaagcaccagggatacaaagtcaaaacccactctccactcttgggtcactctgtttaatagaagagatgggtaatggcaacaccaccagagagaagcagcctgggactgggggaactcaggggaggcatgggaggtgaggcctgaagggagttttgaagaatgggcgggtggtggcctgacatggccatgggggagtagggtggtggtagaaagaatggtggaagctgtgcacattctagatattttaggagattggtgactggatgtgaggcatggggaagagggaagtatcaaggacatgaccttgacttctggcttgagcaactgaagagaaggggacccctgactgagccaagagcacaggaggagtggacttgtggggggcggaggaggctgtttccatctaggagctgagttgcctgtgagacaccagtgggtctctagaaacaggatctaaagccctggaaagagacgtaggctagaggcaatgatgtcaacagaggggcactattcattctctccgtgcaagtgtacaacaggcaaatatccctgcttgcgtggagctgacagcaatgaaatgtaataagtaagtacatttgtataagcgaaggtaccagctcctatgggaaaaaacagagcaaggagaggggaattgggagtgcaggggctggagatggggtgtgatttcaaatagggcagtcagagtaatccttgttgagaaggtggccttggagcaaagccatgaaggagatgagagtgggctgtatgttaactgcagaaagcctctcagatggagggaatagtcaccagaggactctcagcatgtttgaagaaagcaaagaaagtcagtgtgaggccaggtgc

SEQ ID NO: 16456 - DNA, 1168 bp, Artificial sequence
  DNA replication origin
gcggcggagaggcggtcggcggcggcgcggcggagaggcgggcggcggcggcgcggcggagaggcgggcggcggcggcgcggcggagaggcgggcggcggcggcggcgcggcggagaggcgggcggcggcggcgcggcggagaggcgggcggcggcggcgcggcggagaggcgggcggcggcggcgaggcgggcggcggcggcgaggcgggcggcggcggcgcggcggagaggcggacagcggcggagaggcggacagcggcggagaggcggacagcggcggagaggcgcacagcggcggagaggcgcacaggggcggagaggcgcacagcggcggcgaggcgcacagcggcggcgcaggcgcggagaggcgcaggcccaggctccactccccagctgtgaaagggtaagagctgagggtggctgagactcggggttgttcagggcggggtgggctctggacccagcaggcccggcacccaggtcagggctccaggggaggccaggtgggcgaaggccaagaaggggccggggctggtcaggaagggctcctggtgaccagagcactttgcgtgagccagcgtgggaggaaggtgggctggatgagccagggaggtgccgggagggtccttggcagaggcgaccacctccatcagcccccaggccactgaaccctgggtagcgagaaccgacaggggaggctgcagacagaggagtggaggctccccggctttgggggctctgagtagaagcatctagggggtccctcaagaggcccccaaacgcttccccatggtgagaaaagaaggcgcagagaggggcacggcgccggcgccagggcagaggggcgcacagcaagatttgctgtgatttcttttattgccccaagtgtacttcatcttggtagatttctattggctttaaaaatgtgtgtgttttgctgttggggagtggggtgttatacggatgtcacattttgctggttgactgttcagatcttttgtcaatccttgctccttttctgcctagtttcactctgtcacttacactggagtgcggtggcacgaacatgactcactgcagccttgacttcctaggtcaagtacttcccctggcttaacctcctgagtagctggtactataggtgtgtgccggcacacctggctaaa

SEQ ID NO: 16457 - DNA, 1835 bp, Artificial sequence
  DNA replication origin
cgccgccgctgtgcgcctcgccgccgctgtgcgcctctccgcccctgtgcgcctctccgccgctgtgcgcctctccgccgctgtccgcctctccgccgctgtccgcctctccgccgctgtccgcctctccgccgcgccgccgccgcccgcctcgccgccgccgcccgcctcgccgccgccgcccgcctctccgccgcgccgccgccgcccgcctctccgccgcgccgccgccgcccgcctctccgccgcgccgccgccgccgcccgcctctccgccgcgccgccgccgcccgcctctccgccgcgccgccgccgcccgcctctccgccgcgccgccgccgaccgcctctccgccgctgtccgcttctccgccacgccggcaccggcgctgtgtgcctttgcaagggcggagctgcgttctcctcggcacagacccggagagcattgcgagggcggagctgcgttctgctctgcatagaccttggggcactgcctcgctttgggacaactcggggccgcatcgacggtgaataaaatccttcctgtttgcagccatgtttgtggttggtggcagcgatggacactgcagccagccagagtgtagaaaggcattggggtaagtgcgccatccaggctgcactgctggtggcctgggacggtttgggagccctatctcaggcgtcactgcccgtcttgggtggttggttgggtgtgctatctggggctgtgctgcctgcaccgggggcggggggcggtttgggggctcaaaccggggctgcactgcctttggcggggagccggttgggggcactatcccagactgtattgctggcaacagtgaggtgggttaagtgtgctatctggggctgcactgtgcggctgtggggggggatggcggttttgggttgagggcgctatgggctgctgtaatgcccatggtgcggggaggcggggcggttagggtatgttgggtgtgctatttgcggggggcgacactgctggtggtagggggcagggtgggttgggggccatatcaggggctgcactgattgctttagctaggatttctggtactatgttaaacaacagtggtgacagggggcatccttatcatgttccagatcttagaggaaaagctttccatttttccccattccatatgattctagctgtgggtgtctttcctgtagtttttattatgttgcggtatgtttcttctgtgcctgtttctttgaggatttatagcatgaagggatgttgaatttcatcacatgcttttttggtttcagttgacatgatcatacggtttttgtcgtttatttggttgatatgatgtatcacattgtatgttgagtgactcttgcattccagggatacatcccagttgatcatgatgaattatctttttaatgtattactgaatttgattcactggtattctgttgaggatttttgcatcaatattagagatcctgtcctgtagttttcttctttgatgcttttatctgattttcgtatcacagtaataatggtctcatagaataagtttggaagtattccctcctgtttttcaaaataatttgagcaggatttgtactaggtctttaaattgtttggtgtgaagccatcagcagtgaagacatcatcagttcctgggcttttctttactgggagactttttctgatgtcttcaatctcattacttgttaccaatctgttctggtcttggatgttttcattgtttaacctaagtaggttgtatgcatctaggaatttgccaatttctactaggctttccaatttattggcatataatagccagttatgatcctttga

SEQ ID NO: 16458 - DNA, 783 bp, Artificial sequence
  DNA replication origin
caaggcagagcagggccagggccatggcagagtcagggcaggtccttgacaggaccaggttccaggccagggccagggcagcagcaggggcagggcctggataagggcagggtcagggatatggcaggaccagggctagggccagggccaggccatagtgagggcagggcaaaagccaaggcagggtcagggcaggtccagggcaggtccaggaagcggccagcaccaagcggggccaaggcacaaccagcgcagggtaaggcagggcaatggcaccactgggccatgacagggccaggtcagtgccaggagagggcagaacaggaaggcccatggtggggccagggcagggatgggccaaagcagagccaggacatttccaaggccaggtcagggccagaacaggagcaggaccatgaccactggcagggccagtgccatgacaggaccagggtcaggacaaggggcagggccagagccagggccagaaccaaggtcaggccagtgcacgttcagggcagggccagtgccagggcaagaccagggcagggacagggtagcacggggccaagacagggtcaggatgggaccagagcaggacagggctgagagtccaggtaacagtagggcaggtacagggcaaggcagggcagtacagggccagatccacggcaggcacagggcaaagccaggcccattgccaatgcaccacccctccctacaaggctcctaccacctggccactgctgcagcctgtccatcgctgtaagcctgactcccaac

SEQ ID NO: 16459 - DNA, 1085 bp, Artificial sequence
  DNA replication origin
aaaaagccgcggcggtgggggagcaaaaagctgcggcggcggcgggtggtaaaaagccgcggcgggcagaaagccgcggcggaggggggagcaaaaagctgggtcgagcaaaaagccgcggcggcggcgggggtaaaaagcggcggggggcagaaagccacggcggcggggggcagaaagccgcggctgtgggggggtaaaaagccggggtcgagcaaaaagccgcggcgggcagaaagccgtggcggcggcggggggggggcaaaaagccgcggcgacaaaaagccacggcggcgggggtgaaaaagccgcggcagcgggggtgggcaaaaagccaggtcgggcaaaaagccgcggcggcggcggggggcaaaaagccgggtcgggcaaaaagccgcggcggcaaggaactaaaagccgtggcgggcataaacccgaggcggcgggtgggggcaaaaaaccgcggtggggaaaaagccgcggcggcgggggaaaagccgaggtggtggttggggcaaaagccgcggcggcgaagagcaaaagagccgctgtgatgagggtcaaaaagccgcggcgacgcggggcaagatagtggagatggggtagaaggccggcacagcttggctttgctggagtgtgatgtgataggaaatgtgcagccaaagacaaaaaaagatgtaagtaggcttgactcattgcagccaagaacccagatgttatcttgagggttttaactaataagcagtttaaatcagaatggcacattctgatttgttttttgtatattcacatttggcaggcatagataccgttcgaagagaaagatgtcagtagatagaggtaacaaacttaaatatgtgccgagtctagaaacaagagactagggggataaggaccttttgaaataaaatgcgagatttgaaaactgattgggggatgaggaaaaggcaggtctttaaggtcaatccctgttttgctttaagttgttagggggtggttttatcacatattgtagaatacgtcatttcagttttgaacatcttgagttaaatcgtcctaacatagcttatgaatttgattttctt

SEQ ID NO: 16460 - DNA, 920 bp, Artificial sequence
  DNA replication origin
aagagtatgtgacctggagcagcaccagggcggggaggaacagaagtggaggcgaagtaaacactccccgacagcgtaggtctgtccagaacccgcctccgtcttcacccaaacactgaatggctgagatttccacttccgggtttctgctggggagctatggcggctgcagagggccgaaaggtgtctgcgcgcatctgctccctggcgccctctcgaggagcccctgaggattcgtgcctcccagaggtggggaaagcccgcccgaggcgccggtgctgacggtggcggggctgccgggcacgctgtggaactgcctcccgctagagctgcgggctggcgacggtcccgtgggggcgggaagcggctcagggtgccctcgccggcctgcggcggcgcgtctgggagcgcaggccactcgtgcgcgggtcactcggggctgtgcctcgcgcgactgtgtgtgcaggaaacaaggaggaaataccctaaaatggaatgaagcgccatgttgagggccgcggatgtcgcgagtgctgtgggaatgtgggctgaggtggagagttatggtggaggaagctagtcctgtctgatggaggaaacagggcagaggcgtggagggagacgcacagtgctggtgtgaggagccgcgagcaggccaggcctgtaaagcagcgtgatgggaaccaggatagagaaggcaagtcggggtcctgtggtcgctgaagaatttgaatgaaatcagtaaacaggtgagagggatccatcgcaagagcatgggatgaaacgagcagtagtccacggtgattcctctgcagcggtgggtattattaatcgcgtatgtgacaccaaaacgtgggtattattgatagcttatgtgacaccaaaaccaccccatttaagctgtggctctttccctaaag

SEQ ID NO: 16461 - DNA, 908 bp, Artificial sequence
  DNA replication origin
gttaacactcatttatacatctgcaagacactccccttaaagaaaagttctatgagtgtgggtctggttgcatgaataaggataaaattacttttttagacgatgtttcccacatataattcagagacccctgaaattaggtatccctcttgtagatgtccttgagatgctgctggacctgggaaagaggaaactgggatatgggtctatgccaaaaggtgcttctagttataggacagagaggaaaggggcagagggagaaaaacccgaagtctgagaatctggattgcagaagactaccgagttcgtgggagaagggagagaaaacaaggatgaaaaccgaaaggggaagaggcatgaaatgttgtcaaatgtcaaaaaggcatttggagagaagttgggaattgcattaagaaaaccactgcaaatctcatttcagaccatttagagatatgccccctgggaactgcgagctcaggctgtttagcatcaaacaaatggatccactccatccctaccctaattaaataaatcattcagtaattccactgggttaaagaaccaaaatattaaaaaccttcagggcctgctcttgccaaatatgtcagggatcgtgtgtgtgtgtgtgtgtgtgtgtgtgtgttctgacacaccactactgttaaataggcagagctaagacttaggggactggcagattattgcaaaaagggcacggggcagaaggactatgttgtgagcctgcgaaagaagtttgtgtggggactgtgggcagtgaacgcgttgggaacaatatggaaaactgggagctgccttggaatctacagggccgggtaagagaatgtccgaaagaaaaatgagcaggtgcgggatgtgcgcagagtcagagaagagtccagggcgcccgg

SEQ ID NO: 16462 - DNA, 1195 bp, Artificial sequence
  DNA replication origin
gcccctcctctccgcgcggccgctcgctgactccctcggcagagattgcttctgccttcctgtaaagttttctcccgcccaccttctccgctgccagaccgcccgaggtgccctcagtttctccccaagttggactcactttcgggatgtcccaaaagcctgattccagggcctgctagcccgaccccggtgacgcctccacccgcgcctggccccagccttcacccgcgctcgccgccctccgggacacaccctccgccagaaaacagccggcgggcggcgagactttgggcagagtccgggttcctctccggcgcccggcccgtctccctatctccttgggagtgcgcaccagtttctctttagaacaaggacggggagggatttgggagggggctgaaaccttttgccatcagcgaacagcctcagccaaaaataaccctggaaaggcgagctaagaatggttatctcctgccagcgctgaaatcggaggctgggcgctgcgtgctgtgtgtgtgtgtgtgtgtgtgtgtgtgtgtgtgtgtgtgtgtgtgtgtgtgtgtacgtaccctcccaccccgaccatttgttgaagggaatcaccactgtcagacttcaatccaacaggacccactcaagccatccacactttccccagcctcctccaaaacagcacactttccggtatggacaatttttttttttttttcacttgcttgtttgttgtggtggttgcaacagcagcaacacagatgacacatatctccctattcttctcgcccttctcaccctccctacccagctcctgccttagaaacaggcttgtcctacactgtatctgtccacactgtctgaactcttccctgaattaatcgtcttcaataggagggggctaaatcccttattaatgccctaccaggagtgaatgaataaagccaagttaaaggagaactgggtaccagatactgtgctaggttcctttgcatgtatcctttcattctgctggagctaaagattttctgcctcctctccataaaacgcacccaaactccaaaaccaggaaattctccatagaaaataggagtgaagagagaaaagactaacaggataaaacccaaagcaggaagaaagttctatctcccatttctctcaatgaatttttggacccaccaaggctactgtcctgaaatatcct

SEQ ID NO: 16463 - DNA, 1040 bp, Artificial sequence
  DNA replication origin
accctgcgatgggggtcccaagagccaggggggaagagcggctggctctaattccgcgcctcgcgaggggtgcatccccccactgcgatgggcgtcctaagagccagggagggaagaagggctgactctgagtccttgcctcgcggggggtgcctcaccccctgcgatggggatcctaagagccacggggggaagaggagctggctctcagtccccgcctcgcgaggggtgcctcctccccctgcgatgggggtcctaagagccaggagcggaagaggggctggctctctgtatccacctcgcggggggtgcctccccgccctgtgatgggtgttctaagagccagaaggcttaggggggctgtctctcagtccccgcctcgcggggagtgcctccccttcctgcgacgggggtcctaagagccagggggggaacaggggctggctcagtccccgccttgcggggggtggctcgctcccctgcgatgggcatcctaagagccaggggaggaagagggggagaggatgataataatttcagcatcgcaggctgtgttcacccagcctgttaaatcgttatttatatcctgaaagggagaggatgatattactccccgtaatagacagatatgactccccatcgtagagcacgaggtgtacacccgccctgtgattttcttcctcatattcagagaccgagaggttgatgtcactcccaatatcggaggaagtatacacccccgtgtgagatggtccttaataatattccacggcggagggggtgatatgactacatacatggcagaaagtggaaacctcccagggatattgttcccacgatcctggagggaagaagatgatgttactttcaatatgacagaaggtggatgaagtggtggactgcccctccacacctgtgagtatttctagttgggtgggtgggaggagagactgagaaaagaaataagacacagagacaaagtgtaaagatacaacagtgggtccaggggaccggcgctcagcacaccaaggacctgcacc

SEQ ID NO: 16464 - DNA, 695 bp, Artificial sequence
  DNA replication origin
ataatactctcaatgctgaaagagatgcatccgcctcccggtggcgacgccagacccttgccctcctcccaaggctgaggaccaagtgagggctgcagcacgggaagggtgccggggtcgccagggccgcgccttctgctttcttcggtgccccggcatagacgggggccgagagcagtaggtagcgaagaggatgcgggtgcagcagagcgtaagggcgtctcccgggggcggtgttggggtaggcccccgggactggctgcggcggggcaggggccccaagcagagggcctgggtgggggttgtgcagggcggcgtgtgcagcaggtagagggaaggggtggggcaggtgggctcccggggtcagttggtggcgcttgaaacgcttcctacgccggagaaagctgccattgtcgaacatgtcttgggaggcggggtccaggctccagtagttgcccttgcctgggtggcccggctcgcgggggatcttaacgaagcagtcgttcagcgagaggttgtggcggatgctgttctgccaggcggggaacttgcggcggtagtaggggaagcggccactaatgaaggcgcagatgccgctgagcgtgaggcgcttgtgcgggttttgcaggatggccatggtgatgagcgcgatgtacgagtaggggggctttgccggctgccgggcatcttcagag

SEQ ID NO: 16465 - DNA, 754 bp, Artificial sequence
  DNA replication origin
atgccgctgagcgtgaggcgcttgtgcgggttttgcaggatggccatggtgatgagcgcgatgtacgagtaggggggctttgccggctgccgggcatcttcagaggccgccgcagaccttggcggtgccctgaacttggtgccaaactctgaggggtcgctcgggccgccgccgccctcgatgtgctctcggggaagcgcaaccccgccccaccgggccacctgcagccccggctggagcgactgctctaggaactgctggctcgccgcctcctcctcgtcttccacctcgtcttcatcttcctcctctcccaggacatcgattttaccgtcttccccatcggagtcccggaggctgcgctgcggtgtggagcgaaggcgctcagctcttggcaggttcatggaggagcaggtgcttcagtcgcaggggatgtggcgaccgatcacctagcctggggcgggctgagctggaagcctgggatgaatgttgcaagaagcaggaacgctagtggttaccctttgggatgttttcgtctgcttgtttctactcctttgcaacaacgtccggcaaagatgcctttgccttttataaaagcttcttcaagaccatgtgtggtggactcccccctttataacccttcttcccctacctcggagcggtgccacttcctcctaacgtagtccagggatgatggtcttctgggcaaacacccgtccggagaaaagcccagccccctcctcctcgcacccacctg

SEQ ID NO: 16466 - DNA, 1460 bp, Artificial sequence
  DNA replication origin
  misc_feature (1454)..(1460): n is a, c, g, or t
cattttaacaccaggtaaatagcacaaaacaaactggggaaaattttacagcagttatgttacatgaaagttaaaatccttatgacatatacaatgtataaaacagtatgattactgctattattaatagcattatgattacctggtcttcccgcacaccagtcctcttctggtgccctgtggtgaagcagagccctccctctctggccacagtgagggatccagcaggaacctgtgcctaaacccacagagggtgtgagccaagccagaacatcacattccctcctgcgaaatgatgcagatacccactcacgacagagatttggtccctctctggaaaagctgtgtaacaattattgcagaaacttgtttcttatgttcccagacacatggagaaagctggtctggaagactgatgtccacatgctaagagaagcagtcactcataacacacacactgcacacaccacaccgtgtgcacatgcacacacaccccacacacagacaccacacaaacagcacacacaccatgtgcacatgcacacacacccctcacacccactgcccacaccccacaaacacacctactgcacacacaccatgtgcacatgcatataccccatacagacaccacacactgcacacacaccacacagagacaccacacacactgcacacacactatgtgcacacaccccacacacaccacacacactacatacacaccatgtgcacacacacaccacagacaccacacacactgcacacacaccatatgcacatgctcacactgcacacaaacacactgcacacaccgtgtgcacacacacaccccacacacatacaccacacacagcacacacaccatgtgcacatgaacacaccccacacagacaccacacacactgcacacacaccatgtgcatatgcacaccccagacatcacacacactatgcacaccactccatgtgcacacatgcaccccagacaccacacacactgcacacacacaccatgtgcacacacacaccccatacaccacacacacaccacacacgccatgtgcacatgcacaccccagacaccacacactgcacacagcagacaccacactacacacatgccatgtgcacatgcacacacccacatacacaccacactgcacacaccacgtcatgtacacatgcacaccccacatgcagaagccacacacacggcacacacaccatgtacacatgcacacacaccacacaccatgcacgtgcacacacacactcctcagacaccacactgcacacacaaccaagacaccacacacactgcacacaccccacacacactgcacacacaccatgtgcacacgtacacacacaccacacactgcacacacaccatgtacacatgcacacaccccacacagacaccacccagacaccacacacactgcacacannnnnnn

SEQ ID NO: 16467 - DNA, 1107 bp, Artificial sequence
  DNA replication origin
agcttgaagggagaccacccctcatattgtgttatgcccaatttctgcctccaaagaaagaagaagtaaaatctaaaaggcagaaatgaaatccacaggcagacagccctgcaccacaccctgggcctggtagttaaagatcgacccctgacctactcggttatgttatctatagattacagacattgtatagaaaagcactgtgaaaatccctgtcctgttttgttctaatctaattacctgtgcatgcagcccctagtcacgtaccctctgcttcctcaatccatcacgaccctctcacgcggacccccttagagttgtaagcccttaagagggacaggaattgctcacttggagagctcggtttttggagacgtgagtctgcagatgctcccagctgaataaagcccctccttctacaactcggtgtctgaggggttctgtctgcagctcctcctgctgcagaaggagagcaagggagagagggatggagaagtagaaccagagggagagagagagacagaaaaggggggaggagagagagaggggggaagagagagcaccacattagagcgggaggtggagggggaagtagagaaagggagagggtgagggagttgtggagcgacagcgacagagccttggagagggaggctctgctcaggtagacagggcacctttcagcaggccggggtggggtggagggttcttgggccgggctagaacagggggtcagggccccccatccaggaaaaccaatggagccctgagacgtgtttttttttcttcgattggttggttgctttgggggtgcgtttcataaggtccttcctttgcttctttctgtctccttgatgcggtgggccctgagatttgtagagtgtgctcgtgtgtctggcgagagccatggcgccgagcctgtccacggggcgaggcctgggtctctctcctttcctccggactggagtttacacgaagtcggtggcattgggaaacagggtgcacagggacggatttcctcgtggctggcgaagaaaatgtccttcctctggggaaagcagccctcgggttctggagctgaggtcttggctggggtctgtggcaccc

SEQ ID NO: 16468 - DNA, 776 bp, Artificial sequence
  DNA replication origin
ctgagatttgtagagtgtgctcgtgtgtctggcgagagccatggcgccgagcctgtccacggggcgaggcctgggtctctctcctttcctccggactggagtttacacgaagtcggtggcattgggaaacagggtgcacagggacggatttcctcgtggctggcgaagaaaatgtccttcctctggggaaagcagccctcgggttctggagctgaggtcttggctggggtctgtggcacccgctgcccctgctcaccccttccaccggcttggacggttgcagtgacgctgaatgaatgaatacaattgcctgggagtccagggagcgtgaagacacccgggacctcagggaacccgcgcctgcaccctcggggtcggtcccgtcccgcccgggttgggtggggctgccgcgagtcggaagaggtgggatgctgctgcctggcggtgctgcagcggcggatcttcagtaggaggtcctgggcttcggctggggcacgggggcggtcaacggggagcagaggcggggggcagttgggaagcacggagacaaaagggggaaagaaggagggagcgggaagccaaaagtctatggtaccgctattaccaggcggaatcccatccaagtactaaccagtcccgaccctgcttagcttcaacagatcagaggcgagcgggcgcattcagggtggtgtggcctagacgccagcagtggcgcctggctgcctcaagagcccggcccagccaagcccgcatgactccaggcgtcaccgccaccc

SEQ ID NO: 16469 - DNA, 1031 bp, Artificial sequence
  DNA replication origin
tgcagccgccttctgtgtgcaggcagcaacctccaggcaactcccgagtccgccctcacttcccacatctcggaacgagggccagatgtccctgtggctgcggccaagccaggcggtctgccctgcagcagctgcacgggggcgggaaccggccctcagccctatcccccgtggctgcagagggcccttggctagaggtgtcgagctctggcataggaggagccgggcgggggcagggtctggggggctctcaggccaggggcacttgcgatccagaggccgcccaggccatgctcaccacctgggcgcccagctacaggcgccaggcaactcccaagctggctggcgcgcccagcctcgcagacccgggcatggatgtcgccgtggctgcggccaagccaggcggtctgctcggcggcggctgcaccggggcaggaaccgaccctcagccccatccccggtggctgcggacggcccctggagcggccccgacgtctcttcggaggagaagaggggcgggagtcacggccaggcaggccctcaggcgggaagggatgcgcgcctgcgattccgggacgtaccgcgccagcccaggagaacccggaagccagcagctcttgtttctctgtgtgattctgtgaggaaccaccaaattgttttccacggcaagtgcatcattttctattcctagcagccagttcatgagggctccaatttctccacctccttagcaacattgattttctgtgtcgttgttatgaaagccttactagtggatgcaaagtggtatctcatttgggttttgtcttgcattttattaatgaataacagtgtttagcatcttttcttatccgtcttacacatttgtgtatcttcttcggagaaatgtctattcaagtcctttgcctattttttaattgggatgttagaaattctgatgttgagttgtgggatattaagcttttatcagatacgcactttgattttatcagatacatattttctcacatactatgggttgtcttttcact

SEQ ID NO: 16470 - DNA, 1109 bp, Artificial sequence
  DNA replication origin
gcggagcagtgttcgcctcagcacagacccgggcgggcgggccgggggtaccgcgagggcggagctgcgttctgctcagcacacacccgggagacaccgcgaaggcagagcagcgttctcctcagcacagaccttgggggcactgcctcgctttgggacaactcggggccgcatcaacggtgaataaaatccttcctgtttgcagccctgaataatcagggtcagagaccagttagaagggttcagtgtggaaaacgggaaaccaaaagcccctctgaatcctgcccaccgaggttctccccagccaaggcgaggcggccgcagtgcgagatccacaccgcagcctcggaagacaaatgcggcattcctaatgcagacatgacacccaaaatatgacacccccattgctcatgtaacaagcacctgtaatgctaatgcgctgcctcaatacaaaaatattaatataagatccgcaatcccctcgctgccgtgcagtccaaagacagccatcataataatcaacattgacatagtcaatacaaacttagtaatgaacctagggttaaggttggtgttagggttaggggttaggggttaagtttagggttagaggttggagatagggattggggtcagagttaggggttaggagtcaacgtttagagttagggtttaagagatgttaggggttagggattaggggttagggttgggttagggtgagggttggggttagggatagtggttagggtttgtgtcaggggttaggggtcagggtcagtggttaggggtcagggtcaggggtcagggtcaggggtcccactctgcgatttgtctatttactctgctgactgttccctttgccatgcaaaagctctttagtttaattaagtcccagctatttatctttgtttttattgcatttgcatttgggttcttggtcatgaaatccttgcctatgccaatgtctagaagggtttatccagtgttatcttctagaatttttacagttcaggaattaggtttaagttcttaatccatcttgagtagatttttgtataaggtgagagatgagaatccagttttattcccctacatgtggctcgcca

SEQ ID NO: 16471 - DNA, 2170 bp, Artificial sequence
  DNA replication origin
acagcagcccacgggcacacagggagacctgtccttgacatcacaagggcgccacttttggggagactcacccgcacaccgtccgcgcacgcctgaggctgggatcccgcgctgcctccccggcgatctgtctgaggtttcttcctcctggggtttcttcctgctggtggaccctccgcgaatcccggcctccggagaccgtcctggtaactgccctggccagggctggtctcagccccgactctgacgcacgatcacacagggctcctacttcgccaagtctcagggacccatacccgggcaacggtggcggtcactgtgaccaaagcggcggctcgggcctcgcgcatgcgcactggcgaggccgactcacccgccccaccccccttactcggcagagtcaggctgcggaccctttaaaaaatggcggcgacgcggcggctgcggggactggtgcggcggtgctggaggttgcggcggcggctgcggcgcagccccgggcggcgggtgggaagaggactaccagaggggcctgcgggagacccagggtcggacccataggagtcctgtcgtcaggacctccttgatcggtcttctgcttgggttctcggtgaaggaggagcttcgggtgttggctgggctgcgcggactcctcttgggatccgatgatggatcccacccggtgatcgggaatggggttacaatgcagtgaggcggaaaggctctcgccggggcacagaaagatccccagggccgcaaggcgtgctgtcgcctgcaaaggcactgacccacgagcccactgcctccctccttcctgggtggagcaggggcctgccttcatctccaaggcccgggggctccggcatctcgacgcggcttctggagacacgggcaaagagagacagaggctagtccgagccggagccagtgtgaccacacgtggcactgacgtcccccaagagcacatgcagtgagcctgtgtctctgaggccgtagtgggcgacgacgagacggacagtgatgtccaggcctgcgcccgggggccactggagacctgcccctcaaagcggaggaaacgccaagctcacctgaaaacctgcgagacagggcctgtgcacgagtccagtactcctacttcgccaagtctcagggacccatccccgagcaacggtggcggcgcagagaagagcacggcgccggcgcaggtgcagagagacaggaggctgatggggggaagttgaggcacctggggcagagaaaaaaatgcattgccaagaggtttctgggtcatctactgacgaaaatgtcttcccatcagcccttgcgctggtccccagggaccctggcatccgtcgttggcgcccagggtgcgcgtcgggccactaggggtaccccaactcggacagaaggcccatgagttgaatttgaagtttgtgggaatagaggtgaggcaccaggggcagaaaaaaaacaggagacctcgcctcagacaagcggggcctgggtcccccatggatgaaagtgccttcccattatgctgtaccctgggcagagtggacagtgacgaccctggttcgagcccagggtgcgcttcgggaccgcttgcggttaccagaaagtgaacaaatggtccatgagcggaaggtgaggcacctgaggcagagaaagtaaagaaacgcgccgccgagaagcagtgcctgggtccctcacggaggaaattgtcttctccttagcccgttcgcttggcagtgaggtccctggcgtccctggtttgatcccagggtacgcctcgggccactagtgttaccccaaggtgggcagaaagcccataaggggaaggcgaggcacctggggcagagaaaaaaaaaacttcgccgcagagaagcgcggcctgattccccacggacgaaagtgtcttcccatcagtccctgcactgggacccggggaccctggtgtccctggttcgagctcagggtgtgcctcagccgctacgtgcaccccaaggggagctttgggagcacaaagcccatgagggaaagtgagttttgagggaggagtggtgaggcacctgtcacagaaaaagaaaaaaaaacaacccgcgccacagagaagcagggcctgggtcccccacgatgaaaatgccttcccatcagctcctgctctgggccc

SEQ ID NO: 16472 - DNA, 1464 bp, Artificial sequence
  DNA replication origin
aagtatatttctgaggtttttcttcaatatgactgactatagatatttgactctagttattctcagaaagagaaagcaaagttatggataaataatcgttaattccaatatctatatagacggaagtgtgctagagcaccacaagaagaaatttgaacacagaaaaataaggaagcaagaacccagcagacattatactctgagggacttgatgttccatggaaaagcacaggtgggggtgtcttttgctcttctcacctctgcggcagactgcttgtttctgaactgttggagagccctccattctcacaagcccaagcactggtgtgggccgcaatcttggaacaaattgaggacagagaacaaggctactatttcctgcagtgccacttgcccttcacccagccccaagatgaggtggtgggcaccatactggatatgcctctgtggtggacttctatactgcctttgagtgagagagaggcttgccccatccccttgccggcttccttctccgtccctgcgtcgagctgtggctagatttctccatgagggcagagggcagggcaagaggcgtgagaagcatcttctggaaggtctgcgggcaccctcctgcgggtggacaatgagcgcctgggaggccgttgtccttggttggggagcggtcgtctggatctagcctagcaaagaggctgctccggatggggagggaatgaaaacccctgcggctccgacgcagatgcccacgttgcccaggccttcacagacccccaagccggaaccgccgggaaaacgattgccaaccggccacaacacccaggcagagacgcggggagaggctgaccagaagaaaggccgacgtgcaagaaacccagcctccggcgcacagggaacatgtgtcccaaggcgcacgcacacacagacggacagagacagaaagagagggcgacggaaagagcgagaagggagagagggagagagagagagagagagagagagacttaagagagagacggtagtgggcacacagacacgcgcgcgcgcgcacacacacacgcagacacacagacacacacacacccccataacggacacagacatacagcaggtaacacccacccccaggcagcccctgaagctgccgggttctagtctccgcgactacgagccaccggtgagacagcagcccacgggcacacagggagacctgtccttgacatcacaagggcgccacttttggggagactcacccgcacaccgtccgcgcacgcctgaggctgggatcccgcgctgcctccccggcgatctgtctgaggtttcttcctcctggggtttcttcctgctggtggaccctccgcgaatcccggcctccggagaccgtcctggtaactgccctggccagggctggtctcagccccgactctgacgcacgatcacacagggctcctacttcgccaagtctca

SEQ ID NO: 16473 - DNA, 1240 bp, Artificial sequence
  DNA replication origin
tttcagccaggtgttcctggttccaatgactcagaccctattggagccccaagtatctggataattgggcctgcctagacagagatgaaggatgccatttctaaaaggaggaaggggagaggaaagtccatctcttggggtcttgtagaaaatgccaaagaccaaccaagctaaattattgtgtccctgtagatctatttgcctctttacgtacagcaggctgtgggggtggggggtgagggaaggccgggaataaacgaccaggatggagcgggctggcaggagagaaaatgcgccccccactctttgcgggaacagccaacgggcctcctcagctcgcagctcaggcggccgcgcggcaggccggtcctgggccggggtccggggccgggaggcgggggcgggaggggaggcggaggcgggccctcccggggcgctgtgaactttagctgggccgccgcctgtcagccccagaaagcgttaaaggtgcagcagcccgcgccagcctccgcagccgcctttgtacgcgtgatttatgacttcagtcttggttcaccaagagttcacacggctttcgctgctgttgaaggttaaaagatggtcttcgcttgacaagttggactattgaaaattccttcttcttcttctttttttttattttagaagcgaagagcagaggctcaggagagaaaaaaattggggagggggtgggggacaggggttgcaggtgggccaaaatggtaggtcaggaaggtttgtcttcctatatttaggattttttgttgttaggatttgcgtgtgtgttggggagagggtagagaataagagggagctaggcaagagatgtaaagatctctcatatttagaggccaaaggagtgaaaaaaaaacttgcttccacagttaattatctgggtaacttgggtcacaccccctaactgatcctcctctagagaccggaaatgggccaggtaagggagagagtttgggtaaagggtaaggtttgtgtgcttctcactgggtgtacttgatcatccaccttacctgggtaactacttttttttttttttttttggaaatggggtccagctctgtttcccaggctggagtgttgtggcaccatcatagttcactgaagcctcaatctcctgggctcaagtagtcctcccaccttagcctcttaagtatgtgagactgcaggcatgtgccacaccgccaggctgggtagctgcctttcaatg

SEQ ID NO: 16474 - DNA, 700 bp, Artificial sequence
  DNA replication origin
ctataaggtcagtgggtatgtctattttatggatggctcagagatgttaagtaatttgcccaagtttgtacaactagcgagtgtcagatgagggacttgaatcacaaacccatgcttttaacccctgtggtacactgcctctcactttctcaaggccagaagggaagggcttctggtccaccatatgaagtgcctacggaatgtcttggggaaggaaagaagagagaagcaagaagtatagggaagcagacaagggctacacatgcatagggcatggaggacagaatggtggctgggaaagactgaagagggtttgtagggctaagaggaggtacctgaaggagggtgtggtaaaccaacacgtgcatgggaagggggccgtggctacggagatagctggggagtgggggaacggggtccaggagtggacaccggcagttggaacatccagtgagcagtgcccatcgtggactgggtggttggggagtgggagggacctcgtgtcagaggaggggtctttgtgagcgtgcagcagtgaggaatgctccgccatgaatactaagggcaagaagagaaagggccagagggggctgggtgatgtttagctgctggggtgattaatgggggtgaacggagggtgaaactcaagcccttccaacgaagatggtggggaatggttgtccaagaacaacagtgcact

SEQ ID NO: 16475 - DNA, 939 bp, Artificial sequence
  DNA replication origin
agggagaactgagactccaggagatcggtggcttgttcagaatcacagaagcagcgtggatccaagaagggatctgttcccaaacagaaaccagtgtcttgggagagagagagcagaggaagcccgcacctctgccctaacctgaggctttgagcctcccgcaaagccgagtgagttgagagcgcccagaaggcagacgctgcggagggagagactcctgggctagccaaacagcagggcctcgggcaggagcgtcacctgcgcatcctcattctgcgattactgtcaggggaccatccatcaaagccgccctggacgctgggccagactgcccgccgccggcaccgaccgggtctctccagatcgcattagcgtggggcgagggctcagtgcggcactggctgctgagggagaggcgtggcggggaggggggcggggcggggggacggggacatcgcggtggggccattgcaggggcaggggagtggctgctttaggaccctcctccttttcttccaatctcccgcctctgggatctaaggtggatgaaaggggcactagaatgggcggcttttggggggcagggggtgcagaacactgaaggcatcagggaagggtagtgatgggggcagttatcagaagcagagaggaagaaatacctgtaaaggggaaagccagagaaattgtctggggaggggagagactgaaaatgggggtgcagagattgggggttagtggaagaaaaagccttaaagggaaaggaaaagagaagctgtagagggaaaaagaataggcaaggaattgacgagagagcagggaaacaggaaaccacagatcgtcaggggctgacaaaaccttagagacaatctactgcagcccctcattctacaaatgaagaaatggaggcccagagaggggaatcccttctccaaagaccca

SEQ ID NO: 16476 - DNA, 846 bp, Artificial sequence
  DNA replication origin
cgcggggctttggtgggcctagagcgctagggactggcacgcaccagcactgaggggcaaagcgggcgcagtcaggccctccaccccgcgtcggcacgcggtcttaaatattaccccggagttttcaattatctctccttaatggatttgcaggggctctttcatcaagcgcggggtggctggatgtgggggtgcggggagcgcgcggcgagggctggagctgggaaaatggcccatatttcaatattaaagccctttacgatcgtcagcagcatgaaagatgctgcaaattaaacggagccgcccgcgccagcctctccatctcgcaagttttaattaacgctgagggggaggcggctgacgggcgggtcggagccgggccagcggcggatctgggagcctgcggatcccagattccgaactggagcgtcagggatctcgcgggccaggccaggcggaggcggagggtggtgggctccgagtcccgggcgagggcgcggaagatgcccgtggagatgggcaaggctgaggggtgggggacaggttggaaggtctctgagcatctgaccgggaaacaaaactctgcaactgaatgcaggaagctttgttcttaaaggtgagggggcttgtggccaaatcatcgagctcttcatccccaggctccttcagcgcgcgtccttctgcctctcttctttcgaccagcacttcccccaaacgctcccccgcgttgattcccggtcccctcccacctcatcctgtggctccttgtttcgggacgcagttgtgcttctgtgaccccgcggctcctgttctgggacgtctgctttctccatcactccctggctt

SEQ ID NO: 16477 - DNA, 1280 bp, Artificial sequence
  DNA replication origin
tagatggatgatgaatggatggatggatgagtggggggatagatggatggggatggatggataatgaatgaattggtaagtggatgggtgggtggatggatggatgggtggatgagtgggtggatggatggataatgaatgcattggtaggtggatgggtggatggatggatgggtagatggggtggatagatggatgggtagatggggtgaatggatggatgggtaagtggatggatggatgggaatagatgatgaatggatgagtgggtggatgggtagatggatggggatggattgataatgaatgaattgaaaggtgggtgggtgggtggatggatggatgggtggatggatggatgggtaggtggatgggtagatggggatagatggatgatgaatggatgagtgggtgggtggatggatggggagggattgataataaatgaattgataggtggatgagtgggtggatggatggatggatggggatggatggataatgtaagaattggtaggtgaatggatggatggggtagatggataatgaatggattggtaggtggatggataatgaatggattggtaggtagatacatggatggatggacaggaatgaatggataatgaatggattggtaggtggatagatggatgagtggatagatggatcgataatgattgatggatggatggatggggatggatggatagataaatggattggtaggtgaatggacaaatggatggatggatgagtgggtagctggatggggaattagtgggtaggtgggagaatggatgatggatggatggatggatggatggatggataaatggagggatgcatgatgaacttctcccttgttcccagcctagtcctagaatatgttgcctcttctcaaaaataaggtaccacaaagcctctggtgacggtggagcaaaggaatagatggtgaatgtctcatacccacttcggatccagaacaggcctaggagagactcaggtgggatctgctgctgaggaagggggttggggctgaagttggaggaggagggcagctctaaaccacctgttcctggctctaggcctctcaggccagacagcccccacccgtttctgcagatgcccgcatcatggtcctgaggggatgggggctggcctggagcctttcccccgtggtgtgtggctatagcggggacatgaagggggtgtgttggggacgtagtgaccactcccttctaccgtcagagatcctgcttccccctgccccctgcccc

SEQ ID NO: 16478 - DNA, 1140 bp, Artificial sequence
  DNA replication origin
aaaaataaaagcaaactgtaccctgaccacattgggcacatgtcgtcaaaacctcctgaggctgtgtcacacgcccttacttcaccttggcaaaataagtgttttaaatttatcgagacctgtctcagataccctttggtttacaacctgatggaggggttggcattgatagaagggttttgtttttccagcacctgccttcatgccttacttctcagtgggctcaggactcagaatggaaaagagtcccaggagaccccagtaactcttcaactcttttactctcactgttttctctcctttacagcagacaccactatctgcaaagggtcctgtttgctgcccctgcctgccaggaagcacagcctagatggcagtgtccatgactgtcctgagtaaccactgggtccccagcatctcagcttcacagctgttctgtaaagaccttcagacggagggacgaggcgggtgggtgggtggatggatggatggatgcatggatgggtgggtgggtggattgatggatggatgcatggatgggtggatgggtggataggtgagtgggtgggtggatggatgagtgggtgcatgggcaggtatgtggataggtggaagtatgggtagatggatgggtggatggatgggtcaataggtggatgggtgggtgggtgaatggatggatggatggatggatgcatggatggatggatgagtggatggatgcatgaatggatggatggatggtggatggatgggtgagtaggtggatggagagatgggggaatggatggatagatgaacaaataagtgatggatgggtgggtgtatggatggatgggtgggtgtatatatggatgggcgggtggatgggtgggtgggtggatgggtgggtgggtggatggatggatgtgtagatgggtggatggataagtggatggatgggtgaatgggtggataagtagatgaatgggtgggtggagaaatacatgagtatgtggatgaataggttacagagtaaaatgccaccaccagagcagtgcaacagcgtgctttgcactcagctctgccatggaaaaagtggttccttcccaggctctcaccaggctcacatgggctccagacccctgcacccccaaccag

SEQ ID NO: 16479 - DNA, 1165 bp, Artificial sequence
  DNA replication origin
gccgccgtcccgcgcctgggtcccgcgctgggggaagcgcctgctgcttatctctgtctacctcaggtctgacttttgatgccaaaatctaagcccctggggtgcctctcccccgcctcccgtgcaccagggtctgcagcagccactggggccaggctgcctgctgcatctggcggccctggaggcggccatgggcccctttgcacccgcccgccttggtgtctggggaggggctgcgcagggccgtgggctgggtcgtctctctcgggctgcgtgtgttgcgctcccgtgtgcacgtgtgtgtgtcgggaatcctgcgtgtcgtgcctgtgtgggcgatccggccccctggctgtgggtgggactggattctaactcaggggacttgggcctgctgttaacttcgatgattgtagggacaggtggggcgggcggtgggtgggcacggggctgggtcctgggcggcctggcgactccaggagaaggaaatcactgaaggcagtggtcgtggaaatgggagggggtcgcagggggtctgtggggcccggtcctggatactgggcaggaagccgtggtctccagagggtactccctgcctcaggtggccccattcaaccccagccgtacgcacctcccgccactgcctgtcggtgggggtttaaagttggggtggctttctggggtgcagctcagcatcccctcttatgcagactgggatggggtcgggcacctccctcagccacgaggaccctggacgggttcgagttctcttggggccgtggggctagctgtgtactgggcggggaccccacactcgaggccaagggggggctctccctgctgtgagatgttgggggacaggcagcttctggaaccttcagtgggacccttaagtggccgtcaggacaggcgggaggatgggcatggggcactggggagagccggggtcgttaagggtcacgcatctgtacagtctgaatttcctttatctttttttttttttacccactttgtccctcttttcccctaattgtgctcttgcattttttttttcttggcaaacgtaaactcagcctttcattcatgacgtgtgacatttcagtttctctggggtttgtcagaggacgcggggaccacgcctgaaagttaggtaatgggagaaaaa

SEQ ID NO: 16480 - DNA, 1066 bp, Artificial sequence
  DNA replication origin
ctctggggagaggagccctgggggccggagggcagacacggacagggtccaggcggttctgcgagtggggcccgattgcgtcttggagcgaaaagacacccccttcccggggtgattgtgctgctacggtgccggccccgggaaggggcagggagaacctagctgcccaccaacccctcctggaaagggggtgtgtgtcaatggccctgagatcagaagaaagtggggtcccgtccccaaagacaaaggcaagtgaaagtcccctcccacagcccgacgggagagtgaacctagactcaggggctcagaagccccccagccccctcccccaggggtctccaaggctatgcggaggtggggcggttgggagtcgggggagttggggagtccccttcctcaccgacccccaatgccggtggcctaacagggctcccagggcccaattagagacccaggcttaccatgggaatagctgagttaatccccaccccaccacaagagaaatgaaagcccggagctcccgtgtaggacgcgacagcccagccggtcaccaggcgggtccaacaaggtccccagaccctgccgagcatttcagactcctgcctttctgctccagcagctccagccaaaataacccccagctcggctgctgtaaacccactttctcctagcctggcagaggggcactgacccacagggttggggggcagcctcccttctcggcctcgatttagtcaccgcacaacacagggagctcgcagccccggcacaaaagcggtcgggagaagaggaagagatagaaggaggagaatgttggggtgtggggtgtgttcagtacgccagggccccgaaatcctcaccctgagctaggtctggcttcacccccactccccagtattgttagtccccaaaagcagcccttttggacaagagaagaatcccagtgagaaggccacattcatccctgagacaggagcctgggggctgtgacaagaaccacccccgccccccaggccccaggccctttttccagcagttgctactttttagataagatttccaggcc

SEQ ID NO: 16481 - DNA, 1884 bp, Artificial sequence
  DNA replication origin
tgccgcggctcaggagccggtggtcgggtgtctgagaagactacaggcgcccgccaccacgcccagctaatgtttgtatttttagtagagacggggtttcaccgtgttggccaggctggtctcaaactcctgacctcgtgatctgcccgcttcggcctcccaaagtgctgggattacaggcgtgagccactgcgccccgctatcacttcctttcttatctgtgtaccttatctgtatacccggccttatcactactattatggggtttttttttattttttgttgttatcgttttttttttttttttgagatggagtctcgctctgtcgcccaggctggaggtcagtggcggagcagtgttctcctcagcacagacccgggcgggccagggtctccacgagggcggagcggcgttctgctcagcacagacccgggggacactgcgaaggcagagccgcgttctcctcagcacagaccttgggggcactgcctcgctttgggacaactccgggctgcatccacggtgaataaaatccttcctgtttgcagccctgaataatcagggtcagagaccagttagaagggttcagtgtggaaaacgggaaaccaaaagcccctctgaatcctgcccaccgaggttctccccagccaaggcgaggcggccacagtgcaagattcacaccgcagcctcggaagacaaatgcggcattcctaatgcagacatgacacccaaagtatgacacccccattgctcatgtaacaagcacctgtaatgctaatgcactgcctcaatacaaaaatattaatataagatccgcaatcccctcgctgccctgcagtcctaagacagcgatcataataatcaacattgacatagtcaatacaaacgtagtaacgaacctagggttaagttggtgttagggttaggggttaggggttaagtttagggttaggggttggaaataagggctggggtcagagttaggggttaggagtcaacgtttagagttaggggttaagagaggttagtggtttgggattaggggttagggttgggttagggtgagggttgtggttaggggttagggttacaggttagggttaggatcaggggttggggtcagggttaggggtcagggtcagggatcagggtcagggtcaggggtcccactctgtgggttgtctatttactctgctgactgttccctttgccatgctaaagctctttagtttaattaagtcccagctatttatctttgtttttattgcatttgcatttggcttcttggtcatgaaatccttgcctatgccaatgtctagaagggtttatccagtgttaccttctagaatttttatagttcaggaattaggtttaagttcttaatccatcttgagtagatttttgtataaggtgagagatgagaatccagttttattcccctacatgtggctcgccaattatcccaacatcatcatgtgttgaaaaggtgtcctttccccactttatgtttttgtgtactttgtcgaagatcagttggctgtaaatatttgggttaatttctgggttctctcttctgttccattggtctatgttcctatttttaaaccagtaccatgctgttttggtaactatggccttattgtacagtttgaaatcaagtagtgtgatgcctccaggtttgttctttttgcttagccttggtttggctacatggctctcttttggttccatattaattttagaattgtttttgtaattctgtgaagaatgacggtggtattcagatggggattgcattgaatttgtagattgcttttaacagaatggtaaatttcacaatattggttctacccatccatgagcatggggatgcatttccattt

SEQ ID NO: 16482 - DNA, 1809 bp, Artificial sequence
  DNA replication origin
ttacaggctccagcctccagctcccccttctcctggtcctctaagccgggaacagagcagctcggcaggagatactggagagcctaaactggcgtgaggcctcctcaacatgcacatggggttacgtgggtggtttctggactacatgttctgattgggtgagagaaaacctctaggccttctctgattggactttattttcatactctgattggttgtcctaagactttctttcatccaatcagaacataacaaagtccaatcagagtaggcctccaggctttctcttatccagtcctggaacgtgtagtccaggaacggcatatgcataacttcagtacataagtggtgctgaagaagagtcaggccactccaggttcttctgtgtctgctcactgagctgctccaagcccggcttagaggaccaggacagactggaggctgtagcctgcagcactgtggcttggcctccctgcagttggtggcgacagagactgtagtgtggctggagcggtaagaaggggaaaatacttttgggatagatggaagggtaaagagggtggttagtgccaaaaggaaaaaaggatggtgagccggagaaggcattgcataaagacagtaaggaaaagatgttggggggaaaaaatggggggtagatggagggggaaaaacagggtggtgaacaggagggagagaaggtttcacagaaaggcagtggggaaaaagtttttgggtagatggaagggggtaagagagggtcgtgaggggggaacagggatgagcaggaaggagagaaggtttgcaaaaatacggtggggagaaaagaaagggaaagaagactgtgggtaaaaagattttgagtggatggaggggggaaaagggtgacaagtgggaggagaaaagagggtgcagagagggagggggaagagagagtggcgagcaggagggagagaaggttttgcgaaaagacagtgaggagagaagcttttaggtagatggaggggggaagagggtggccattgggagaaagataaagagggtggcgagtgggaaagagaaaaggttttgcgaaaagacgataggcagaaaagaaagtgtagaaagaaaagacagtgggtaaaaagtgtttgggtagatggagggggaaaagagggtagcaagtgggaggagaatagaaagtgtggccaaagggagtggggaaagaggactgggaaaaaggcgatggggaaaatagtttggggtagatggagggcaaaaagagggtggcaagcaggatagaggaaagaagagggcgagcgggaagcggggaaggctttgtgaaaagatggcagggaaaaattggggaggtagctgggttaaaagagcgtggtgagcaggagtagagaagaggctttgcaaaaagatggcgggaaaatgtttttgggtagatggagaagggaaagggtggcaaggaggaagggagaaaaagacaatagggaaacagtttttgggtagatggaaggggaaagagggtggcgagcagcaggagtggggagaaggctttgggagaagatgagggaaatgtttttggggagatgaaggagcaaaagaggatgatgagaacgggaggcggaaaaaagggtggccagggagagggagaaaagacggtggggaaaagttttggagtagatgggtggggaaaacggaagtgagtggtaaagtatagaaggctttgcaaaaagacagtggggaaaaaatggtggggaaaaagttttggggtagatggaggaagaaaaagggtggcaagagagggagccaaagacggtcggc

SEQ ID NO: 16483 - DNA, 1844 bp, Artificial sequence
  DNA replication origin
tgcatgttgaggaggcctcacgccagtttaggctctccagtatctcctgccgagctgctctgttcccggcttagaggaccaggagaagggggagctggaggctggagcctgtaacaccatggctcgtctcgctctggatggtggtggcaacagagatggcagcgcggctgaagtcttaggagggcggcctgagcggtaggagggtagtctgagcagtaggaggggggctggagcagtaagatggcggccggagcgctaggcgggaggctggagcagtaagatggcagccggagcggtaggggggtggctggcagccggagcggtagtggggtggctggcagctggagctgctcttgaccagctagaggtctaggagaaggtggggaccatgcccaatgctggcggctggagccttggccctggcggctcgcctggctgcggttggtggtggcgacggagactgcatctctgtcaagtagtagaaaggtggcagggtaggtgcgctctctgcggctgcactgcccgcttgtggggtggtgggggagtgggtttggtgtgcttttggggctgcactgcctgccgtgggtggctggtgggtggcgctatcgggtgttgaattgctggcagtggggcaggtttgctgcgctatcagagtctacactgcctaaggtggcggggggttggaggcaggttgtgtgtgctgtcgtgcactaccagcggcaagtggcggggggttaggggcattattagctgctgcactggccgatccagggggcgggttgggtgagctatcgtgagctacaatgtcagcagcaatgccaactggcaggcagtcgggggtgctttaggggagctgtcaaatgttgcattgtccgtgggggaaaggggaaggtggggtcggggggttggttgggtgcactacccctggcgttcactgcccgcgacaggagcagattgggggtgctatctggggctgtgctgcttgtggtccgggtggggggcaggtttgatggggcactatttggtgctgcaacacccgtggtggggatgggttgtggacactatcgagtgttacactgccaggagcagaggggtggtttgggggcgctatcagggttacactgcctgcagcagtctctgggtgtgttgtgggcacaatccaggggctaagtttgtggtgggggggggcaggttaggggcgctatggggggaggttgcacttctgctgccagcagtaggttgtggaggtggccacgacagtggtggcctctgaggaaggggcccttctcctcttcccggactcaaggctctagagggtgaacaatttctgctcgtgttggagcacggagggtgcacagagttttcgcagcaatcctctgaccaccgcagggccctcacacccaccatggttacccagcccttgccctcttgctctgtgttgtggagactatctgggagccccaggcatggagtagtgggcaccacggaggctcagggtcctgtgggtggaggattcaggaatgggaactggtacttgggtggggaagactggctgggtctgagtttctgctattcttgctccccaaggagccccgggcactgtggtgtctccagtccccaccccaggtcaggaggccagcttggtctaggaggagaggctggactttggagggtgggtgtgagtgcctttgctgaaactggccccagccacccagtggccagcatgacaaggtgaggctctaacactgccactttctgcatcctgttgtaggtttttctggcattgtctgcccagctactccaagccaggctgatgaaggaggagtcccctgtggtgactggag

SEQ ID NO: 16484 - DNA, 1371 bp, Artificial sequence
  DNA replication origin
agggcaatcagtacatctgtgaacttcccaacagtcctgtggtggactaacccagggacaatggtcactgtcccctctggtgcattatttgtccccatcagcctagtaagctccgggggctggcagctggcacagagtacgaggctgcactccttgacctttctatgctgcacacagtcctgtgcccatcctgtcctcagatctgccagggccatgaccaacctgccaagagcgtgggaattggtatgtgacccagctctaggaggaggtggagcaagcgaatgtaggggaagctgctcccccagtaggtttagagggagggtggggagggggtgcagaagggccaggtgggtgagggtgtgcgggtaagggtgtgggggtgtgcaggtgagggtgtgcaggtgtgggtgggggtgtgtgggtgagggtgtgtgggtgtgggtgggggtgtgtgggtgtgggtgagggtgtgtgggtgggggtgggcgggtgagggtgtgggggtgagggtgtgtgggttagggtgtgagtgcctgtctggctctcctgggtggggctggatgaatgtttgggcacaggcagcggctgtcacatggcctggctgcaggtttgggacagaagccaggcgggtgggctgtgtcaggcacagctacaaactgtgccaaggaagtggaccagagcaggggcccagggaaacctctgccttagcagaagatactggggagacgggatcaatcggggaggtcttccgaggcacatggtgcttcatggagccatggcccaggacagggagggtgtaaccctggcttgcctgattggctgagcacagacagatagaagagggtgtgggcagcccgctaggtggatgcctaagtgaggaaggaatgggtggccaggtgactgagacccccaagaccaggaccccgctgtcaggtctgtggcttccaaacgcctgtgggaagtgttcccctttggacactgaggccatcagcttcagcttcacacccttttccagaaaaagtccctcgggtaacctcaaaagtcacttctggccttccccagaggggaaaggagaggggtgcctgtgggcaggtgaccctcagtgctggtggagggcacagcagagagactgcctgtatgtgggaggcccccagcagaccttgcccagatgccagccctcatttgaggcaaactgtaaaattattacaatttaggccaggcgcagtggcccatgcctgtaatcccagcactttgggaggccatggcagaaggactgtctgagcctgcagtgagctatgactacacccctgcacttcaacctggtcaacagaggaagacactgtatctaaaataaataggcttggcatggtg

SEQ ID NO: 16485 - DNA, 2492 bp, Artificial sequence
  DNA replication origin
tggctccagcctccagcatgcagtggtgtctcttccttctcctcgtcttccagcctggcaggagaagctcccgctgctagcctccctcctaccgctccgtcaccaacaccaccaacagggaggcagcgccccaggctccaggctccaggctccaggctccagccggtgaaaactaatggacccttctagttctctaacccaggtacctagcagctggacacaccgacacagaagacccaaaaatgacgcaccacttcctcagcatgctttatatactgaagttacggatcctggactacatgttctgattggatgagagaaaaacctctaggcctactctgattggactttattttcatgctgtgattggttatcttaagacttgctctcatgcaatcagaacatgaagtctaggaaccggcatgcgcataacctccgtatataaatgatgctgaagagccgttacggttttttttttttttttagggttcggtgttttactgttgagctgctcagtgcccagcttagaggaccaggaaaaggagtcaccggccgtatgctggaggcttgagacacggcacagaggcgcagctcgcctcgctatggttggtggtggcagtggagattgcgattgcagcgcggctggaggggtaggaagaggaaaatagttttgggatagatagaggggtgggtaaagagtttggttattgccaaagggaaaaaaggatagcgaggaggagaaggcattgcaaaaagatgatggggaaaagatggtggggaaaaaaggttttgggtagatggaggtggaaagacaggttgtggagcgggagtgagggaaggttttgcagaaagacggtggataggaagtttatgggtggatgaagggggaaaagatggtggcaattggggagaggagagagtggtgaggtgggggaaatgggcgagcagtagggagagagggttttgtgaaaagacagtggggagagaagtttttgggtagatagaggagcagaagaagatagcaagtgggagaaggaaaaagagggtaactagcgggaggaagacaaggttttgcgaaaaaacagtggcagaaaagaaagatggtggagaaaagatggtaggtaaaaagtgtttgggtagatggaggagggaaagagggtgacaaggaggagaaagagggtggcgagaagggagcagggaaagaaggttgggaaaaagacgggaaaatagtttgggatagatgcagggcaaaaaaaagggtggcaagcaggataggggagagaagaggacgagtgggaagagggggcagactttgtgaaaagatggggaaattttggggggtagatggggggaagagggaggtgagcaggagtggggagaaggcttcgagaaaagatggtggggaaatgtttttgggtagatggagaagggaaagagtggcaaggaggagtaggaggaaagacaatgaggaaaacagtttttgggtagataaagggggaaaagagggtggtgagcagcaggagtggggaaaaggctttgggaaaagacggggggaaaatgtttttgcttagatgaaggaggaaaagggcatgatgacagcaggagggggaaaaaagagggtggccagggagaagggggaaaatacggtgggaaaaaacgggagaaagtgtttgggtagatggttggggaaaagcgtggtgagcgggagaatagagaaggctttgcgaaatgacgcggggtggggcggggagaaaacgaaatgatggtggggagataacggtgaaaaagtttggggtagatggaggaagagaaagggtggtgagagggagagggcgaaatgcggtcgggaaaagaaggtggggaaatggtgggggatagaagttttgggtggatttttaaaaataagattatttgtattttcacttttgagtagtttgagttctttagatattttgtgtattaacctcttgcctgatgcatagtttgcaaagactttcttccattctcgggttctgtcttcattatactgattgcttcctctgctttggaaaaggttttaagtttaatgtaattacatctttgcttttgttgcttgtgcttttgatgtctatttgaaaattccttgtcctaaccaatttcatgaagcatttatcctatgttttcttctctggtagtttcatagtttcaggtcctgtatttaaatctttattttgagtagatttttgtatatggtaaggtaatggcctggatgtattcttgtacatgtgggtgttgggttttcctagtacagtttattgaagagattgtctttcccgaaggtgtgttcttggggcctttgttaaaaatgaattgaccgtaaacgcgtgaatttatttatgatttctctattctgtttcacttgtctatgtctgtctgtctcattcgttcatctctcttgtctctcccccgccccttttattgatagtaccatgctgttttgatagtaccatcct

SEQ ID NO: 16486 - DNA, 877 bp, Artificial sequence
  DNA replication origin
agctccgccatcctgcgccagtgccagatctgcagctgcaaaccgcgcgtgtggcactggcagcagtgagggcgggtgggggaaggagcagcccctgactctgcctccatccctctccagctacctgacactagccacacagactccagggccagagcctcagcgttcagccagacaatccgcgaagccactcaggtggccgcggagtgcccttgccagcaccctatctcccttccgaggaggagcggggtgggctgcaaggccagacaggccctccttctcaggcctggctggctgcgcgcctgcgatcctggggccgcccgggcgatcccaggagaactggcgagcccatcggcgcctgcccagagctgcagccccacctgccggcgcgcgccgccagggagcggtttccgggagccgggcagcaaccgcggtgcaggcgcgcgccaccagggagcgtcttccgggagcctggcagcaaccgccgtgcaggcgcgcgcccaacggctttgcgaggctcactcggtctgagaggtcggaggctgcgagtgttgctgctgaaggctgtggtggactgggctggatcgaggattgtggagtagatcatagatttgaaatagcggatttggggttgtatcggggctttggggttggataggggatttggggctgggtcggccggggtcggggaggcgggtggtgaaaaggtgacaggcagctgccctcgctcaagagccggtggttgggggtctgagaagaagtcaccactatgaagttattcggcttcgggagccgcaggggccagacggcccagggctccatagaccacgtctacacgggttccggataccgaatccgcgactccgaactgcagaag

SEQ ID NO: 16487 - DNA, 2191 bp, Artificial sequence
  DNA replication origin
aaatttcttccttttggctgggaatgcttacccaatgtctctacaatcattgtaccttggaagtagttaacttgctttgtatttcagaggctcgagcagaagggatggcagccttgtctcagatgagactgggctttggacatttcagtaaatgctggagtgagttaagactttgggggactgtagagaaggcatcattgtattttgcagtgtgacaaggatatgagatgtggggggacctgggtgagaataatatgatttggccctgtgttcctaccaatactctcgtggaattataatggggaatgttaaaggtggggcctggtgggagatgatttaatcatggagaagagtgggggttggaggtgggggagtggggacaataggagagattattttgtgggtgggggtgaaaaatgaggggggacggattcttcacaactggtgaaacactatctccttaatactgtctgcgtgatagtgagttctcttgatgattatggagcttaaagattgagtgaatattgtcctgctggggtttggactgacatttttgtatttttctggggaattttttccctttggattgagaaaccttacttaatgctggtactatcattgtatcttgaaagaaaagaaatgccttttgaactcagggactcataggccgaagggactgtagccttgtctcagatgagactttgaattttttatatttggaatgagttaagaattttggaaacttttgaaaatgcatgactgtgttttgctgtgtgagaaggacatgaggttctggggtatctgggtcaaataatatggattggctgtgtgtccgtataaaactcacatggaattgtaatccttaattttggggcctggtggtaggtgatttaatcttgaatgggagggggttcggggtggtaggaaaaggaggggtagggtggggaggagtaggttgtcagtagggtggtaggagggtggggggtactaggaagggggagtagccttctgcagaggcagaggctcatggaaaacctctactagggcagtgcacctgtggctttgcaggctttagccccatggctgctctcatgggctgggctggtgttgagtgcctgtagcttttccatactgagggtgtgagctgttggtgggcctatgaatctgggatatggaggatggtggcctcctttttgggggctccaagcccatattttccttctgcactgccatagtggaaatttctcaagaggcttggcctctgcaggaggcttctgcctggaaacagtgggcggtggtgtgggtgcaggatcttcttgatgctgatctcctgatagtgagatctcatgtgatctggttgtctaacagggtgtggtacctctttcctctctgtgtcttgctcctacccctgccatatgaaacatctcattgccacttggccttctggtatgattaggaagggcctggtcagtgtgggcctggtcagtgaactagtcagttgggacttggtcaatgaggcctatttactgggggaatggtcagccagggtctgcttagagagggtctcattagagggatcgagtagtgcaggtcttgttgagtggggacctagtggcagacaaatgtttggtgtctggtcagtgcaaacctgggctgcagggcttggtgagtggagacctggtcagctgtggcttggtggtagccttgtcagaatgggctgggtcactggtgacccggtcaaggggtgctattcagtggaggcctggtcacatgggacctagtcagcagggcatgtcctcatcagtgaggcccttgtcagtgggaccctggtcacggcagcctggtcaggtcagtggaacctaatcagtgggggcctggtcagagaggacttgatcagtggtggcttttgtagcactggtctatggggtgacctgggcaacgggggtctgagcggtacatgcctgttcagtggtgcctagtcactaggtttctggtcaggggcatctggtcaccgcaggcctggttagtaggggcctggtcactggcagcctgttccctggagacctggtcagtggggcttcatctgtggggccaggcaatggggtcatgattgatggaatgtggtcagggaggccttgtcagtaaggccctggtcagtgaggccttgtcagggaggtcttgtcagtgaggc

SEQ ID NO: 16488 - DNA, 1448 bp, Artificial sequence
  DNA replication origin
cttgagaatgcttgttatagattgaaggctggtaaggggttgggctcctctttcttcttcctggtgccagagtgctcccacatgaaggaataggaaaggaagatgcaaagagggaaatccttcgaacacatgaagacacaggaagaggcctcttagggctccaagggctccagggaagcagctgcagaggttgggtggggtgaggggccaggatccactgaccctggggccaggcaggaatcactctgttgcctggggctcagaaggcagtatcacccatggttcctgtcattgctcatgtattttgcctttcaacaattattgtccacctactgtgtgcaggccctgcctggacactggggatgcacagtggatgcactgggctctgcctttgagggttgcagtttaatgggtgacaggtaattataaggaagaaggtgagtgcagagtgggaggcttggaggctgtggggcttggggtgggggagctcacatccagcctctgggccaaggccaggaggcttcccagaggaggagacagagcagggtattgtggtggggggtgtcctttttgggtctgggatctgcactttacagtttgaggggatgagcagaggaggctgggcttcattctggagatggggacatggtgaggtgaggtttagaaagcacacctgagccgcagtgtgtaggatgctggaaatggtggagatgggcctgcaaagagagtgctgggaagtgatgacccaggagcagcagccgggcacctaacaatgggtcagcaccgtgggcgtggagacaagggccgggattgatcaatacccaagaagtacaatgtacaggacttgggctccatttggatggagtgggtgagggaggagtcagaaatggcttccggtttccagcttgggcctggggattggagatgtccccactgagagtagggcacaagtgaggaaatggtttggagaggaagatgataagttacatcatggatgtgctgagtctgagttgcctatgggacttggaatggggggtggcaaaaggtgtgtgatcttgagcaagatattcaactcttctgggccttgggcttctcatttgtaaaacggtgataagaatattacttcccatttgtgttgctgtgaatattaaatgcgctaccacatgtaaaatgttgagaatcatttctagctcagagtaagtgctcaataaacacaattatgccttttatatggtctggagctcagaagtggaagacagggttttgtgaagtcatggctttgtggatgtagctagattgtggagtaatggcaggagggtcgggggcatggcacaaggtaggttgtcaagagacactggacacaacccaaatgtccatccacaggggaacagatacatagactgctgcacaattgcacataatagaatcctctacaatagcaaaaatta

SEQ ID NO: 16489 - DNA, 1269 bp, Artificial sequence
  DNA replication origin
cggtgcccactctttcagctggggcaatgctcatcacactgcatagtaattgctcagttaggccaggcacagtgtctcacgcctgtaatcccagcacttgccgaggcgagctgatcgcttgagcccaggagttcaagaccagcctgggcagtatgacaaaacctcatctctacaaaaaaaaaaaatacaaaaattagtcaggtgttgtggtgtacgcctgtggtcccagctaatggagaggctgatgtgagaggattgcctgagcccagaaggcagaggttgcagtgagctgagatcacaccactgcactccagcgtgggtgacagagcgacaccctgtctcaaaaaaaaaaaaaaaaaaaaaaaaagcttaattaattaacggtttttcttcctaagggctgggatcataccagtttgcttcactgcagtgcctgaacatagtaggcacagtagattcaataaatctttggttccttggctggttgttgcctgctctgtgctgatgagaaaggagccaggcttccaggattctcttggtgttcttggctccctgctctgtctacctctcccctgcctctatggtaccttcccaggactgtctttgggctgctgcttgcattggtagggtctcttcttcagggctgaggaggctggtcatgtgataatgagacccctatacgatgctacatgggagctggagttggatggggccagtggaatatccgcacaactctgcatccccctccatctactcatccctggttttgtttctctggggtaaggaatagagcaaggactgggctgggtgagctatgaacagagggtctcagctgaaaagtggaagatgttttattccatgcctggacgtctctcattccctctgcttactttttgctgctgtgaggtcaggggaatttaggagccctgaggaatactgctgctctccctagcagggtgaggtgaccctccactggctcccatccaaccccacctcccatgctggaggtaaccacagaagaggagagagaagtggacagagcagaaatacaagaacaccaagagaatcctggaagcctggctccttcctcatcaccacacagcaggcaagacacagtaagcaacagataaccaccaaccagccaatgaactcaagatttcttgaatctactgtgcctagaatgttcagtcacttcagtaaaggacactggtacaatccagcccgtgggaagaaaagcaatcaattgagcaattactatgcagtgtgatg

SEQ ID NO: 16490 - DNA, 1075 bp, Artificial sequence
  DNA replication origin
gggcaaaaagccgcggaggcaaaaagccgcggcgggcagaaaggcgtggcggcggggggcaaaaagccgcggcggcggggggcaaaaagccgcagcgggcagaaaggcatggcggcggggggcaaaaagccgcggcgggcagaaagccgcggcgggagcgcaaaaagccgcggcgggaaaaagctacggcggcaggggtgcaaaaagccacggcggcgggaggggggggcaaaaagccgggtcgggcaaaaagccgggtcgggcaaaaagccgcggcggcagggaactaaaagccgtggcaggcataaacccaaggcggcgggggggcaaaaaaccgcggtggggaaaaagccgcggcggtgggggtgcaaaaagccgaggcgcgcaaaaagccgcggtgttggggtggggggggggtggcaaaaagccgcggcggcggagagcaaaaagctgcggcgatgagggtcaaaaagcctcggcggcggggggcaaaaaagccgcggcgacacggggcaaaatagtggagatggggtagaaggccagcacaggttggctttgctggagtgtgatgtgataggaaatgtgcagccaaagacaaaaaaagatgtaagtaggcttgactcattgcagccaagaacccagatgttatcttgagggttttaactaataagcagtttaaatcagaatggcacattctgatttgttttttgtatattcacatttggcaggcatagataccgtttgaagagaaaaaagtcagtagatagaggtaacaaacttaaatatgtgccgagtctagaaacaagagactagggggataaggacctttcgaaataaaatgcaagatttgaaaactgattggctgggggatgaggaaaaggcaggtctttaagatcaatccctgttttgctttaagttgttagggggtggttttatcacatattgtagaatacgtcatttcagttttgaacatcttgagttaaatcgtcctaacatatcttatgaatttgattttcttccctgggaagctaatatttcaaacacttaaagagtatatagatttccaacttgtatc

SEQ ID NO: 16491 - DNA, 930 bp, Artificial sequence
  DNA replication origin
aaaaagcagcggcggcgggggcaaaaactgcggcggcaaaaagcctcagcggcaggagcaaaaagccatggcggcgggggcaaaaagccgtggcagcaaaaagccacgggggcaaaaacccgtggcggtgggggtaaaaacccgtggcttcggaggcaaagagccgcagcggcaaaaagccgtattggcgggggcaaaaagccgcaaaaagccgcggcggcgggggcaaaaagccacggcgccaagggcaaaaagccgtggcttcaggggcaaagagccgcagcggcaaaaagctgcaaaaagccacggtgacgtggggcaaaatgccatggcggcgggggtaagaagccacggcggcgggggcaaaaaccgcggtgggagaaacccgcagtggcgggggcaaaaagccgcggtagtggtgatgaaaagccacagcggtgggggcagaaagccgtgaggcgggggagaaagccgcagcggcgggggcaaaaaggcacggcggcgggtgcaaaaagaggcaacaagccccggtggtgggtcaaagagccgcaaaaagccccagcgttgggggtaaaaagccgcggcggcggtggcaaaaagcagcggaggcaaaaaacccgcggcggtagcggcaaaaagccgcggtggcaggggaacaatagtggaaatggggtagaaggccaacggagcttggcattcctggacggtgatgtggaaggaaaagtgcagcagaagacaaagatgtaagtaggcttgactcagtgcagctaagaactcagatgttatcttgatgttatctatcagctaattttttgtattttagtagagaaggggttttaccacgttagccaggattgtctggatctcctgacctcatgatccacgcacctcagcctcccaaagtgatgggattaaaggcatgagccacaa

SEQ ID NO: 16492 - DNA, 1394 bp, Artificial sequence
  DNA replication origin
ggaggtcaagtcagactgtggccacagcggcaccacgaggccaagaaccggcactcagcctcaacgccatggatgcagggtgccaagtgccaggtcctgcactctgggcatgggtcaggagcagctggcaagggcagcgcagcctgtcgggccctggggcatggccggccgcagctccgggaagccactgcagctctgggaagccacgttggcccacagacactgcagctgcagccgccaccagcacatggagcaggggtcgctgaggattgggaatccgtgaccaggcgagcgcctccagccgcgcggaccccggggccagcccggcctcagcaagtcaggtagtctgcggcaggagcgccgggcatgggttttggcccgcggtgcaggaggcatgcacactctggccagatgggcggtgcactcagggcccaggaggccatcccaggggaaccccgccagcctctgccagagcccgagctgcagctgccacctgcaagtggtgcactggctgcagcggtggcaacccctgatcccatcctcccacctcacttccatcagcgcagaccccacgggtgacgtagtgacgaagtagggctgtgggcccagtggcagcaccaggcggagaagcaccactcaatcccatccctgggctgcagagggcccagcgtggggggctccaagcatcgggagccagtggaagaggagaagagcgcgtgggcgacagtcaaacaggccctggggcagggtgtgcctcatgctccagggagccccgccagcccgaggcacctgagcagaaatcgccgcctgcactgggcgccacgagagagtgttagggccgtttctccacctcgggcctgttgcgcggggccagctaaggtgcacatgctcactggtcctaaccattctgttgggcatttctgctgagaggcgggcagtgctgagtctgtgcaaaggtccatgggcagactgcattgcttgttgttgtgcttcggaggtggcgatccccgaaggtgagctgaaatatggctggagcgttcccaggctacaatttgcagtgacaattatggaagatgagccggagtggtggcccaccctcagggagcacttgtgttcggatggcttctcatttccccagtaccacattaaatcatctcatctgaggaggatccacagagctgtcttctgtggtaatctggagaaagtgaactacctttgtctgagtagttgtcgaccttgtttccacattaactggctgttttgttgtggctgcacttctgtttcattaccttcatcttgcaggacggagtcttggctgcagactcagcctgtacctcacccgtctcccaccgactcttggtactggccatggccatgctgggcagctctatgga

SEQ ID NO: 16493 - DNA, 1068 bp, Artificial sequence
  DNA replication origin
aaaataagtgttttaaatttattgagacctgtctcagataccctttggtttacaacctgatggaggggttggcattgatagaagggttttgggtttccagcacctgccttcatgccttacttctcggtgggctcaggactcagaatggaaaagagtcccaggagaccccagtaactcttcaactcttttactctcactgttttctctcctttacagcagacaccactatctgcaaagggtcctgttcgctgctcctgcctgccagtaagcacagcctagatggcagtgtccatgactgtcctgagtaaccactgggtccccagcatctcagcttcacagctgttctgtaaagaccttcagacggagggatgaggcaggtgggtgggtggatggatggatggatgcatggatgtgtgggtgggtggattgatggatggatgcatggatgggtggatgggtggataggtgagtgggtgggtggatggatgagtgggtgcttgggcaggtatgtggatagatggaagtatgggtagatggatgggtggatggatgggtcaataggtggatgggtgggtgggtgaatggatggatggatggatggatgagtggatggatgcatgaatggatggatggatggtggatggatgggtgagtaggtggatggagagatgggggaatggatggatagatgaacaaataagtgatggatgggtgggtgtatgtatggatgggtgggtggatgggtgggtgggtggatagatggatatgtagatgggtggatggataagtggatggatgggtgaatgggtggataagtagatgaatgggtgggtggagaaatacatgagtatgtggatgaataggttacagagtaaaatgccaccaccagagcagtgcaacagtgtgctttgcactcagctctgccatggaaaaagtggttccttcccaggctctcaccaggctcacatgggctccagacccctgcacccccaaccagactggggacacagggaccatctgctcagctctgcatccatgcacctggtcaacaccaagtgagtcacaggg

SEQ ID NO: 16494 - DNA, 1285 bp, Artificial sequence
  DNA replication origin
tggatggatgggaatagatggatgctgaatgggtgggtgggttgatggatggatggggatagatggatgatgaatggatgggtgggtgggtggatagatggataatgaatgcattggtaggtggatgggtggatggacggatgggtagttggggtggatagatggatgggtagatggggtgaatggatggatgggtaagtggatggatggatgggaatagatgatgaatggatgagtgggtggatgggtagatggatggggatggattgataatgaatgaattgataggtgggtgggtgggtggatggatggataggtggatggatggatgggtaggtggatgggtagatggggatagatggatgatgaatggatgagtgggtgggtggattgatggggagggattgataatgaatgaattgataggtggatgagtgggtggatggatggatggatggggatggatggataatataagaattggtaggtgaatggatggatggggtagatggataatgaatggattggtaggtggatggataatgaatggattgataggtagatacatggatggatggacagggatgaatggataatgaatggattggtaggtggataggtggatgagtggatagatggatcgataatgattgatggatggatggatggggatggatggatagataaatggattggtaggtgaatggacaaatggatggatggatgagtgggtagctggatggggaatgagtgggtaggtgggagaatggatgatggatggatggatggatggatggataaatggagggatgcatgatgaatttctcccttgttcccagcctagtcctagaatatgttgcctattctcaaaaataaggtaccacaaagcctctggtgatggtggagcaaaggaatagatggtgaatgtctcatacccacttcggatccagaacaggcctaggagagactcaggtgggatctgctgctgaggaagggggttggggctgaagttggaggaggagggcagctctaaaccacctcttcctggctctaggcctctcaggccagacagcccccacccgtttctgcagatgcccgcatcatggtcctgaggggatgggggctggcctggagcctttccaccgtagtgtgtggctatagcggggacgtgaagggggtgtgttggggacgtagtgaccactcccttctactgtcagagatcctgcttccccctgccgcctgcccctcctcggctgcccttcataaccccccacccactccccac

SEQ ID NO: 16495 - DNA, 855 bp, Artificial sequence
  DNA replication origin
taggttttgcccaaagtccttgatttaagcccttgagtgttggttggctgacttagctttggattgtggtccactgagatcgctggatctttttaagctttagagttatgccctgccatgtggatgcaggtggaggaaggacttctcagtgtgacccatgagaggagtagctctcctgggccccaggccccaggctgcatgtgtatgggagggaggaggagaagcaaggaaaggaggagagacagaagtatatactgagctggtatttgggggaagggttggcgggtggggagaagggaagagaggagtctgggccaaggccagatgtgtctccctggggagtcctcagagcgggcagccggacgtcgctccatccttcccgcctgacggatgggtctgctgcgcaggcacaagctgtcgggccaggccctgccaaggcagaacagtggcgcttctgtgcacgctgctccgctccgctcaggaggatggggcccgcccgggaagccagggagtgatggagaaagcagacgtcccagaacaggagccagggggtcacagaagcacaactgcctcccgaaacaaggggccacaggatgaggtgggaggggacagggaatcaacgcgggggagcgtttgggggaagtgttggtcgaaagaagagaggcagaaggatgcgcgctgaaggagcctggggatgaagagctagatgatttggccacaagccccctcacctttaagaacaaagcttcctgcattcagttgcagagttttgtttcccggtcagatgctcagagaccttccaacctgtcccccacccctcagccttgcccatctccacgggcatcttccgcgccc

SEQ ID NO: 16496 - DNA, 946 bp, Artificial sequence
  DNA replication origin
aggccattatacagaagggagaactgagactccaggagatgggtggcttgttcagaatcacagaagcagcgtggatccaagaagggatctgttcccaaacagaaaccagtgtcttgggagagtgagagcagaggaagcccgcacctctgccctaacctgaggctttgcgcctcccgcaaagccgagtgagttgagagcgcccagaaggcagacgctgcggagggagagactcctgggctagccaaacagcagggcctcgggcaagagcgtcacctgcgcgtcctcattctgcgattactgtcaggggaccatccatcagcgccgccctggacgctgggccagactgcccgccgcccgcaccgacagggtctctccagatcgcattagcgtggggcgagggctcagtgcggcactggctgctgagggagaggcgtggtggggaggggggcggggcggggggacggggacatcgcggtggggccattgcaggggcaggggagtggctgctttaggaccctcctccttttcttccaatctcccgcctctgggatctaaggtggatgaaaggggcactagaatgggcggcttttggggggcagggggtgcagaacactgaaggcatcagggaaggatagtgatgggggcagttatcagaagcagagaggaagaaatacctgtaaaggggaaagccagagaaattgtctggggaggggagagactgaaaacgggggtgcagagattgggggttagtggaagaaaaagacttaaagggaaaggaaaagagaagctgtagagggaaagagaattggcaaggaattgacgagagagcagggaaacaggaaaccacagatcgtcaggggctgacaaaaccttagagacaatctactgcagcccctcattctacaaatgaagaaatggaggcccagagaggggaatcccttctcca

SEQ ID NO: 16497 - DNA, 695 bp, Artificial sequence
  DNA replication origin
ctgatctacagaacaactctataaggtcagtgggtatgtctattttatggatggctcagagaggttaagtaatttgcccaagtttgtacaactagcgagtgtcagatcagggacttgaatcacaaacccatgcttttaacccctgtggtacactgcctctcactttctcagggccagaagggaagggcttcaggtcaaccatatgaagtgcctacggaatgtcttggggaaggaaagaagagagaagcaaggagaagtatagggaagcagacaagggctacagatgcatagggcatggagggcagaatggtggctgggaaagactgaagagggtttgtagggctaagaggaggtacctgaaggagggtgtggtaagccaacacgtgcatgggaagggggcagtggctatggagatagctggggagtgggggaatggggtccaggagtgggtgccggcagttggaacatccagaacagtgagcagtgcccatcgtggactgggtggttggggagtgggagggacctcgtgtcagaggaggggtctttgtgagcatgaagtagtgaggaatgctccaccatgaatactaagggcaagaagagaaagggccagaggggaatgggtgatgtttagctgctggggtgattaatgggggtgaacggagggtgaaactcaagcccttccaatgaagatggtg

SEQ ID NO: 16498 - DNA, 1023 bp, Artificial sequence
  DNA replication origin
atgccatttctaaaaggaggaaggggagaggaaagtccatctcttggggtcttgtagaaaatgccaaagaccaaccaagctaaattattgtgtccctgtagatctatttgcctatttacgtacagcaggctgtgggggtggggggtgagggaaggccgggaataaacgaccaggatggagcgggctggcaggagagaaaatgcgccccccactctttgcgggaacagccaacgggcctcctcagctcgcagctcaagcggccgcgcggcgggcctgtccggggccgggggccggggccggcctgggggaggggaggcgggggcgggaggggaggcggaggcgggccctccccgggcgctgtgaactttagctgggccgccgcctgtcagcgccagaaagcgttaaaggtgcagcagcccgcgccagcctccgcagccgcctttgtacgagtgatttatgacttcagtcttggttcaccaagagttcacacggctttcgctgctgttgaaggttaaaagatggtcttcgcttgacaagttggactattgaaaattccttcttcttcttcttttttttttattttagaagcgaagagcagaggctcaggagagaaaaacattggggagggggcgggggacaggggttgcaggtgggccaaaatggtaagtcaggaaggtttgtcttcctatatttaggattttttgttgttaggatttgcgtgcgtgttggggagagggtagagaataagagggagctaggcaagagatgtaaagatctctcatatttagaggccaaaggagtgaaaaaaaaacttgcttccacagttaattatctgggtaacttgggtcacaccccctaactgatcctcctctagagaccggaaatgggccaggtaagggagagagtttgggtaaagggtaaggtttgtgtgcttctcactgggtgtacttgatcatccaccttacctgggtaactactttttttttttttttttttttttttttggaaatggggtccagctct

SEQ ID NO: 16499 - DNA, 934 bp, Artificial sequence
  DNA replication origin
tccaggagatgggtggcttgttcagaatcacagaagcagcgtggatccaagaagggatctgttcccaaacagaaaccagtgtcttgggagagagagagcagaggaagcccgcacctctgccctaacctgaggctttgagcctcccgcaaagccgagtgagttgagagcgcccagaaggcagacgctgcggagggagagactcctgggctagccaaacagcagggcctcgggcaagagcgtcacctgcgcgtcctcattctgcgattactgtcaggggaccatccatcagcgccgccctggacgctgggccagactgcccgccgcccgcaccgaccgggtctctccagatcgcattagcattagcgtggggcgagggctcagtgcggcactggctgctgagggagaggcgtggcggggaggggggcggggcggggggacggggacatcgcggtggggccattgcagggcaggggagtggctgctttaggaccctcctccttttcttccaatctcccgcctctggcatctaaggtggatgaaaggggcactggaatgggcggcttttggggggcagggggtgcagaacactgaaggcatcagggaagggtagtgatgggggcagttatcagaagcagagaggaagaaatacctgtaaaggggaaagccagagaaattgtctggggaggggagagactgaaaatgggggtgcagagattgggggttagtggaagaaaaagacttaaagggaaaggaaaagagaagctgtagagggaaaaagaataggcaaggaattgacgagagagcagggaaacaggaaaccacagatcgtcaggggctgacaaaaccttagagacaatctactgcagcccctcattctacaaatgaagaaatggaggcccagagaggggaatcccttctccaaagacccactcca

SEQ ID NO: 16500 - DNA, 829 bp, Artificial sequence
  DNA replication origin
ggctttggtgggcctagagcgctagggactggcacgcaccagcactgaggggcaaagcgggcgcagtcaggccctccaccccgcgtcggcacgcggtcttaaatattaccccggagttttcaattatctctccttaatggatttgcaggggctctttcatcaagcgcggggtggctgggtgtgggggtgcggggagcgcgcggcgagggctggagctgggaaaatggcccatatttcaatattaaagccctttacgatcgtcagcagcatgaaagatgctgcaaattaaacggagccgcccgcgccagcctctccatctcgcaagttttaattaacgctgagggggaggcggctgacgggcgggtcggagccgggccagcggcggatctgggagcctgcggatcccagattccgaactggagcgtcagggatctagcgggccaggccaggcggaggcggagggtggtgggctccgagtcccgggcgagggcgcggaagatgcccgtggagatgggcaaggctgaggggtgggggacaggttggaaggtctctgagcatctgaccgggaaacaaaactctgcaactgaatgcaggaagctttgttcttaaaggtgagggggcttgtggccaaatcatcgagctcttcatccccaggctccttcagcgcgcgtccttctgcctctcttctttcgaccagcacttcccccaaacgctcccccgcgttgattcccggtcccctcccacctcatcctgtggctccttgtttcgggacgcagttgtgcttctgtgaccccgcggctcctgttctgggacgtctgctttctccatc

SEQ ID NO: 16501 - DNA, 1367 bp, Artificial sequence
  DNA replication origin
ggtggatggatgagtggggggatagatggatggggatggatggataatgaatgaattggtaagtggatgggtgggtggatggatggatgggtggatgagtgggtggatggatggatgggaatagatggatgctgaatgggtgggtgggttgatggatggatggggatagatggatgatgaatggatgggtgggtgggtggatagatggataatgaatgcattggtaggtggatgggtggatggatggatgggtagatggggtggatagatggatgggtagatggggtgaatggatggatgggtaagtggatggatggatgggaatagatgatgaatggatgagtgggtggatgggtagatggatggggatggattgataatgaatgaattgataggtgggtgggtgggtggatggatgtatgggtggatggatggatgggtaggtggatgggtagatggggatagatggatgatgaatggatgagtgggtgggtggatggatggggagggattgataatgaatgaattgataggtggatgagtgggtggatggatggatggatggggatggatggataatgtaagaattggtaggtgaatggatggatggggtagatggataatgaatggattggtaggtggatggataatgaatggattgataggtagatacatggatggatgtacaggaatgaatggataatgaatggattggtaggtggatagatggatgagtggatagatggatcgataatgattgatggatggatggatggggatggatggatagataaatggattggtaggtgaatggacaaaaggatggatggatgagtgggtagctggatggggaatgagtgggtaggtgggagaatggatgatggatggatggatggatggatggatggatggataaatggagggatgcatgatgaatttctcccttgttcccagcctagtcctagaatatgttgcctcttctcaaaaataaggtaccacaaagcctctggtgacggtggagcaaaggaatagatggtgaatgtctcatacccacttcggatccagaacaggcctaggagagactcaggtgggatctgctgctgaggaagggggttggggctgaagttggaggaggagggcagctctaaaccacctgttcctggctctaggcctctcaggccagacagcccccacacgtttctgcagatgcccgcatcatggtcctgaggggatgggggctggcctggagcctttcccccgtggtgtgtggctatagcggggacatgaagggggtgtgttggggacgtagtgaccactcccttctaccgtcagagatcctgcttccccctgccccctgcccctcctcg

SEQ ID NO: 16502 - DNA, 1045 bp, Artificial sequence
  DNA replication origin
caccttgggcacatgtcgtcaaaacctcctgaggctgtgtcacaggcccttacttcaccttggcaaaataagtattttaaatttattgagacctgtctcagataccctttggtttacaacctgatggaggggttggcattgttagaagggttttgggtttccagcacctgccttcatgccttacttctcggtgggctcaggactcagaatggaaaagagtcccaggagaccccagtaactcttcaactcttttactctcactgttttctctcctttacagcagacaccactatctgcaaagggtcctgttcgctgctcctgcctgccaggaagcacagcctagatggcagtgtccatgactgtcctgagtaaccactgggtccccagcatctcagcttcacagctgttctgtaaagaccttcagacggagggacgaggcgggtgggtgggtggatggatggatggatgcatggatgggtgggtgggtggattgatggatggatgcatggatgggtggatgggtggataggtgagtgggtgggtggatggatgagtgggtgcatgggcaggtatgtggatagatggaagtatgggtagatggatgggtggatggatgggtcaataggtggatgggtgggtgggtgaatggatggatggatggatggatgcatggatggatggatgagtggatggatgcatgaatagatggatggatggtggatggatgggtgagtaggtggatggagagatgggggaatggatggatagatgaacaaataagtgatggatgggtggatgtatgtatggatgggcgggtggatgggtgggtgggtggatggatggatgtgtagatgggtggatggataagtggatggatgggtgaatgggtggataagtagatgaatgggtgggtggagaaatacatgagtatgtggatgaataggttacagagtaaaatgccaccaccagagcagtgcaacagcgtgctttgcactcagctctgccatggaaaaagtggttccttcccaggctctcaccaggctca

SEQ ID NO: 16503 - DNA, 1346 bp, Artificial sequence
  DNA replication origin
atgtggtttgtatgtgtgtgtggtttgtgtgtagtttatgtgtgtgcactttgtgtgtgtatagtttgtgtgtgcagtttacatgtgtgtactttgcgtgtgtggtttatatgtgtatgtagtttgtgtgtgtagtttatgtgtttgtgtatagtttgtgtatgtggtttatatgtgtgtgtgtagtttgtgtatagtttatgtgtgtgtactttgtgtgtgtggtttatatgtatgtgtatggtttgtgtgtgtactttgtgtgtgtggtttatatgtatgtgtatggtttgtgtgtgtactttgtgtgtgtggtttatatgtgtgtgtggtttgtgtgtatagtttgggtgtactttgtgtgtgtttttatatgtgtgaacagtttgtgtgtgtagtttatgtgtgtgtgttttgtgtggtttatgtgtgtgtgtggtttatgtgtgtagtttgtgtgtgaatagtttgtgtatcatttatatgtatgtgtagtttgtgtgtgaagtttatgtgtgtgtagtttgtgtgtgtggtttatgtatgtgtgtagttcacaggtgtaggtgtagtatgtgccgtgtgtgtgcatgtgggtgatttgtgtgtgtatagtgtgtagtttatatgtgcatgtatagtgcatgtatgatttgtgtgtataggttgtgtgtgtagtttatgtgtgtgtaatttacatatgcatgtgtagtgtgtctgcctgtgtgatttctgtgtgtagtttatatatgcctgtgtagtgaaagaatgtgtgatttttgtgtgtatagttgacgtgtgtggtgtgtgtgcgtgtatatgatttgtgtgtgtgtggtttacatgtgcgtgtatggtgtgtgccgtgatttgtgtgtgtgtgtattatgtgtgtgtatgatgtgtgtgatatgtgtgtgtgtggtgtgtgtgatttgtgtgtgtggtccccatgtgcatgtgtggtgtgtctgatgtgtgtggtttgtgtgtgcggtttaagtgtgtgtgtagtgtgtgtgatttgtatgtggtttacatgtgcgtgtatggtgcatgtggtgtgtgattgtgtgtggtttacatgtgcatgtgtggtgtatctgatgtgtgtgatttgtgtgtgtggttcacgtgtgtgtggtgtgtgattgtgtgtgtggtttacatgtgcgtgtgtggtgtgtctgatgtgtgtgatttgtgtgtgtggcttacgtgtgtgtgtggtttgcatgtgcatgtgtggtgtgtgtgtgtccccttacacccccttctcacccacctgcagacgccctcggcgctgcacctgccacactgagcagcctgtctgtcctcccgtgctc

SEQ ID NO: 16504 - DNA, 1795 bp, Artificial sequence
  DNA replication origin
gctccagcctccagctcccccttctcctggtcctctaagccgggaacagagcagctcggcaggagatactggagagcctaaactggcgtgaggcctcctcaacatgcacatggggttacgtgggtggtttctggactacatgttctgattgggtgagagaaaacctctaggccttctctgattggactttattttcatactctgattggttgtcctaagactttctttcatccaatcagaacataacaaagtccaatcagagtaggcctccaggctttctcttatccagtcctggaacgtgtagtccaggaacggcatatgcataacttcagtacataagtggtgctgaagaagagtcaggccactccaggttcttctgtgtctgctcactgagctgctccaagcccggcttagaggaccaggacagactggaggctgtagcctgcagcactgtggcttggcctccctgcagttggtggcgacagagactgtagtgtggctggagcggtaagaaggggaaaatacttttgggatagatggaagggtaaagagggtggttagtgccaaaaggaaaaaaggatggtgagccggagaaggcattgcataaagacagtaaggaaaagatgttggggggaaaaaatggggggtagatggagggggaaaaacagggtggtgaacaggagggagagaaggtttcacagaaaggcagtggggaaaaagtttttgggtagatggaagggggtaagagagggtcgtgaggggggaacagggatgagcaggaaggagagaaggtttgcaaaaatacggtggggagaaaagaaagggaaagaagactgtgggtaaaaagattttgagtggatggaggggggaaaagggtgacaagtgggaggagaaaagagggtgcagagagggagggggaagagagagtggcgagcaggagggagagaaggttttgcgaaaagacagtgaggagagaagcttttaggtagatggaggggggaagagggtggccattgggagaaagataaagagggtggcgagtgggaaagagaaaaggttttgcgaaaagacgataggcagaaaagaaagtgtagaaagaaaagacagtgggtaaaaagtgtttgggtagatggagggggaaaagagggtagcaagtgggaggagaatagaaagtgtggccaaagggagtggggaaagaggactgggaaaaaggcgatggggaaaatagtttggggtagatggagggcaaaaagagggtggcaagcaggatagaggaaagaagagggcgagcgggaagcagggaaggctttgtgaaaagatggcagggaaaaattggggaggtagatgggttaaaagagcgtggtgagcaggagtagagaagaggctttgcaaaaagacggcgggaaaatgtttttgggtagatggagaagggaaagggtggcaaggaggaagggagaaaaagacaatagggaaacagtttttgggtagatggaaggggaaagagggtggcgagcagcaggagtggggagaaggctttgggagaagatgagggaaatgtttttggggagatgaaggagcaaaagaggatgatgagaacgggaggcggaaaaaagggtggccagggagagggagaaaagacggtggggaaaagttttggagtagatgggtggggaaaacggaagtgagtggtaaagtatagaaggctttgcaaaaagacagtggggaaaaaatggtggggaaaaagttttggggtagatggaggaagaaaaagggtggcaagagagggagccaaaga

SEQ ID NO: 16505 - DNA, 1799 bp, Artificial sequence
  DNA replication origin
ccacgtaaccccatgtgcatgttgaggaggcctcacgccagtttaggctctccagtatctcctgccgagctgctctgttcccggcttagaggaccaggagaagggggagctggaggctggagcctgtaacaccatggctcgtctcgctctggatggtggtggcaacagagatggcagcgcggctgaagtcttaggagggcggcctgagcggtaggagggtagtctgagcagtaggaggggggctggagcagtaagatggcggccggagcgctaggcgggaggctggagcagtaagatggcagccggagcggtaggggggtggctggcagccggagcggtaggggggtggctggcagctggagctgctcttgaccagctagaggtctaggagaaggtggggaccatgcccaatgctggcggctggagccttggccctggcggctcgcctggctgcggttggtggtggcgacggagactgcatctctgtcaagtagtagaaaggtggcagggtaggtgcgctctctgcggctgcactgcccgcttgtggggtggtgggggagtgggtttggtgtgcttttggggctgcactgcctgccgtgggtggctggtgggtggcgctatcgggtgttgaattgctggcagtggggcaggtttgctgcgctatcagggtctacactgcctaaggtggcggggggttggaggcaggttgtgtgtgctgtcgtgcactaccagcggcaagtggcggggggttaggggcattattagctgctgcactggccgatccagggggcgggttgggtgagctatcgtgagctacaatgtcagcagcaatgccaactggcaggcagtcgggggtgctttaggggagctgtcaaatgttgcattgtccgtgggggaaaggggaaggtggggtcggggggttggttgggtgcactacccctggcgttcactgcccgcgacaggagcagattgggggtgctatctggggctgtgctgcttgtggtccgggtggggggcaggtttgatggggcactatttggtgctgcaacacccgtggtggggatgggttgtggacactatcgagtgttacactgccaggagcagaggggtggtttgggggcgctatcagggttacactgcctgcagcagtctctgggtgtgttgtgtgcacaatccaggggctaagtttgtggtgggggggggcaggttaggggcgctatggggggaggttgcacttctgctgccagcagcaggttgtggaggtggccacgacagtggtggcctctgaggaaggggcccttctcctcttcccggactcaaggctctagagggtgaacaatttctgctcgtgttggagcacggagggtgcacagagttttcgcagcaatcctctgaccaccgcagggccctcacacccaccatggttacccagcccttgccctcttgctctgtgttgtggagactatctgggagccccaggcatggagtagtgggcaccacggaggctcagggtcctgtgggtggaggattcaggaatgggaactggtacttgggtggggaagactggctgggtctgagtttctgctattcttgctccccaaggagccccgggcactgtggtgtctccagtccccaccccaggtcaggaggccagcttggtctaggaggagaggctggactttggagggtgggtgtgagtgcctttgctgaaactggccccagccacccagtggccagcatgacaaggtgaggctctaacactgccactttctgcatcctgttgtaggtttttctggcat

SEQ ID NO: 16506 - DNA, 1434 bp, Artificial sequence
  DNA replication origin
gtacatctgtgaacttcccaacagtcctgtggtggactaacccagggacaatggtcactgtcccctctggtgcattatttgtccccatcagcctagtaagctccgggggctggcagctggcacagagtacgaggctgcactccttgacctttctatgctgcacacagtcctgtgcccatcctgtcctcagatctgccagggccatgaccaacctgccaagagcgtgggaattggtatgtgacccagctctaggaggaggtggagcaagcgaatgtaggggaagctgctcccccagtaggtttagagggagggtggggagggggtgcagaagggccaggtgggtgagggtgtgcgggtaagggtgtgggggtgtgcaggtgagggtgtgcaggtgtgggtgggggtgtgtgggtgagggtgtgtgggtgtgggtgggggtgtgtgggtgtgggtgagggtgtgtgggtgggggtgggcgggtgagggtgtgggggtgagggtgtgtgggttagggtgtgagtgcctgtctggctctcctgggtggggctggatgaatgtttgggcacaggcagcggctgtcacatggcctggctgcaggtttgggacagaagccaggcgggtgggctgtgtcaggcacagctacaaactgtgccaaggaagtggaccagagcaggggcccagggaaacctctgccttagcagaagatactggggagacgggatcaatcggggaggtcttccgaggcacatggtgcttcatggagccatggcccaggacagggagggtgtaaccctggcttgcctgattggctgagcacagacagatagaagagggtgtgggcagcccgctaggtggatgcctaagtgaggaaggaatgggtggccaggtgactgagacccccaagaccaggaccccgctgtcaggtctgtggcttccaaacgcctgtgggaagtgttcccctttggacactgaggccatcagcttcagcttcacacccttttccagaaaaagtccctcgggtaacctcaaaagtcacttctggccttccccagaggggaaaggagaggggtgcctgtgggcaggtgaccctcagtgctggtggagggcacagcagagagactgcctgtatgtgggaggcccccagcagaccttgcccagatgccagccctcatttgaggcaaactgtaaaattattacaatttaggccaggcgcagtggcccatgcctgtaatcccagcactttgggaggccatggcagaaggactgtctgagcctgcagtgagctatgactacacccctgcacttcaacctggtcaacagaggaagacactgtatctaaaataaataggcttggcatggtggctcacacctgtaatcccagcactttgggaggccgaggcaggtggatcacctgaggtgaggagttcgagaccg

SEQ ID NO: 16507 - DNA, 1315 bp, Artificial sequence
  DNA replication origin
  misc_feature (1)..(156): n is a, c, g, or t
nnnnnnnnnnnnnnnnnnnnnnnnnnnnnnnnnnnnnnnnnnnnnnnnnnnnnnnnnnnnnnnnnnnnnnnnnnnnnnnnnnnnnnnnnnnnnnnnnnnnnnnnnnnnnnnnnnnnnnnnnnnnnnnnnnnnnnnnnnnnnnnnnnnnnnnnnnnngaattccccagagagcaatgagccgagacccaggtagttgtctgtttttcatccacatggttcacagatgacatatccccacgttgagccctgcaacagagctcgaggcggatagtcccatccacacaggagtcacactcaggccaactgaagcgtgattctggattccacgtttctttgccctctgtaaaggtgcctgttgctcaagtttctgccccccgaaagcgtgaccatgttgactgtttcgcgagctctgtggggccccagaaacttccaggaatgcgtggaagaccagcatcgtgtcggtgctctcctttccagttttcaaacaggctatattggagactccccattttgcaggaaacaggaatccatcatcaggccgtgatgcacgggatgtttcttttctctgtggtttcgctctcgttgtctacgtgaaaacgaacgagatgaacacaactgcgtgtgtgagactatcacggcaactgtgacacccaggcgttggcaatagagttggcagcctgatcctgggacaaaggtactgatggacatccagacacaccccaccacaatcactagcaaacccactcccaaacacacagacacacacgggcgcacgcgcgggaacacaagcacacacacagacacacaaagacacagacaacttgaaggagagcaagggacagagggatgagaaatagaaacggaaggagagaaacagcgatggagagagagacagagaggaactggggagattgagagagagagagagagagagagcaaggtggagagggaagtagagaaagggaaagggtgagggagctagagagggagagcaacagagccttggagagggaggctctatctggtagacaggggcccctttggccagggtagggtggagggtgcctgggctgggctggaacatgggggcagggccgcccacgcgggaaaaccaacggagccctgagacgtgtttttacttggatttgttggttgctttgggggtgcttttcgtagcgtcattcctttgttggctcctccctgtcctcttggtgctgtgggccctgaaagttgtagagtgcgcccctcactgtggcaggagcagtggcgctgagcgtgcccacgggccgcggcttgggtctctctcattttccag

SEQ ID NO: 16508 - DNA, 1072 bp, Artificial sequence
  DNA replication origin
aacaaaggaaggaccttatgaaacgcacccccaaagcaaccaaccaatccaaggaaaaaaacaagtctcagggctccattggttttcctgggtggggggccctgaccccctgttctagcccggcccaagaaccctccaccacaccccggcctgctgaaaggtgccctgtctacctgagcagagcctccctctccaaggctctgtcgctgtcgctccacaactccctcaccctctccctttctctacttccccctccacctcgcgctctactgtggtgctctctcttcccccctctctctctcctccccccttttctgtctctctctctctctctctatcgctgtctctctctctccctctggttctatttctccatccctctctcccttgctctccttctgcagcaggaggagctgcagacagaacccctcagacaccgagttgtagaaggaagggctttattcagctgggagcatccgcagactcacgtctccaaaaaccaagctctccgagtgagcaattcctgtccctcttaagggcttacaactctaagggggtccgcgtgagagggtcttgatggattgaggaagcagagggtacgtgactgggggctgcatgcacaggtaattagatcagaacaaaacaggacagggattttcacagtgcttttctatacaatgtctgtaatctatagataacataaccgagtaggtcagggatcgatctttaactaccaggcccagggtgtggcgcggggctgtctgcctgtggatttcatttctgccttttagattttacttcttctttctttggaggcagaaattgggcataagacaatatgaggggaggtctccctttgagctatctgtgtctgtgtctttgtgtgtccgtgtgtgtgtgcccgggtgtggtgtgtgtgtgtgtctgcgcgcatgcacccgtgtgtatccgtgggtgtgtcagggtgggtttgctcgtggtagtggtggggtgtgtctgggtgtccgtcagcccctctttcccgggatgaggctgccggggctctagtgccagggcggggcaaagcagagcc

SEQ ID NO: 16509 - DNA, 750 bp, Artificial sequence
  DNA replication origin
gcgtttcataaggtccttcctttgtttgcttctttctgtctccttgatgcggtgggccccgagatttgtagagtgtgctcgtgtgtctggcaggagccgtggcgccgagcctgtccacggggcgaggcctgggtctctctcctgtcctccggactggagtttacacgaagtcggtggcattgggaaacagggtgcacagggacggatttcctcgtggctggcgaagaaaatgtccttcctctggggaaagcagccctcgggttctggagcggaggtcttggctggggtctgtggcacccgctgcccctgctcgcccctcccaccggcttggacggttgcagtgacgctgaatgaatgaatacaattgcctgggagtccggggagcgtgaagagacccgggacctcagggaacccgcgcctgcaccctcggggtcggtcccgtcccgcccgggttgggtggggctgccgcgagtcggaagaggtgggatgctgctgcctggcggtgctgcagtggcggatcttcaggaggaggtcctgggcttcggctggggcacgggggcggtcaacggggagcagaggcggggcgcagttgggaagcacggagacaaaagggggaaagaaggagggagcgggaagccaaaagcctacggtaccgctattaccaggcggaatcccatccaagtactaaccagtcccgaccctgcttagcttcaacagatcagaggcgagccgggcgcgttcagggtggtg

SEQ ID NO: 16510 - DNA, 1012 bp, Artificial sequence
  DNA replication origin
tgtgtgcaggcagcaacctccaggcaactcccgagtccgccctcacttcccacatctcggaacgagggccagatgtccgtgtggctgcggccaagccaggcggtctgccctgcagcagctgcacgggggcgggaaccggccctcagccctatcccccgtggctgcagagggcccttggctagaggtgtcgagctctggcataggaggagccgggcgggggcagggtctggcgggctctcaggccaggagcacttgcgatccagaggccgcccaggccatgctcaccacctgggcgcccagctacaggcgccaggcaactcccaagctggctggcgcgcccagcctcgcagacccgggcctggatgtcgccgtggctgcggccaagccaggcggtctgctcggcggcggctgcaccggggcaggaaccgaccctcagccccatccccggtggctgcggacggcccctggagcggccccgacgtctcttcggaggagaagaggggtgggagtcacggccaggcaggccctcaggcgggaagggatgcgcgcctgcgattccgggacgtaccgcgccagcccaggagaacccggaagccagcagctcttgtttctctgtgtgtttctgtgaggaaccaccaaattgttttccacggcaagtgcatcattttctattcctagcagccagttcatgagggctccaatttctccacctccttagcaacattgattttctgtgtcgttgttatgaaagccttactagtggatgcaaagtggtatctcatttgggttttgtcttgcattttattaatgaataacagtgtttagcatcttttcttatccgtcttacacatttgtgtatcttcttcggagaaatgtctattcaagtcctttgcctattttttaattgggatgttagaaattctgatgttgagttgtgggatattaagcttttatcagatacgcactttgattttatcagatacatattttctcacatactatgggttgtctt

SEQ ID NO: 16511 - DNA, 1392 bp, Artificial sequence
  DNA replication origin
gcttctcagttctcgctcctgtgcagccgccgccgccggtcagaatgcctggcttggccgcagccactgggacacctggccctagttctgcgatgctgacagcgcgagcgagctcgggggttgccaggcagctgctgcctgcacacagagggcgactgcagcttgggcgcccagtcggcggagcatggtctgggtggctgctggaatgcttgcgctcgaggcctgagggacccactgttggtgccacctgccctgctctgcgcctctccacgcctgcgccggcgccccctccgcgcctgcgccccctccgcgcctgcaccccctccgcgcctgcgcctctctgcctttgcgaagggcgctctgcctttgctagggcggagctgccttctcctcggcacagacccggagagcatcgcgagggcggagctgagttctcctctgcacagacttcggagatacagcgaaggcggagcagtgttcgcctcagcacagacccgggcgggcgggccgtgggtaccgcgagggcggagctgcgttctgctcagcacacacccaggggacaccgcgaaggcagagcagcgttctcctcagcacagaccttgggggcactgcctcgctttgggacaactcggggccgcatcaacggtgaataaaatccttcctgtttgcagccctgaataatcagggtcagagaccagttagaagggttcagtgtggaaaacgggaaaccaaaagcccctctgaatcctgcccaccgaggttctccccagccaaggcgaggcggccgcagtgcgagatccacaccgcagcctcggaagacaaatgcggcattcctaatgcagacatgacacccaaagtatgacacccccattgctcatgtaacaagcacctgtaatgctaatgcgctgcctcaatacaaaaatattaatataagatccgcaatcccctcgctgccgtgcagtccaaagacagccatcataataatcaacattgacatagtcaatacaaacttagtaacgaacctagggttaaggttggtgttagggttaggggttaggggttaagtttagggttagaggttggagatagggattggggtcagagttaggggttaggagtcaacgtttagagttagggtttaagagatgttaggggttagggattaggggttagggttgggttagggtgagggttggggttagggatagtggttagggtttgtgtcaggggttaggggtcagggtcagtggttaggggtcagggtcaggggtcccactctgcgatttgtctatttactctgctgactgttccctttgccatgcaaaagctctttagtttaattaagtcccagctatttatctttgtttttattgcatttgcatttgggttctt

SEQ ID NO: 16512 - DNA, 1280 bp, Artificial sequence
  DNA replication origin
aaaataaaaattaatttggaaaggtcattagatactgatacattcttacgtttatacattctttcatatattcatatatccttttaacagtatcaatggtttggagttacgtgtacaaagccatgacccatatgtaatacaactaataacaggcacttacaattcaaggcatattatatacaaagctttaacttcttatcaaaatattttacttttttctttctgttttggcagatactatgaacacaacattcaactcacagacaccatggagcccttactaagcataaagtactgtgaaaggccagggctaggacagaactgagacagggccagggataggacagaactggggcagggtcatggccagagaaaaaccaggggcagggtcacagccagggacatgagaggaccaaggccaggtccagatgcagggaagaaccagggccagggcagggacatggcagggccagggccatggcaggatcagggtcagcagaaggccagggcagggctagggtggcacagggccaaggcagggcagggtcagtgtagagcaaggaacgggccagggtatggcagggcagggacagggaggtccagggccagagtcaggtccaggacatggacagggcagggccagaaacatggcaggaccagaaaggggacagggcaagggcaaggccagagaaggaccatgggaaaaacatggccagggagggtccagggcaagggcaagtccagggcagaaccagagccagagcaggccaaaggcagggccagggcagggcaaggccaggatagggcagggccagtgtagggtgagggtaggaccagggcgagttcagggccagggcaggactaagatagcacaaggctaaggcagggccaaaaggaggggccagggccaagcatggccagtgtcagacctggggattgtcagggtcagggtcaaggctggtccagggacagggccagagcaagggcagggccagggagaaagcagaaccagagaggatccagagcaaggccagggtcagggcagaaccaggaccaggataaggcaaagccaaggccagggcagggcaagaccagggaagggcaaggccagggtagaaaaggccagggtagggccaggccagggtaagagaaggccatggtagggccaaggccaaggcagggcagggctagggtagcacagggcacggccaaaaacagagcagggccatagcagtggcaggactagcaacagggctagggcaagcgctggaccagagcat

SEQ ID NO: 16513 - DNA, 854 bp, Artificial sequence
  DNA replication origin
ccatagaaacggcctgggcaggaccaggtttggggcaggagcaaaacaagggcaaggacagtgcaggttcttggcacagccagggtccaggacagtgtcagggcagggccaaggcagggtctgggccatggtaagaccagcaacagggctggggctaggtcagtgacaggaccagagtcagggcaagggccagagcagggcaaggccagggtagggccaggcatttcagggtcagggccatgggagaaccagggcaaggtctcaagcagggaagggccagggccaggacaggtccagggcagggtcatgacagggccaggggctgcattagggcaagggcagggccagagcaaggtaagggtcagggccaaggctagggtagggacagggcaagaaatatggcaggaccaggggcaatgccaaggccaaggctgagtcagggctgagtcagggcagggcagggcaaggcatggtatggccagtgcaggacaggacaagagccggtccacagagagagcagggctgatgccaagaatgagccaggctagtgccaaggctgaggcagtgtcagagcatgtccagggcagggccggggccagggccagaaccgagccagggcacagccaaggcagggtagggcggggaaatagcgtggccgggtcagtactgggacagggcagagcagggcaaggcgatggtaggggcagggcagagacaggccaatgcagagccatgttacaccggggccaggacacctccaagtccacttcagggccaaagctatggcaggacaaagaccagggccagggtcagagccaggtctgtgctgggcctagcgaagactagggtgaggg

SEQ ID NO: 16514 - DNA, 774 bp, Artificial sequence
  DNA replication origin
atggcagagtcagggcaggtccttgacaggaccaggttccaggccagggccagggcagcagcaggggcagggcctggataagggcagggtcagggatatggcaggaccagggctagggccagggccagggccaggccatagtgagggcagggcaaaagccaaggcagggtcagggcaggtccagggcaggtccaggaagcggccagcaccaagcggggccaaggcacaaccagcgcagggtaaggcagggcaatggcaccactgggccatgacagggccaggtcagtgccaggagagggcagaacaggaaggcccatggtggggccagggcagggatgggccaaagcagagccaggacatttccaaggccaggtcagggccagaacaggagcaggaccatgaccactggcagggccagtgccatgacaggaccagggtcaggacaaggggcagggccagagccagggccagagccaaggtcaggccagtgcaggttcagggcagggccagtgccagggcaagaccagggcagggacagggtagcacggggccaagacagggtcaggatgggaccagagcaggacagggctgagagtccaggtaacagtagggcaggtacagggcaaggcagggcagtacagggccagatccacggcaggcacagggcaaagccaggcccattgccaatgcaccagccctccctacaaggctcctaccacctggccactgctgcagcccgtccatcgctgtaagcctgactcccaaccctgcctg

SEQ ID NO: 16515 - DNA, 947 bp, Artificial sequence
  DNA replication origin
tgtgtgttttttatttcaattttgtttctgctacgatcttatttattttcttattttcggtttagtttgttcttactttactagttctttaagatgtattgtttatttgaagtttttcttttgtttggatggtaggcacttatagctgtaaatctctgcctttgtactgctttctgcgtaacaagttttggtatactgtgttttcattaccctttgtttcatgaaatttttgaatttctgtcttagtatcttcattgacctttatttattcaggtcatttattcaggagggtagtgtttaacttccatgtgattgtattgtttccaaaattacttttcttattgatacctagttttatttctttgtagtgaaagaagattgccacggagacagagagcagcatggtcagtgtggtaggagccggccatcagcgagagctgctccatgcctggctgctgggagctagagcctgcggcccactggcttgcctcactgtagttggtggtggcagtgacagagactgcagcatgaccagagtggtaggacaggggctatccagggctgcacctttcgcagtgtggggtgggttgggggcgctatccagggtgtcattgcctgcattaggggtactggttggtagcactgcacagggctgcactgcccacagcagggagggtgggttatgggtgctttctggggctgcaatgcccatggaggaggacaggttagggcatatcgggtatatgctactggcggcattgggggacggaggtggggggcgctattgagggcaggactagccgtggagcgggggcgagttcggtgctatcaggggctgcactgctggcggcagtcaacagagttggcatccaaggaaggagtggttctcctctccctgactccacactccagagggcgaaccactcttggtcatactggagtgcggc

SEQ ID NO: 16516 - DNA, 1494 bp, Artificial sequence
  DNA replication origin
cgcctctccgccgcgccgccgccgaccgcctctccgccgcgccgccgccgaccgcctctccgccgctgtccgcttctccgccacgccggcaccggcgctgtgtgcctttgcaagggcggagctgcgttctcctcggcacagacccggagagcattgcgagggcggagctgcgttctgctctgcatagaccttggggcactgcctcgctttgggacaactcagggccgcatcgacggtgaataaaatccttcctgtttgcagccatgtttgtggttggtggcagcgatggagactgcagccagccagtgtagaaaggcattggggtaagtgcgccatccaggctgcactgctggtggcctgggacgggttgggagccctatctcaggcgtcactgcccgtcttgggtggctggttgggtgtgctatctggggctgtgctgcctgcccgggggcgggggggggggcggtttgggggctcaaaccggggctgcactgctttggcggggagccggttgggggcactatcccagactgtattgctggcaacagtgaggtgggttaagtgtgctatctggggctgcactgtgtggctgtggggggggggtggcggttttgggttgagggcgctatgggctgctgtaatgcccatggtgcggggaggcggggcggttagggtatgttgggtgtgctattgggggggggcgacactgctggtggtagggggcagggtgggttgggggccatatcaggggctgcactgattgctttagctaggatttctggtactatgttaaacaacagtggtgacagggggcatccttatcatgttccagatcttagaggaaaagctttccatttttccccattccatatgattctagctgtgggtgtctttcctgtagtttttattatgttgcggtatgtttcttctgtgcctgtttctttgaggatttatagcatgaagggatgttgaatttcatcacatgcttttttggtttcagttgacatgatcatacggtttttgtcgtttatttggttgatatgatgtatcacattgtatgttgagtgactcttgcattccagggatacatcccagttgatcatgatgaattatctttttaatgtattactgaatttgattcactggtattctgttgaggatttttgcatcaatattagagatcctgtcctgtagttttcttctttgatgcttttatctgattttcgtatcacagtaataatggtctcatagaataagtttggaagtattccctcctgtttttcaaaataatttgagcaggatttgtactaggtctttaaattgtttggtgtgaagccatcagcagtgaagacatcatcagttcctgggcttttctttactgggagactttttctgatggcttcaatctcattacttgttaccaatctgttctggtcttggatgttttcattgtttaacctaagtaggttgtatgcatctaggaatttgccaatt

SEQ ID NO: 16517 - DNA, 1197 bp, Artificial sequence
  DNA replication origin
accaacatttcttcattcaacaaacatttgttggccaggcatggtgactcatgcctgtaatcccaacacttcaggaggccgaggcaggtggatcacttgaggtcaggagttcaagaccagcctggccaacatggcagaaccccatttccactaaaaataaaaaaaaaattagctgggcgtggtggcaggcacctgtaatcccagctggggtgggggctgagatgtgagaatcgcttgagcccaagaagcagaagttgcagtgagccgagatcatgccactgcactccagcatgggcaacagaacaagactccatctcaaaaaaagaaaaaatttttgttgagcacctacttatgagtcaagcaccagggatacaaagtcaaaacccactctccactcttgggtcactctgtttaatagaagagatgggtaatggcaacaccaccagagagaagcagcctgggactgggggaactcaggggaggcatgggaggtgaggcctgaagggagttttgaagaatgggcgggtggtggcctgacatggccatgggggagtagggtggtggtagaaagaatggtggaagctgtgcacattctagatattttaggagattggtgactggatgtgaggcatggggaagagggaagtatcaaggacatgaccttgacttctggcttgagcaactgaagagaaggggacccctgactgagccaagagcacaggaggagtggacttgtggggggcggaggaggctgtttccatctaggagctgagttgcctgtgagacaccagtgggtctctagaaacaggatctaaagccctggaaagagacgtaggctagaggcaatgatgtcaacagaggggcactattcattctctccgtgcaagtgtacaacaggcaaatatccctgcttgcgtggagctgacagcaatgaaatgtaataagtaagtacatttgtataagcgaaggtaccagctcctatgggaaaaaacagagcaaggagaggggaattgggagtgcaggggctggagatggggtgtgatttcaaatagggcagtcagagtaatccttgttgagaaggtggccttggagcaaagccatgaaggagatgagagtgggctgtatgttaactgcagaaagcctctcagatggagggaatagtcaccagaggactctcagcatgtttgaagaaagcaa

SEQ ID NO: 16518 - DNA, 1297 bp, Artificial sequence
  DNA replication origin
cacggtgcccactctttcagctggggcaatgctcatcacactgcatagtaattgctcagttaggccaggcacagtgtctcacgcctgtaatcccagcacttgctgaggcgagctgatcgcttgagcccaggagttcaagaccagcctgggcagtatgacaaaacctcatctctacaaaaaaaaaaaaatacaaaaattagtcaggtgttgtggtgtacgcctgtggtcccagctaatggggaggctgatgtgagaggattgcctgagcccagaaggcagaggttgcagtgagctgagataacaccactgcactccagcgtgggtgacagagcgacaccctgtctcaaaaaagaaaaaaaaaaaaagcttaattaattaacggtttttcttcctaagggctgggatcataccagtttgcttcactgcagtgcctgaacatagtaggcatagtagattcaataaatctttggttccttggctggttgttgcctgctctgtgctgatgagaaaggagccaggcttccaggattcccttggtgttcttggctccctgctctgtctaactctcccctgcctctatggtaccttcccaggactgtctttgggctgctgcttgcattggtagggtctcttcttcagggctgaggaggctggtcatgggataatgagacccctatacgatgctgcatgggagctggagttggatgggggccagtggaatatccgcgcaactctgcatccccctccatctactcatccctggttttgtttctctggagtaaggaatagagcaaggactgggatgggtgagctatgaacagagggtctcagctgaaaagtggaagatgttttattccatgcctggacgtctctcattccctctgcttactttttgctgctgtgaggtcaggggaatttaggagccctgaggaatgctgctgctctccctagcagggcgaggtgaccctccactggctcccatccaaccccacctcccatgctggaggtaaccacagaagaggagagagaagtggacagagcggaaagacaagaacaccaagagaatcctggaagcctggctccttcctcatcaccacacagcaggcaagacacagtaagcaacagataaccaccaaccagccaatgaactcaagatttcttgaatctactgtgcctagaatgttcagtcactgcagtaaaggacactggtacaatccagcctgtgggaagaaaagcaatcaattgagcaattactatgcagtgtgatgagcattgccccagctgaaagagtgggcac

SEQ ID NO: 16519 - DNA, 771 bp, Artificial sequence
  DNA replication origin
gcaacatctgagtttctggctcggccaacggggatggggaacatagagtgaggagcaggtgtgctgtgagatggcgaaccttcaacagagcctgagacgtccgtggaacaccaggagagttgcagtggggatttgcaaataggcatctggctcccccacggagatgacgggaatttcagcgcatcaggcatagctgagactgtctacgtggtaaaaccatgcctgaaaagacctttggaaaatcaggaggttgctggagcccttggagagagctttggtgtctgtgacatgtggaaatggaagccagattgaggagggggtgcgagggaaggggtgaagcagctggccagtgtgttctctcctgcagcctgactgaaacagggagggggcaaccaggaacccacagctggagaaggacactgggcaggggtgggacagtttgctgggaaggatgagactccagtgtgtgggaaccgatcaatgggaggatggaaggtatgggggagacggaggcctctgcagagggagaggatagcacaggagccagggctgaagggaacagtggctctagactgagggtaatgggcctgaaggtaggccccttcccctgtgaaggcagcattatctgaggagccgtgagggatgggcaagaagcagcagcttgggaatgccgcctgaggtcagtggaaatgaagctgagggcaagacagttagggccccactgttccagcattgtgggaattgcggtggagtgtgtgtgtgtagggaggg

SEQ ID NO: 16520 - DNA, 1568 bp, Artificial sequence
  DNA replication origin
tttttttcttaatcacatgaaattttaataccacagatatactatacatctgtttatgttctgtatatgttctgtgctttatacgtaaaaaagagtaagattttttttcacctccccttttaagaatcagttttaattcccttgagaatgcttgttatagattgaaggctggtaaggggttgggctcctctttcttcttcctggtgccagagtgctcccacatgaaggaataggaaaggaagatgcaaagagggaaatccttcgaacacatgaagacacaggaagaggcctcttagggctccaagggctccagggaagcagctgcagaggttgggtggggtgaggggccaggatccactgaccctggggccaggcaggaatcactctgttgcctggggctcagaaggcagtatcacccatggttcctgtcattgctcatgtattttgcctttcaacaattattgtgcacctactgtgtgcaggccctgcctggacactggggatgcgcagtggatgcactgggctctgcctttgagggttgcagtttaatgggtgacaggtaattataaggaagaaggtgagtgcagagtgggaggcttggaggctgtggggcttggggtgggggagctcacatccagcctctgggccaaggccaggaggtttcccagaggaggagacagagcagggtattgtggtggggggtgtcctttttggggctgggatctgcactttacagtttgaggggatgggcagaggaggctgggcttcattctggaggtggggacatggtgaggtgaggtttagaaagcacacctgagccgcagtgtgtaggatgctggaaatggtggagatgggcctgcgaagagagtgctgggaagtgatgacccaggagcagcagccgggcacctaacaatgggtcagcaccgtgggcgtggagacaagggccgggattgatcaatacccgagaagtacaatgtacaggacttgggctccatttggatggagtgggtgagggaggagtcagaaatggcttccggtttccagcttgggcccggggattggagatgtccccactgagagtagggcacaaatgaggaaatggtttggagaggaagatgataagttacatcatggatgtgctgagtctgagttgcctatgggacttggaatggggggtggcaaaaggtgtgtgatcttgagcaagatattcaactcttctgggccttggtcttctcatttgtaaaacggtgataagaatattacttcccatttgtgttgctgtgaatattaaatgcgctaccacatgtaaaatgttgagaatcgtttctagctcagagtaagtgctcaataaacaccattacgccttttatatggtctggagctcagaagtggaagacagggttttgtgaagtcatggctttgtggatgtagctagattgtggagtaatggcaggagggtcgggggcatggcacaaggtaggtggtcaagagacactggacacaacccaaatgtccatccacaggggaacagatacatacactgctgcgcaattgcacataatagaatc

SEQ ID NO: 16521 - DNA, 1498 bp, Artificial sequence
  DNA replication origin
tatacgtaaaaaagagtaagattttttttcacctccccttttaagaatcagttttaattcccttgagaatgcttgttatagattgaaggctggtaaggggttgggctcctctttcttcttcctggtgccagagtgctcccacatgaaggaataggaaaggaagatgcaaagagggaaatccttcgaacacatgaagacacaggaagaggcctcttagggctccaagggctccagggaagcagctgcagaggttgggtggggtgaggggccaggatccactgaccctggggccaggcaggaatcactctgttgcctggggctcagaaggcagtatcacccatggttcctgtcattgctcatgtattttgcctttcaacaattattgtgcacctactgtgtgcaggccctgcctggacactggggatgcgcagtggatgcactgggctctgcctttgagggttgcagtttaatgggtgacaggtaattataaggaagaaggtgagtgcagagtgggaggcttggaggctgtggggcttggggtgggggagctcacatccagcctctgggccaaggccaggaggcttcccagagcaggagacagagcagggtattgtggtggggggtgtcctttttggggctgggatctgcactttacagtttgaggggatgggcagaggaggctgggcttcattctggaggtggggacatggtgaggtgaggtttagaaagcacacctgagccgcagtgtgtaggatgctggaaatggtggagatgggcctgcgaagagagtgctgggaagtgatgacccaggagcagcagccgggcacctaacaatgggtcagcaccgtgggcgtggagacaaaggccgggattgatcaatacccgagaagtacaatgtacaggacttgggctccatttggatggagtgggtgagggaggagtcagaaatggcttccgatttccagcttgggcctggggattggagatgtccccactgagagtagggcacaagtgaggaaatggtttggagaggaagatgataagttacatcatggatgtgctgagtctgagttgcctatgggacttggaatggggggtggcaaaaggtgtgtgatcttgagcaagatattcaactcttctgggccttggtcttctcatttgtaaaacggtgataagaatattacttcccatttgtgttgctgtgaatattaaatgcgctaccacatgtaaaatgttgagaatcgtttctagctcagagtaagtgctcaataaacaccattatgccttttatatggtctggagctcagaagtggaagacagggttttgtgaagtcatggctttgtggatgtagctagattgtggagtaatggcaggagggtcgggggcatggcacaaggtaagtggtcaagagacactggacacaacccaaatgtccatccacagggtaacagatacatacactgctgtgcaattgcacataatagaatcctctacaat

SEQ ID NO: 16522 - DNA, 1297 bp, Artificial sequence
  DNA replication origin
aattgctcagttaggccaggcacagtgtctcacacctgtaatcccagcacttgccgaggcgagctgatcgcttgagcccaggagttcaagaccagcctgggcagtatgacaaaacctcatctctacaaaaaaaaaatacaaaaattagtcaggtgttgtggtgtacgcctgtggtcccagctaatggggaggctgatgtgagaggattgcctgagcccagaaggcagaggttgcagtgagctgagatcacaccactgcactccagcgtgggtgacagagcgacaccctgtctcaaaaaagaaaaaaaaaaaaagcttaattaattaacggtttttcttcctaagggctgggatcataccagtttgcttcactgcagtgcctgaacatagtaggcatagtagattcaataaatctttggttccttggctggttgttacctgctctgtgctgatgagaaaggagccaggcttccaggattcccttggtgttcttggctccctgctctgtctacctctcccctgcctctatggtaccttcccaggactgtctttgggctgctgcttgcattggtagggtctcttcttcagggctgaggaggctggtcatgggataatgagacccctatacgatgctgcatgggagctggagttggatgggggccagtggaatatccgcgcaactctgcatccccttccatctactcatccctggttttgtttctctggggtaaggaatagagcaaggactgggatgggtgagctatgaacagagggtctcagctgaaaagtggaagatgttttattccatgcctggacgtctctcattccctctgcttactttttgctgctgtgaggtcaggggaatttaggagccctgaggaatgctgctgctctccctagcagggcgaggtgaccctccactggctcccatccaaccccacctcccatgctggaggtaactacagaagaggagagagaagtggacagagcagaaagacaagaacaccaagagaatcctggaagcctggctccttcctcatcaccacacagcaggcaagacacagtaagcaacagataaccaccaaccagccaatgaactcaagatttcttgaatctactgtgcctagaatgttcagtcactgcagtaaaggacactggtacaatccagcctgtgggaagaaaagcaatcaattgagcaattactatgcagtgtgatgagcattgccccagctgaaagagtgggcaccgtggggcatgtggaagaagtgaatggcctagaggagggggtaggaggctcc

SEQ ID NO: 16523 - DNA, 1045 bp, Artificial sequence
  DNA replication origin
aggaggccgaggcaggtggatcacttgaggtcaggagttcaagaccagcctggccaacatggcagaaccccatttccactaaaaataaaaaaaaaattagctgggcatggtggcaggcacctgtaatcccagctggggtgggggctgagatgtgagaatcgcttgagcccaagaagcagaagttgcagtgagccgagatcatgccactgcactccagcatgggcaacagaacaagactccatctcaaaaaaagaaaaaatttttgttgagcacctacttatgagtcaagcaccagggatacaaagtcaaaacccactctccactcttgggtcactctgtttaatagaagagatgggtaatggcaacaccaccagagagaagcagcctgggactgggggaactcaggggaggcatgggaggtgaggcctgaagggagttttgaagaatgggcgggtggtggcctgacatggccatgggggagtagggtggtggtagaaagaatggtggaagctgtgcacattctagatattttaggagattggtgactggatgtgaggcatggggaagagggaagtatcaaggacatgaccttgacttctggcttgagcaactgaagagaaggggacccctgactgagccaagagcacaggaggagtggacttgtggggggcggaggaggctgtttccatctaggagctgagttgcctgtgagacaccagtgggtctctagaaacaggatctaaagccctggaaagagacgtaggctagaggcaatgatgtcaacagaggggcactattcattctctccgtccaagtgtacaacaggcaaatatccctgcttgcgtggagctgacagcaatgaaatgtaataagtaagtacatttgtataagcgaaggtaccagctcctatgggaaaaaacagagcaaggagaggggaattgggagtgcaggggctggagatggggtgtgatttcaaatagggcagtcagagtaatccttgttgagaaggtggccttggagcaaagccatgaaggagatgagagtg

SEQ ID NO: 16524 - DNA, 1744 bp, Artificial sequence
  DNA replication origin
gcggcgcggcggagaggcgggcggcggcggcgcggcggagaggcgggcggcggcggcgcggcggagaggcgggcggcggcggcgcggcggagaggcgggcggcggcggcgcggcggagaggcgggcggcggcggcgcggcggagaggcgggcggcggcggcgcggcggagaggcgggcggcggcggcgaggcgggcggcggcggcgaggcggtcggcggcggcgcggcggagaggcggacagcggcggagaggcggacagcggcggagaggcgcacagcggcggagaggcgcacagcggcggcgaggcgcacagcggcggcgcaggcgcggagaggcgcaggcccaggctccactccccagctgtgaaagggtaagagctgagggtggctgagactcggggttgttcagggcggggtgggctctggacccagcaggcccggcaccccggtcagggctccaggggaggccaggtgggcgaaggccaagaaggggccggggctggtcaggaagggctcctggtgaccagagcactttgcgtgagccagcgtgggaggaaggtgggctggatgagccagggaggtgccgggagggtccttggcagaggcgaccacctccatcagcccccaggccactgaaccctgggtagcgagaaccgacaggggaggctgcagacagaggagtggaggctccccggctttgggggctctgagtagaagcatctagggggtccctcaagaggcccccaaacgcttccccatggtgagaaaagaaggcgcagagaggggcacggcgccggcgccagggcagaggggcgcacagcaagatttgctgtgatttcttttattgccccaagtgtacttcatcttggtagatttctattggctttaaaaatgtgtgtgttttgctgttggggagtggggtgttatacggatgtcacattttgctggttgactgttcagatcttttgtcaatccttgctccttttctgcctagtttcactctgtcacttacactggagtgcggtggcacgaacatgactcactgcagccttgacttcctagggtcaagtacttcccctggcttaacctcctgagtagctggtactataggtgtgtgccggcacacctggctaaatttaaaattttttggagagatgaggccttgctatgttgcccaggctcgaactcctggcctcaagctatcctttgtctttgcctcccagagttctgggattacaggcatgagccgctgtgcccggcctctgcctagttttaatagttgctaagaggaggatgttgaagtagatgtcttcttggtgggtcaatccttttgtcactaagcagttgttatggtcacttccttttcaccccattggtgaagaaggggtccctgccctaaagtgtaggagatggctgaacacgacacctggcgtggatggatgagattgacagcagtgttttagtcacatatacccacagctcagaggaggacactgcatgccacacagggtcagatgggcaccgcactctgtagcggagtgagggctgcgggctgaggaagcaggcaggcttggtagtaacaagagcacacaatgaccaatggttcccgagggggagagcaattggcttgtttgaataaattcatgggctggcagacaggtgaagtgaaacttcttaggctgaggtgcaactgttctggctgataaaagaactagccaggtggggagcctttcctgttgggcgg

SEQ ID NO: 16525 - DNA, 1948 bp, Artificial sequence
  DNA replication origin
ccgcgcctgcgccgccgctgtgcgcctcgccgccgctgtgcgcctctccgccgctgtgcgcctctccgccgctgtccgcctctccgccgctgtccgcctctccgccgcgccgccgccgaccgcctcgccgccgccgcccgcctcgccgccgccgcccgcctctccgccgcgccgccgccgcccgcctctccgccgcgccgccgccgcccgcctctccgccgcgccgccgccgcccgcctctccgccgcgccgccgccgcccgcctctccgccgcgccgccgccgcccgcctctccgccgcgccgccgccgcccgcctctccgccgcgccgccgccgaccgcctctccgccgcgccgccgccgaccgcctctccgccgctgtccgcttctccgccacgccggcaccggcgctgtgtgcctttgcaagggcggagctgcgttctcctcggcacagacccggagagcattgcgagggcggagctgcgttctgctctgcatagaccttggggcacagcctcgctttgggacaactcggggccgcatcgacggtgaataaaatccttcctgtttgccatgtttgtggttggtggcagcgatggacactgcagccagccagagtgtagaaaggcattggggtaagtgcgccatccaggctgcactgctggtggcctgggacgggttgggagccctatctcaggcgtcactgcccgtcttgggtggttggttgggtgtgctatctggggctgtgctgcctgcaccgggggcggggggcggtttgggggctcaaaccggggctgcactgcctttggcggggagccggttgggggcactatcccagactgtattgctggcaacagtgaggtgggttaagtgtgctatctggggctgcactgtgcggctgtgggggggggtggcggttttgggttgagggcgctatgggctgctgtaatgcccatggtgcggggaggcggggcggttagggtatgttgggtgtgctatttgcggggggcgacactgctggtggtagggggcagggtgggttgggggccatatcaggggctgcactgattgctttagctaggatttctggtactatgttaaacaacagtggtgacagggggcatccttatcatgttccagatcttagaggaaaagctttccatttttccccattccatatgattctagctgtgggtgtctttcctgtagtttttattatgttgcggtatgtttcttctgtgcctgtttctttgaggatttatagcatgaagggatgttgaatttcatcacatgcttttttggtttcagttgacatgatcatacggtttttgtcgtttatttggttgatatgatgtatcacattgtatgttgagtgactcttgcattccagggatacatcccagttgatcatgatgaattatctttttaatgtattactgaatttgattcactggtattctgttgaggatttttgcatcaatattagagatcctgtcctgtagttttcttctttgatgcttttatctgattttcgtatcacagtaataatggtctcatagaataagtttggaagtattccctcctgtttttcaaaataatttgagcaggatttgtactaggtctttaaattgtttggtgtgaagccatcagcagtgaagacatcatcagttcctgggcttttctttactgggagactttttctgatggcttcaatctcattacttgttaccaatctgttctggtcttggatgttttcattgtttaacctaagtaggttgtatgcatctaggaatttgccaatttctactaggctttccaatttattggcatataatagccagttatgatcctttgaatttctgaagtattagttgtaatgtctcctttttttaatctgttgattttatttatttgaatcttgtctcttttcttaggctggttgaaagttt

SEQ ID NO: 16526 - DNA, 1136 bp, Artificial sequence
  DNA replication origin
gcggcggtcggggcaaaaagccgggtcgagcaaaaagccacggcggcgggggtgaaaaagccgcggcggtgggggagcaaaaagctgcggcggcggcgggtggtaaaaagccgcggcgggcagaaagccgcggcggaggggggagcaaaaagctgggtcgagcaaaaagccgcggcggcggcgggggtaaaaagcggcggggggcagaaagccacggcggcggggggcagaaagccgcggcggtgggggggtaaaaagccggggtcgagcaaaaagccgcggcgggcagaaagccgtggcggcggcgggggggggcaaaaagccgcggcgacaaaaagccacggcggcgggggtgaaaaagccgcggcagcgggggtgggcaaaaagccaggttgggcaaaaagccgcggcggcggcggggggcaaaaagccgggtcgggcaaaaagccgcggcggcaaggaactaaaagccgtggcgggcataaacccgaggcggcgggtgggggcaaaaaaccgcggtggggaaaaagccgcggctgcgggggaaaagccgaggtggtggttggggcaaaagccgcggcggcgaagagcaaaagagccgctgtgatgagggtcaaaaagccgcggcgacgcggggcaagatagtggagatggggtagaaggccggcacagcttggctttgctggagtgtgatgtgataggaaatgtgcagccaaagacaaaaaaagatgtaagtaggcttgactcattgcagccaagaacccagatgttatcttgagggttttaactaataagcagtttaaatcagaatggcacattctgatttgttttttgtatattcacatttggcaggcatagataccgttcgaagagaaagatgtcagtagatagaggtaacaaacttaaatatgtgccgagtctagaaacaagagactagggggataaggaccttttgaaataaaatgcgagatttgaaaactgattgggggatgaggaaaaggcaggtctttaaggtcagtccctgttttgctttaagttgttagggggtggttttatcacatattgtagaatacgtcatttcagttttgaacatcttgagttaaatcgtcctaacatagcttatgaatttgattttc

SEQ ID NO: 16527 - DNA, 1640 bp, Artificial sequence
  DNA replication origin
tgggctcgtgggtcagtgcctttgcaggcgacagcacgccttgcggccctggggatgtttctgtgccccggcgagagcctttccgcctcactgcattgtaaccccattcccgatcaccgggtgggatccatcatcggatcccaagaggagtccgcgcagcccagccgacaccccgaagctcctccttcaccgggaacccaagcagaagaccgatcacggaggtcctgacgacaggactcctatgggtccgaccctgggtctcccgcaggcccctctggtagtcctcttcccacccgccgcctggggctgcgccgcagccgccgccgcaacctccagcaccgccgccccagtccccgcagccgccgcgttgccgccattttttaaagggtccgcagcctgactctgccgagtaagggggggtgggggcgggtgagtcggcctcgccagtgcgcatgcgcgaggccggagccgccgctttggtcacagtgaccgccaccattgcccggggatgggtccctgagacttggcgaagtaggagccctgtgtgatcgtgcgtcagagtcggggctgagaccagccctggccagggcagttaccaggacggtctccggaggccgagattcgcggagggtccaccagtaggaagaaaccccaggaggaagaaacctcagacagatcgccggggaggcagcgcgggatcccagcctcaggcgtgcgcggacggtgtgcgggtgaatctccccaaaagtggcgcccttgtgatgtcgaggacaggtctccctgtgtgcccgtgggctgctgtctcaccggtggctcgtcgtcgcggagagcagaacccggcagcttcaggggctgcctgggggtgggtgttacctgctgtatgtctgtgtgcgttatgggtgtgtgtgtgtgtgtctgtgtgtctgtgtgtgtgcgcgcgcacgcgcgtctgtgtgcccactactgtctcttacgtctctgtctctctctctctcccttctcgctctttccgtcgccctctctttctgtctctgtccgtctgtgtgtgcatgcgccttgggacacatgttccctgtgcgccggaggctgggtttcttgcacgtcggcctttcttctggtcagcctctccccgcgtctctgcctgggtgttgtggccagttggcaatcgttttcccggcggttccggtttgggggtctgtgaaggcctgggcaatgtgggcatctgtgtcggagccgcaggggttttcattccctccccacccggagcagcctctttgctagcctagatccagacgaccgctccccaaccaaggacaacggcctccaagcgctcattgtccacccgcaggagggtgtcggcagaccttccagaagatgcttctcacgcctctcgccctctgccctcatcgcgaaatctagccacagctcgacgcagggacggagaaggaagccgtcaaggggatggggcaagcatctctgtcactcaaaggcattatagaggtccaccacagaggcatatccagtatggtgcccaccacctcatcttggggctgggtgaagggcaagtggcactgcaggaaatggtggccttgttctctgtcctcaagttgttccaagattgcagaccacaccagtgcttg

SEQ ID NO: 16528 - DNA, 2156 bp, Artificial sequence
  DNA replication origin
ccacgggcacacagggagacctgtcctcgacatcacaagggcgccacttttggggagattcacccgcacaccgtccgcgcacgcctgaggctgggatcccgcgctgcctccccggcgatctgtctgaggtttcttcctcctggggtttcttcctactggtggaccctccgcgaatctcggcctccggagaccgtcctggtaactgccctggccagggctggtctcagccccgactctgacgcacgatcacacagggctcctacttcgccaagtctcagggacccatccccgggcaatggtggcggtcactgtgaccaaagcggcggctccggcctcgcgcatgcgcactggcgaggccgactcacccgcccccacccccccttactcggcagagtcaggctgcggaccctttaaaaaatggcggcaacgcggcggctgcggggactggggcggcggtgctggaggttgcggcggcggctgcggcgcagccccaggcggcgggtgggaagaggactaccagaggggcctgcgggagacccagggtcggacccataggagtcctgtcgtcaggacctccgtgatcggtcttctgcttgggttcccggtgaaggaggagcttcggggtgtcggctgggctgcgcggactcctcttgggatccgatgatggatcccacccggtgatcgggaatggggttacaatgcagtgaggcggaaaggctctcgccggggcacagaaacatccccagggccgcaaggcgtgctgtcgcctgcaaaggcactgacccacgagcccactgcctccctccttcctgggtggagcaggggcctgccttcatctccaaggcccgggggctccggcatctcgacgcggcttccggcgacacgggcaaagagagacagaggctagtccgagccggagccagtgtgaccacacgtggcactgacgtcccccaagagcacatgcagtgagcctgtgtctctgaggccgtagggggcgacgacgagacggacagtgatgtccaggcctgcgcctggggggccactggagacctgcccctcaaagcggaggaaacgccaagcccacctgaaaacctgcgagacagggcctttgcgcgagtccagtactcctacttcgccaagtctcagggacccatcccccagcaacggtggccgcgcagagaggcgcacggcgccggcgcaggcgcagagagacaggaggctgatggggggaagttgaggcacctggggcagagaaaaaatgcatcgccaagctgtttctgggtcatccatgtacgaaaatgtcttcccatcagcccttgcgctggttcctagggaccctggcatccgtcgttgctgcccagggtgcgcgtcgggccactaggggtaccccaactcggagagaaggaccatgagttgaatttgaagtttgtgggaatagaggtgaagcaccaggggcagaaaaaaaacaggagacctcgcctcagacaagcggggcctgggtcccccatggatgaaagtgccttcccattatgccgtacgctgggcagagtggacagtgacgaccctggtttgatcccagggtgcgcttcgggaccacttgcggtaccagaaagcgaacaaaaggtccatgagcggaaggtgaggcacctgaggcagagaaagtaaagaaacgcgccgccgagaagcagtgcctgggtccctcacggaggaaattgtcttctcctcagcccgttcgctgggcactgaggtccctggcgtccctggtttgatcccagggtacgcctcgggccactagtgttaccccaaggtgggcagaaagcccataaggggaaggcgaggcacctggggcagagaaaaaaaaaacttcgccgcagagaagcgcggcctgattccccacggacgagagtgtcttcccatcagtccctgcactgggacctggggaccctggtgtccctggttcgagctcagggtgtgcctcagccgctaagtgcaccccaaggggagctttgggagcacaaagcccatgagggaaggtgagttttgagggaggagtggtgaggcacctgtcacagaaaaagaaaaaaaaaacaacccgcgccacggagaagcagggcctgggtcccccacgatgaaaatgccttcccatcagctcctgc

SEQ ID NO: 16529 - DNA, 1126 bp, Artificial sequence
  DNA replication origin
acttcggagatacagcgaaggcggagcagtgtttgcctcagcacagacccaggcgggcgggccgggggtaccgcgagggcggagctgcgttctgctcagcacacacccgggggacaccgcgaaggcagagcagcgttctcgtcagcacagaccttgggggcactgcctcgctttgggacaactcggggccgcatcaacggtgaataaaatccttcctgtttgtagccctgaataatcagggtcagagaccagttagaagggttcagtgtggaaaacgggaaaccaaaagcccctctgaatcctgcccaccgaggttctcctcagccaaggcgaggcggccgcagtgcgagatccacactgcagcctcggaagacaaatgcggcattcctaatgcagacatgacacccaaagtatgacacccccattgctcatgtaacaagcacctgtaatgctaatgcgctgcctcaatacaaaaatattaatataagatccgcaatcccctcgctgccgtgcagtccaaagacagccatcataataatcaacattgacatagtcaatacaaacttagtaacgaacctagggttaaggttggtgttagggttaggggttaggggttaagtttagggttagaggttggagatagggattggggtcagagttaggggttaggagtcaacgtttagagttagggtttaagagatgttaggggttagggattaggggttagggctgggttagggtgagggttggggttagggatagtggttagggtttgtgtcaggggttaggggtcagggtcagtggttaggggtcagggtcaggggtcagggtcaggggtcccactctgcgatttgtctatttactctgctgactgttccctttgccatgcaaaagctctttagtttaattaagtcccagctatttatctttgtttttattgcatttgcatttgggttcttggtcatgaaatccttgcctatgccaatgtctagaagggtttatccagtgttatcttctagaatttttacagttcaggaattaggtttaagttcttaatccatcttgagtagatttttgtataaggtgagagatgagaatccagttttattcccctacatgtggctcg

SEQ ID NO: 16530 - DNA, 1341 bp, Artificial sequence
  DNA replication origin
cggctctgggtgtgtggggcaagagggggccttgcaggaggggcggcgaggaatccaaaataatttttccgcggcaaggcggaggaccggaggggaccccaggaccgcgggccctgggccctgacgcctcggagcacaccccgtcctaagcgggccccaggtgttggaagctcgggagctcaagagcctggggaaggcctggagtctcagcgagagggtggccgcctggagagtccagagccctggcaggggatggaggcctctggcgcctgggctgtctcgcgcatggtctggccgccggcgacatcgggacgctctgggaggtcggcgaaaagcgcagcgtggcgatggtggtgcttgggcgtagagggggagagcagccgggccacaggcaagcggctccggggtgcctgatcccagcctcgcgctcccgggttggtggtgacgcctggaatcaggcaggcgtagctggactgggctcttgggccagccaggcgccactgccattgtctacggccataccacctggaaaacgagagagacccaagctgcggcccgtgggcacgttcagcgccactgcttctgccacagtgaggggcgcactctacaactttcagggcccacagcaccaagaggacagggaggagccaacaaaggaatgacgctacgaaaagcacccccaaagcaaccaacaaatccaagtaaaaacatgtctcagggctccgttggttttcccgagtgggaggccctgcccccctgttccagcccagcccaggcaccctccaccctaccctggccaaaggggcccctgtctaccagatagagcctccctctccaaggctctgttgctctccctctcaagctccctcaccctttccctttccctacttccctctccaccttgctctctctctctctctctcaatctccctggttcctctctgtgtctctctccatcgctgtttctctccttccgtttctatctctcatccctctgtcccttgctctccttcaagctgtctgtctttgtgtgtctgtgtgtgtgcttgtgttcccgcgtgtgcgcccgtgtgtgtctgtgtgtttgggagtcggtttgctagtgactgtggtggggtgtgtctggatgtccatcagtacctttgtcccaggatcaggctgccaactctattgccaacgcctgggtgtcacagttgccgtgatagtctcacacacgcaggtgtgttcatctcgttcattttcacgtagacaacgagagcgaaaccacagagaaaagaaacatcccgtgcatcacggcctgacaatggattcctgtttcctgtacaatgtggagtctccaat

SEQ ID NO: 16531 - DNA, 1566 bp, Artificial sequence
  DNA replication origin
taattagcacccctggtgggtgtcaccctcctccctcctctatcgggttcacctacaccggggcgtggggaacgtcgcttcctgcaccccacatgccctgcgctcctggggctctcccacagggggctttcgtgagccaggaagcaagggtcatccccctgctccagcccagccaggctgcacaggcagaaggactctcccaacctgcccgagcatgcggggctttgtgttcactgtcctggcccctccctccgaaactggggctctcccatcctcagactccctggtggcctccgaaccccaacaaatgacaggaagaccagaacccacagcgcgacggcctgctgggcgcgtgctcagtgggacagcttggggcccctcaagctgagtcacaggggaaaggtgtgcttgcaccacccacgtcccaccggagtccgtggtggggctggagccccaggtcgccagggcggcatgggaacccgaagacggggcaccttcacctcccgagctcgtgaccccggaggcctccgcgtcaagcgcagatgccagccaaccgggcacctcccaaccgctccaggagccggggctctcgtctgcactcacctccagcctgttagatgagctcctgtcaaccccagagtttcagcaaaaggcacaacctttcctagatccggcgccactgggggagctgaaggacgtggaagagcccgctttgctggaaccactcctcagacaggaagaacacagggctctgctggaggagcaggttggggcgggtttggggcagggtgggggcagggtgggggcagggcggcggcctctcttttgcagtgaacctcaggcttggtatggagaggcgtgtcttcccttccagctgacctccctaggatccctgagttccaggtccagcgagagactccacacagagtagggctgtcaacaatgaaaagaaagcattcctgagcatcccggggatcccagggccggtccaggtacagggaggtgggctgtctactgcgcatgcgcgggtttccaggcagcagcctagtcttctaactagcccaggcggagctctcctccctttcccccccgcgttcttcaatcgggttggcggagacctcagtccgcgaaacactgggccggggcagaatccaggccagttctcctttctgtggctcaactcctccgcctcttcgctcaccatcacttgccaacccgtgtcccgccagcctcctcgccagcaccatagagcgccttacaactaaataaagacccgagacctcgcgcaaaccagggtgctgccctttccaggcaagagggaaggcaggcagagatgaggacaggaacagagacagagtgagatggaaggatggagctaggcaaggatgggtggaaggagggaccccggaagggagagaaagagggagggagggagaaagggaggaaaaagccaggggagggagggtagaacagatggaaggatggacggagagacaaaaggagcaagaaacagagaacagaaggcagagacaaaaaatgtcttatgcctccagaaccaacaggacc

SEQ ID NO: 16532 - DNA, 989 bp, Artificial sequence
  DNA replication origin
taaaaagcccttcaacattttttaaataatagatgaaaaacatatcagagtcacttttaaaaatttgaattgacgattccacataacaggaaaaggaccaagaacatcttaaagaaatacttcacgatgaaagtgatgttttaagtgcaatttcatcaaggagaagtttttccagaaagtcttttgacctcaggaagaatctcattagtttactctggtaaatagtttctagtaaaatgagaaagagttgactttttaaaaacaataaaaaatttacacggtttaatctcatgttgtgatttcgaaagtgctgcttgggccctcatagttatgcatgtgtatttatacgcattttcttggctcactcaaacgccaataaaatactttactatccaggctccttaaaagccaaattaatttctaaaagtgaggattgtatgtattctgtgaggtgtgtgcaggtgtatgcatgatatgtgtgtgtggtctgtgtgtgtagtaggtacacggggtatgtatatgtgtgtgtggagtgtattgtgggtgttatgtgtgtatactgtgtgtagtatgtgggtggtgcatggtgtgtatatgtgctgtgtttgtggtgtatgtgtgtttggtgtgtatgtgtactatatgtgatgtgtgcatgtgatatgtgtgtggtgtatgtgatgtgtgtgttttgtgtgtgtatgatgctgtgtgtgtgcagtgtgtgtagtgtttgatgtgtgcttgatgtgtttgtagaatgtgtgtgtggtgtggtgtatgtatgtgaggtatgtgtttgctctatgtgtgtggcactgtatgtacgtgtgcagtgtgtggggagtatgtgtggggtgtgtggtgtgtgtggggagtatgtatggggtgtgtgatgtgtgtggtgctgtatgtgtgtgatgtatgtgtagtagattcgtgtgtggtgtgggggtatgtgcacgggtacatgtactgtgtggtgtgtg

SEQ ID NO: 16533 - DNA, 1726 bp, Artificial sequence
  DNA replication origin
cttctgtgcagaggctgaagccagctcaggacgagtatgtgacctggagcagcaccagggcggggaggaacagaagtgtaggcgaagtaaacactccctgacagcgtaggtctgtccagaacccacctccgtcttcacccaaatgctgaatggctgagatttccacttccgggtttctcccggggcggggggggggcggagctacggcggctgcagagggccgaaaggtgtccgcacgcatctgctccctggcaccctctcgaggagcccctgaggattcgtgcctcccagaggtggggaaagcccgcccgaggcttcggtgctgacggtggcggggctgccgggcacgctgtggaaccgcctcccgctagagctgtgggctggtgacggtcccgcgggggcgggaagcggctcaggctgccctcctggcctgcggcagtgcgtctgggagcgcgggccactcgtgcgcgggtcactcggggctgtgcctcgcgcgactgtgtgtgcaggaaacaagcaggaaataccctaaaatggaatgaagcgccatgttgagggccgcggacgtcgcgagtgctgtgggaatgtgggccaaggtggagagttatggtggcgcgtgttacagggtcaggagtcaggaagaagcctaatcatggagccggcatctgaggagggtcttgaacgctgggcaggcttttgcccaatagagatggaggaagctagtcctgtctgatggaggaaacagggcagaggcgtggagggagacgcgcagtgctggtgtgaggagccgcgagcaggccaggcctgtaaatcagcgtgatgggaaccaggatagagaaggcaagtcggggtcctgtggtcgctgaagaatttgaatgaaatcagtaaacaggtgagagggatccatcgcaagatcatgggatgaaacaagcagtagtccacggtgattcctctgcagcggtgggtattattaatcgcgtatgtgacaccaaaacggtgggtattattgatagcgtatgtgacaccaaaaccacccaatttaagctgtgactctttccctaaagtagaaaacagagatcagttgggttccaagcatccacgaagatcttattaaattcgtgatccctggtggcaccatggagtcaggattggctcatctcaaacctgactcagaaacaaaaccatctcaatgggcggagatgagcatccttacccgctatcataacgtattttctggtgttttcacagtgctgcgcttcctaatcaccattctagggcaatccacatgccatgatgcccagaggcattaacaaaggagacacacaggggctcctcacgttggctttccatggttttgatgaaaatctgtttcctcatctcatacaatgtggttcgtaatagtatcatttagggttgaagaattaaatggtacaaattatatagggtgcttatgataacctacatggaaaatgcctaggatatgttagctatgctcatcaccaacatcgttatatgatggtaataatcagatagtcaggaaggccgacaccaagaaaatggatacatgctctgagggaatgaatgtggagagatcagaaggtcaagaacaaagccgtacaacatgtctgcagtaaagggatagagaaaagaaaggctataaaagaaggaatgaaacagttagagtaaaattataaaatcaaagctaaggagaatttccagaaagggt

SEQ ID NO: 16534 - DNA, 1411 bp, Artificial sequence
  DNA replication origin
gctctgcgcctgcgccggcgctgtgggccgctctgcgcctgcgccggcgctgtgggccgctctgcgcctgcgccggcgctgtgggccgctctgcgcctgcgccggcgctgtgggccgctctgcgcctgcgccggcgctctgggccgctctgcgcctgcgccggcgctgtgggcctctctgcgcctgcgccggcgctgtgggcctctctgcgcctgcgccggcgctgtgggcctctctgcgcctgcgccggcgctgtgggcctctctgcgcctgcgccggcgctgtgggcctctctgcgcctgcgccggcgctgtgggcctctctgcgcctgcgccggcgctgtgagcccttgcgagggcggagctgcattcttaccagcacagacatcgccaggagagcatcgccaggtctgagctgagttctcctctgcacagacttcggagatacagcgaaggcggagcagtgttctcctcagcacagacccaggcgggccgggggcaccgcgagggcggagctgcgttctgctcagcacagaccccggggacaccgcgaaggcagagtagcgttctcctcacaacagaccttgggggcagtgcctcgctttgggacaactcggggccgcatagacggtgaataaaatccttcccgtttgcagccctgaataatcagggtcagagaccagttagaagggttcagtgtggaaaacgggaaaccaaaagccactctgaatcctgcccaccgaggttctccccagccaaggcgaggcggccgcagtgcgagatccacaccgcagccttggaagacaaatgcagcactcctaatgcagagatgacacccaaaatatgacacccccattgctcatgtaacaagcacctgtaatgctaatgcattgcctcaatacaaaaatattaatataagatccgcaatccccttgctgccatgcagtcctaagacagagatcataataatcaacattgacatagtcaatacaaacgtagtaatgaacctagggttaaggttggtgttagggttaggggttaggggttaagtttagggttaggggttggagataggggttggggtcagagttaggagttaagagtcaacgtttagagttaggggttaagagaagttaggggttagggataaggggttagggttgcattagtgtgagggtgagggttgtggttaggggttaggcttaggggttacggttaagggttagggtcaggggttaggggtcagggtcaggggttggggtctggggtcagggtcaggttcaggagtcctactctgtgagttgtctgtttactctgctgactgttccctttgccatgcaaaagctgtttagtttaattaagtcccagctatttatctttgtttttattgcatttgcatttgggttcttggt

SEQ ID NO: 16535 - DNA, 1619 bp, Artificial sequence
  DNA replication origin
ccctcccgcgaccccggccgacctccctgtcaccttttcaccaaccccctcccccgaacccggccgacccagccccaaatcccctatccaacccgaaatccctgatccaaccccaaatccgcgatcaacccccaatccgcgatcccaaatctgtgatctactccacagtccgcgatccggcccggtccaccacagccttcagcagcgacactcgcagcctccgacctctcaggccgagtgagcctcgcaaaggccttgggcgcgcgcctgcatggcggttgctgcccggctcccggaagccgctccctggcggcgcgcgctggcaggtggggctgcagctctgggcgggcgccgatgggctcgccggtcctctttggatcgcccgggcggccccaggatcgcaggagcgccgccagcccggcctgagaaggagggcctgtctggcattgcagcccgccccgctcctcctcggaagggagatagggtgctggcaagagcactccgcggccacctgggtggcttcgcggatggcccggcttcacgctgaggctctggccctggagtctgtgtggctagtgtcaggtagctggagaggcatggaggcagagtcaggggctgctccttcccccaccagccctcactgctgccagtaccccacgcgcggtttgcagctgcagatctggcactggcgtgggatggcggagcttcccttggatggcctcagggtcgcagagcgcacagcccacctggcctcaagttccgctcctcttgggcatctctctggatcctgggccctggcgctgggcactctctatccacacggatgaaactgagcggctgctggcggggcccgtcgcctgattttactgcctgggggtctggcctcagtatccgcgctgctggggggtgggcctggtctgggctgtccagtcacttactgccggtgcaccacgtctagactgcagctgcggctccgatgatggtgtgagctggcgggcctggtacctgatgtcctcagggtcaagtgcatcgcccgcccacttgaggggttgctgtgacttggcctccttcaagaacgcaggggccgccggggctggctcttcgtggtaaccgggatggtattgagcagcagattttcaccctggtgccactgctgtgcggactgcctgacttgggtgcccaggcaccggcctcagggtgcgcgtggcagctgtgtgtgcgggtagggggagtggcacggagggtcaggggttgcttcgtcatctctgcctgtgtgcaacttgcagttttgcagttttctgcagcagctgaggtgctggcgcgggaaagtggagctcccttggatggcgtcaggtttgcaggcacagagcacagcccaccaggcctgagggtctactcaggggccatggtggttgagttctccgtggaaactgggatggggtgaacggccagttcccgtcctttggcagcctggccaactgccagacttagcctctgccgcccaggcatctgtctctagggttgccgctacttggatagaagtggggatcggggtggggcgtggagcgtcaccggttgccaggccagcactgtctttgcaacatattcagatggccgcg

SEQ ID NO: 16536 - DNA, 1103 bp, Artificial sequence
  DNA replication origin
cgctctgcgaccctgaggccatccaagggaagctccgccatcccacgccagtgccagatctgcagctgcaaaccgcgcgtggggtactggcagcagtgagggctggtgggggaaggagcagcccctgactctgcctccatgcctctccagctacctgacactagccacacagactccagggccagagcctcagcgtgaagccgggccatccgcgaagccacccaggtggccgcggagtgctcttgccagcaccctatctcccttccgaggaggagcggggcgggctgcaatgccagacaggccctccttctcaggccgggctggcggcgctcctgcgatcctggggccgcccgggcgatccaaagaggaccggcgagcccatcggcgcccgcccagagctgcagccccacctgccagcgcgcgccgccagggagcggcttccgggagccgggcagcaaccgccatgcaggcgcgcgcccaaggcctttgcgaggctcactcggcctgagaggtcggaggctgcgagtgtcgctgctgaaggctgtggtggaccgggccggatcgcggactgtggagtagatcacagatttgggatcgcggattgggggttgatcgcggatttggggttggatcagggatttcgggttggataggggatttggggctgggtcggccgggttcgggggagggggttggtgaaaaggtgacagggaggtcggccggggtcgcgggaggggggtggtgaaaaggtgacagggagctgcccccgctcaagagccggaggttgggggtctgagaagtcaccactgtgaagttattcggctttgggagccgcaggggccagacggcccagggctccatagaacatgtctacacgggttcggataccgaatccgggactccgaactgcagaagatccacagggcagctgtcaagggcgacgccgcgggggtggagcgctgcctggcgcgcaggagtggagacctagacgccctgaacaagcagcacagatagcgggggctcagcccagggtgggagggggtccccaggcccggcttccccgcagcccctgggacagggcctttcagggctccgggcaccct

SEQ ID NO: 16537 - DNA, 1026 bp, Artificial sequence
  DNA replication origin
cagacggggtggtggccgggcagaggggctcctcacttcccagaaggggtggccgggcagaggcgccccccacctcctggacggggcggcggccgggcggaggcgagacccccacctccctcccggacggggcggctggccgggtgggggctgaccccccacctccctcccggatggggtggctgccaggcggagacgctcctcacttcccagacggggtggctgccgggcggaagggctcctcacttctcagatggggcggctgccgggcggaggggctcctcacttctcagacggggcggctgcccagcggaggggctcctcacttctcagacggggcggctgccgggcggaggggctcctcacttctcagacggggcggctgcccagcggaggggctcctcacttctcagacggggtcgtggccaggcagaggcgctcacatcctagacggggcggcaggtagaggcgctccccgcatctcagacgatgggcagccgggcagagacactcctcacttcctagacaggatggcggccgggaagaggcgctcctcacttcccagactgggcagccgggcagaggggctcctcacatcccagatgatgggcggccagacagagacgctcctcacttccaagacagggtggcggccgggcaaaggctgcaatctcggcactttgggaggccaaggcaggtggctgggaggtggaggttgtagctagccgagatcacaccactgcactccagcctgggcaacattgatcactgagtgaatgaaactccgtctgcaatcccggcacctcgggaggcccaggctggtggatcactcgtggttaggagctggagaccagcccggccaacacagcaaaaccccatctccaccaaaaaaatacgaaaaccagtcaggcgtggcggcgcgcctgcaatcgcaggcactcagcaggctgaggcaggagaatcaggcagggaggttgcagtgagccgagatggcggcagtacagtccagctttggctcggcatcag

SEQ ID NO: 16538 - DNA, 832 bp, Artificial sequence
  DNA replication origin
agcccctccgctgggcagccgccccgtctgagaagtgaggagcccctccgcccggcagccgccccgtctgagaagtgaggagcccctccgctgggcagccgccccgtctgagaagtgaggagcccctccgcccggcagccgccccatctgagaagtgaggagcccttccgcccggcagccaccccgtctgggaagtgaggagcgtctccgcctggcagccaccccatccgggagggaggtggggggtcagcccccacccggccagccgccccgtccgggagggaggtgggggtctcgcctccgcccggccgccgccccgtccaggaggtggggggcgcctctgcccggccaccccttctgggaagtgaggagcccctctgcccggccaccaccccgtctgggaggtgtaaccaacagctcattgagaacgggccatgatgaccatggcggttttgcggaatagaaaagggggaaaggtggggaaaggatagagaagtcagattgttgctgtgtctgtgtggagagaggtagacatgggagacctcattttgttctgtactaagaaaaactcttctgccttgggatgctgttgatatatgaccttacccccaaccctgtgctctctgaaacatgtgctgtgtccactcagggttaaatggattaagggcagtgcaagatgtgctttgttaaacagatacttgaaggcagcagactcgttaagagtcatcaccactccctaatctcaagtacccagggacacaaacactgcggaaggctgcagggtcctctgcctaggaaaaccagagacatttgttcacttgtttatctgctg

SEQ ID NO: 16539 - DNA, 2535 bp, Artificial sequence
  DNA replication origin
ggctctggctccagcctccagcatgcagcggtgtctcttccttctcctcgtcttccagcccggcaggagaagctcccgctgctagcctccctcctaccgctccgtcaccaacacaaccaacagggaggcagcgccccaggctccaggctccaggctccagcgggtaaaaactaatggacccttctagttctctaacccaggtacctagcagctgagcacaccgacacagaagacccaaaaatgacgcaccacttcctcagcacgctttatatactgaagttacggatcctggactacatgttctgattggatgagagaaaaacctctaggcctactctgattggactttattttcatgctgtgattggttatcttaagacttgctctcatgcaatcagaacatgaagtctaggaaccggcatgcgcataacctccgtatataaatgatgctgaaaagctgttacggttttttttttttagggttcggtgttttactgttgagctgctcagtgcccagcttagaggaccaggaaaaggagtcaccggccgtatgctggaggcttgagacacggcacagcggcgcagctcgcctcgctatggttggtggtgtcagtggagattgcgattgccgcgcggctggaggggtaggaagaggaaaatagttttgggatagatagaggggtgggtaaagagtttggttattgccaaagggaaaaaaggatagcgaggaggagaaggcgttgcaaaaagacgatggggaaaagatggtggggaaaaaaggttttgggtagatggaggtggaaagacagggtgtggagctggagtgagggaaggttttgcagaaagacggtggatagaaagtttatgggtggatgaagggggaaaagatggtggcaattggggagaggagagagtggtgaggtgggggaaatgggctagcagtagggagagagggttttgtgaaaagacagtggggagagaagtttttgggtagatagaggagcagaagaagatagcaagtgggagaaggaaaaagggtaactagcgggaggaagacaaggttttgcgaaaaaacagtggcagaaaagaaagatggttgcgaaaagacggtaggtaaaaagtgtttgggtagatggaggagggaaagagggtgacgaggaggagaaaggagggtggcgagaagggagcagggaaagaagggtgggaaaaagacgggaaaatagtttgggatagatgcagggcaaaaaaaagggtgacaagcaggataggggagagaagaggacgagtgggaagagggggcagactttgtgaaaagatggggaaattttggggggtagatggggggaagagagaggtgagcaagagtggggagaaggctttgagaaaagatggtggggaaatgtttttgggtagatggagaagggaaagagaggcaaggaggagcaggaggaaagacaatgaggaaaacagtttttgggtagataaagggggaaaagagggtggtgagcagcaggagtagggaaaaggctttgggaaaagacggggggaaaatgtttttgcttagatggaggaggaaaagggcatgatgacagcaggagggggaaaaaagagggtggccagggagaagggggaaaatacggtgggaaaaaacgggagaaagtgtttgggtagatggttggggaaaagcgtggtgagcgggagaatagagaaggctttgcgaaatgacgggggcgggggcggggagaaaacgaaatgatggtggggagaaaacggtgaaaacgtttgggggtagatggaggaagagaaagggtggtgagagggagagggcgaaatgcggtcgggaaaagaaggtggggaaatagtgggggacaaaagttttgggtagatttttaaaaataagattatttgtattttcacttttgagtagtttgagttctttagatattttgtgtattaacctcttgcctgatgcatagctgcaaagactttcttccattctcgggttctgtcttcattatactgattgcttcctctgctttggaaaaggttttaagtttaatgtaattacatctttgcttttgttgcttgtgcttttgatgtctatttgaaaattccttgtcctaaccaatttcatgaagcatttatcctatgttttcttctctggtagtttcatagtttcaggtcctgtatttaaatcttttattttgagtagatttttgtatatggtaaggtaatggcctagatgtattcttgtacatgtgggtgttgggttttcctagtacagtttattgaagagattgtccttcccgaaggtgtgttcttggggcctttgttaaaaatgaattgaccgtaaacgcgtgaatttatttatgatttctctattctgtttcacttgtctatgtctgtctgtctcattcgttcatctctcttgtctctcccccgccccttttattgagagtaccatactgttttgatagtaccatccttactataaatttgtagtatattttgaaatcaggtagtgtgatgcctcca

SEQ ID NO: 16540 - DNA, 875 bp, Artificial sequence
  DNA replication origin
atcctgcgccagtgccagatctgcagctgcaaaccgcgcgtgtggcactggcagcagtgagggcgggtgggggaaggagcagcccctgactctgcctccatccctctccagctacctgacactagccacacagacttcagggccagagcctcagcgttcagccaatccgcgaagccactcaggtggccgcggagtgcccttgccagcaccgtatctcccttccgaggaggagcggggcgggctgcaaggccagacaggccctccttctcaggccgggctggctgcgcgcctgcgatcctggggccgcccgggcgatcccaggagaaccggcgagcccatcggcgcacgcccagagctgcagccccacctgctggcgcgcgccgctagggagcgtcttccgggagcccggcagcaaccgcggtgcaggcgcgcgccgccagggagcgtcttctgggagcccggcagcaactgccgtgcaggcgcgcgcccaacggctttgcgaggctcactcggtctgagaggtcggaggctgcgagtgtcgctgctgaaggctgtggtggaccgggctggatcgcggattgtggagtagattatagatttgaaatagcggagttggggttggatcggggctttggggttggataggggatttggggctgggtcggccggggtcggggaggggggtggtgaaaaggtgacagggagctgccctcgctcaagagccggtggttgggggtctgagaagaagtcaccaatatgaagttattcggcttcgggagccgcaggggccagacggcccagggctccatagaccacgtctacacgggttccggataccgaatccgggactccgaactgcagaagatccacagggc

SEQ ID NO: 16541 - DNA, 2544 bp, Artificial sequence
  DNA replication origin
atgctggaatgagttaagactttgggggactgtagagaaggcatcattgtattttgcagtgtgacaacgatatgagatgtggggggacctgggtgagaataatatgatttggccctgtgtcactaccaatactctcgtgaaattgtaatggggaatgttaaaggtggggcctggtgggagatgatttaatcatggagaagagtgggggttggaggtgggggagtggggagaataggagagattattttgtgggtgggggtgaaaaatgaggggggacggattcttcacaactggtgaaacactatctccttaatactgtctgcgtgatagtgagttctcttgatgattatggagcttaaagattgagtgaatattgtcctgctggggtttggactgacatttttgtcatttttctggggaatttcttccctttggattgagaaaccttacttaatgcttgtactatcattgtatcttgaaagaaaagaaatgccttttgaactcagggactgataggccgaagggactgtagccttgtctcagatgagactttgaattttttatatttggaatgagttaagaattttggaaacttttgaacatgcatgactgtgttttgctgtgtgagaaggacatgaggttctggggtatctgggtcaaataatatggattgactgtgtgtccatataaaactcatatggaattgtaatccttaattttggggcctggtggtaggcgatttaatcttgaatgggagggggttcggggtggtaggaaaaggaggggtagggtggggaggagtaggttgtcagtagggtggtaggaggatagggggtagtaggaagggggagtagccttctgcagaggcagaggctcatggaaaacctctactagggcagtgcacctgtggctttgcaggctttagccccatggctgctctcatgggctgggctggtgttgagtgcctgtagcttttccatactgagggtgtgagctgttggtgggcctatgaatccgggatctggaggatggtggcctcctttttgggggctccaagcccatattttccttctgcactgccatagtggaagtttctcaagaggcttggcctctgcaggaggcttctgcctggaaacagtgggtggtggtgtgggtgcaggatcttcttgatgctgatctcctgatagtgagacctcatgtgatctggttgtctaacagggtgtggtacctctttcctctctctgtcttgctcctacccctgccatatgaaacatctcattgccacttggccttctggtatgattaggaagggcctggtcagtgtgggcctggtcagtgaactagtcagttgggacttggtcagtgaggcctatttactgggggaatggtcagccagggtctgcttagagagggtctcattagagggatcgagtagtgcaggtcttggtgagtggggacctagtggcagacaaatgtttggtgtctggtcagtgcaaacctgggctgcagggcttggtgagtggagacctggtcagctgtggcttagtggtagccttgtcagaatgggctgggtcactggtgacccggtcaaggggtgctattcagtggaggcctggtcacatggcacctagtcagcagggcatgtcctcatcagtgaggccgttgtcagtgggaccctggtcatggcagcctggtcaggtcagtggaacctaatcagtgggggcctggtcagagaggacttgatcagtggtggcttttgtagcactggtctatggggtgacctggtcaacgggggtctgagcggtacatgcctgttcagtggtgcctagtcactaggttcctggtcggggcatctggtcaccgcaggcctggttagtagggacctggtcactggcagcctgttccctggagacctggtcagtggggcttcatctgtggggccaggcaatggggtcatgattggtggaatgtggtcagggaggtcttgtcagtgaggccctggtcagtgaggccttgtcagtgaaatccttgtcagtggggtcctggacactgtgggcctggcagcgggaatctagttagtggggcctggtgatgggggcctaatcagtgagagtgtggtcagggaggacctgatgtgcgggatctggtcagcagggacctggtcagtggggctgctgagcactgctgggaggtgtcaggggaaatgcatgttatcaggggccctatggacagctgggatggcccagtggtgtccagtggcccagtcaaaagtggacaaagcaggtgtttggatggacctgggagatcttgctcagagattctgaaagaacaaaggtaaaggaagggccagagtgggtagagagatggtcacagtctatgggctgcacaggatggaggaagccagggaacaggcagggtgggcagtaggggtgcagggagaggcaggtgcatgctgggaggtcggaccctgtgagggctgtgggggcgtcaggtggggtgggctccaggtgcactctcagtgtgcactgggcaggtctcggtcca

SEQ ID NO: 16542 - DNA, 1439 bp, Artificial sequence
  DNA replication origin
ttttaattcccttgagaatgcttgttatagattgaaggctggtaaggggttgggctcctctttcttcttcctggtgccagagtgctcccacatgaaggaataggaaaggaagatgcaaagagggaaatccttcgaacacatgaagacacaggaagaggcctcttagggctccaagggctccagggaagcagctgcagaggttgggtggggtgaggggccagggtccactgaccctggggccaggcaggaatcactctgttgcctggggctcagaaggcagtatcacccatggttcctgtcattgctcatgtattttgcctttcaacaattattgtgcacctactgtgtgcaggccctgcctggacactggggatgcgcagtggatgcactgggctctgcctttgagggttgcagtttaatgggtgacaggtaattataaggaagaaggtgagtgcagagtgggaggcttggaggctgtggggcttggggtgggggagctcacatccagcctctgggccaaggccaggaggtttcccagaggaggagacagagcagggtattgtggtggggggtgtcctttttggggctgggatctgcactttacagtttgaggggatgggcagaggaggctgggcttcattctggaggtggggacatggtgaggtgaggtttagaaagcacacctgagccgcagtgtgtaggatgctggaaatggtggagatgggcctgcgaagagagtgctgggaagtgatgacccaggagcagcagccgggcacctaacaatgggtcagcaccatgggcgtggagacaagggccgggattgatcaatacccgagaagtacaatgtacaggacttgggctccatttggatggagtgggtgagggaggagtcagaaatggcttccggtttccagcttgggcccggggattggagatgtccccactgagagtagggcacaagtgaggaaatggtttggagaggaagatgataagttacatcatggatgtgctgagtctgagttgcctatgggacttggaatggggggtggcaaaaggtgtgtgatcttgagcaagatattcaactcttctgggccttggtcttctcatttgtaaaacggtgataagaatattacttcccatttgtgttgctgtgaatattaaatgcgctaccacatgtaaaatgttgagaatcgtttctagctcagagtaagtgctcaataaacaccattacgccttttatatggtctggagctcagaagtggaagacagggttttgtgaagtcatggctttgtggatgtagctagattgtggagtaatggcaggagggtcgggggcatggcacaaggtaggtggtcaagagacactggacacaacccaaatgtccatccacaggggaacagatacatacactgctgcgcaattgcacataatagaatcc

SEQ ID NO: 16543 - DNA, 1314 bp, Artificial sequence
  DNA replication origin
tttcagctggggcaatgctcatcacactgcatagtaattgctcagttaggccaggcacagtgtctcacgcctgtaatcccagcacttgctgaggcgagctgatcgcttgagcccaggagttcaagaccagcctgggcagtatgacaaaacctcatctctacaaaaaaaaaaaaatacaaaaattagtcaggtgttgtggtgtacgcctgtggtcccagctaatggggaggctgatgtgagaggattgcctgagcccagaaggcagaggttgcagtgagctgagatcacaccactgcactccagcgtgggtgacagagcgacaccctgtctcaaaaaagaaaaaaaaaaaaagcttaattaattaacggtttttcttcctaagggctgggatcataccagtttgcttcactgcagtgcctgaacatagtaggcatagtagattcaataaatctttggttccttggctggttgttgcctgctctgtgctgatgagaaaggagccaggcttccaggattcccttggtgttcttggctccctgctctgtctacctctcccctgcctctatggtaccttcccaggactgtctttgggctgctgcttgcattgatagggtctcttcttcagggctgaggaggctggtcatgggataatgagacccctatacgatgctgcatgggagctggagttggatgggggccagtggaatatccgcgcaactctgcatccccctccatctactcatccctggttttgtttctctggagtaaggaatagagcaaggactgggatgggtgagccatgaacagagggtctcagctgaaaagtggaagatgttttattccatgcctggacgtctctcattccctctgcttactttttgctgctgtgaggtcaggggaatttaggagccctgaggaatgctgctgctctccctagcagggcgaggtgaccctccactggctcccatccaaccccacctcccatgctggaggtaaccacagaagaggagagagaagtggacagagcggaaagacaagaacaccaagagaatcctggaagcctggctccttcctcatcaccacacagcaggcaagacacagtaagcaacagataaccaccaaccagccaatgaactcaagatttcttgaatctactgtgcctagaatgttcagtcactgcagtaaaggacactggtacaatccagcctgtgggaagaaaagcaatcaattgagcaattactatgcagtgtgatgagcattgccccagctgaaagagtgggcactgtggggcatgtggaggaagtgaatggccta

SEQ ID NO: 16544 - DNA, 1690 bp, Artificial sequence
  DNA replication origin
cgccgcgccgccgctctccgccgcgccgccgccgcccgcctcgccgccgccgcccgcctcgccgccgccgcccgcctctccgccgcgccgccgccgcccgcctctccgccgcgccgccgccgcccgcctctccgccgccccgccgccgaccgcctctccgccgccccgccgccgaccgcctctccgccgcgccgccgccgaccgcctctccgccgcgccgccgccgaccgcctctccgccgctgtccgcttctccgccacgccggcaccggcgctgtgtgcctttgcaagggcggagctgcgttctcctcggcacagacccggagagcattgcgagggcggagctgcgttctgctctgcatagaccttggggcactgcctcgctttgggacaactcggggccgcatcgacggtgaataaaatccttcctgtttgcagccatgtttgtggttggtggcagcgatggagactgcagccagccagtgtagaaaggcattggggtaagtgcgccatccaggctgcactgctggtggcctgggacgggttgggagccctatctcaggcgtcactgcccgtcttgggtggctggttgggtgtgctatctggggctgtgctgcctgcccgggggcggggggggggcggtttgggggctcaaaccggggctgcactgcctttggcggggagccggttgggggcactatcccagactgtattgctggcaacagtgaggtgggttaagtgtgctatctggggctgcactgtgtggctgtgggggggggtggcggttttgggttgagggcgctatgggctgctgtaatgcccatggtgcggggaggcggggcggttagggtatgttgggtgtgctattgggggggggcgacactgctggtggtagggggcagggtgggttgggggccatatcaggggctgcactgattgctttagctaggatttctggtactatgttaaacaacagtggtgacagggggcatccttatcatgttccagatcttagaggaaaagctttccatttttccccattccatatgattctagctgtgggtgtctttcctgtagtttttattatgttgcggtatgtttcttctgtgcctgtttctttgaggatttatagcatgaagggatgttgaatttcatcacatgcttttttggtttcagttgacatgatcatacggtttttgtcgtttatttggttgatatgatgtatcacattgtatgttgagtgactcttgcattccagggatacatcccagttgatcatgatgaattatctttttaatgtattactgaatttgattcactggtattctgttgaggatttttgcatcaatattagagatcctgtcctgtagttttcttctttgatgcttttatctgattttcgtatcacagtaataatggtctcatagaataagtttggaagtattccctcctgtttttcaaaataatttgagcaggatttgtactaggtctttaaattgtttggtgtgaagccatcagcagtgaagacatcatcagttcctgggcttttctttactgggagactttttctgatggcttcaatctcattacttgttaccaatctgttctggtcttggatgttttcattgtttaacctaagtaggttgtatgcatctaggaatttgccaatttctactaggctttccaattta

SEQ ID NO: 16545 - DNA, 1046 bp, Artificial sequence
  DNA replication origin
gcggtgggggggcaaaaagccgggtcgagcaaaaagtcgcggcgacaaaaagccacggcggcgggggtgaaaaagctgcggcggtgggggagcaaaaagccgcggcggctgcggcggcggcggggggtaaaaagccgcggcgggcagaaagccacggcggcgggggtgaaaaagccgcggcgacaaaaagcctcggcggcggcggggggtaaaaagccgtgaggggcaaaaagccgcggcggtgggggggtaaaaagccgggtcgagcaaaaagccgcggcgggcagaaagccgtggcggcagcgggggtgggcaaaaagccaggtcgggcaaaaagccgctgcggcggggggggggtggggggcaaaaagccgcggcggtagggaattaaaagccgtggcgggcataaacccgaggcggcgggtgggggcaaaaaaccgcggtggggaaaaagccgcggcggcggggaaaaagccgcggcggcggagaacaaaaagccgcggcggcgaagggcaaaagagccgctgtgatgagggtcaaaaagctgcggcgacgcggggcaaaatagtggagatggggtagaaggccggcacagcttggctttgctggagtgtgatgtgataggaaatgtgcagccaaagacaaaaaaagatgtaagtaggcttgactcattgcagccaagaacccagatgttatcttgagggttttaactaataagcagtttaaatcagaatggcacattctgatttgttttttgtatattcacatttggcaggcatagataccgttcgaagagaaaaatgtcagtagatagaggtaacaaacttaaatatgtgccgaatctagaaacaagagactagggggataaggaccttttgaaataaaatgcgagatttgaaaactgattgactgggggatgaggaaaaggcaggtctttaaggtcaatccctgttttgctttaagttgttagggggtggttttatcacatattgtagaatacgtcatttcagttttgaacatcttgagttaaatcgtcctaacatagc

SEQ ID NO: 16546 - DNA, 1343 bp, Artificial sequence
  DNA replication origin
acttcttccacatgccccacggtgcccactctttcagctggggcaatgctcatcacactgcatagtaattgctcagttaggccaggcacagtgtctcacgcctgtaatcccagcacttgctgaggcgagctgatcgcttgagcccaggagttcaagaccagcctgggcagtatgacaaaacctcatctctacaaaaaaaaaaaaatacaaaaattagtcaggtgttgtggtgtacgcctgtggtcccagctaatggggaggctgatgtgagaggattgcctgagcccagaaggcagaggttgcagtgagctgagatcacaccactgcactccagcgtgggtgacagagcgacaccctgtctcaaaaaagaaaaaaaaaaaaagcttaattaattaacggtttttcttcctaagggctgggatcataccagtttgcttcactgcagtgcctgaacatagtaggcatagtagattcaagaaatctttggttccttggctggttgttgcctgctctgtgctgatgagaaaggagccaggcttccaggattcccttggtgttcttggctccctgctctgtctacctctcccctgcctctatggtaccttcccaggactgtctttgggctgctgcttgcattgatagggtctcttcttcagggctgaggaggctggtcatgggataatgagacccccatacgatgctgcatgggagctggagttggatgggggccagtggaatatccgcgcaactctgcatccccctccatctactcatccctggttttgtttctctggagtaaggaatagagcaaggactgggatgggtgagccatgaacagagggtctcagctgaaaagtggaagatgttttattccatgcctggacgtctctcattccctctgcttactttttgctgctgtgaggtcaggggaatttaggagccctgaggaatgctgctgctctccctagcagggcgaggtgaccctccactggctcccatccaaccccacctcccatgctggaggtaaccacagaagaggagagagaagtggacagagcggaaagacaagaacaccaagagaatcctggaagcctggctccttcctcatcaccacacagcaggcaagacacagtaagcaacagataaccaccaaccagccaatgaactcaagatttcttgaatctactgtgcctagaatgttcagtcactgcagtaaaggacactggtacaatccagcctgtgggaagaaaagcaatcaattgagcaattactatgcagtgtgatgagcattgccccagctgaaagagtgggcactgtggggcatgtggaggaagtgaatggcc

SEQ ID NO: 16547 - DNA, 1515 bp, Artificial sequence
  DNA replication origin
cctctccgccgcgccgccgccgaccgcctctccgccgcgccgccgccgaccgcctctccgccgctgtccgcttctccgccacgccggcaccggcgctgtgtgcctttgcaagggcggagctgcgttctcctcggcacagacccggagagcattgcgagggcggagctgcgttctgctctgcatagaccttggggcactgcctcgctttgggacaactcggggccgcatcgacggtgaataaaatccttcctgtttgcagccatgtttgtggttggtggcagcgatggacactgcagccagccagtgtagaaaggcattggggtaagtgcgccatccaggctgcactgctggtggcctgggacgggttgggagccctatctcaggcgtcactgcccgtcttgggtggctggttgggtgtgctatctggggctgtgctgcctgcccgggggcgggggggggggcggtttgggggctcaaaccggggctgcactgcctttggcggggagccggttgggggcactatcccagactgtattgctggcaacagtgaggtgggttaagtgtgctatctggggctgcactgtgtggctgtggggggggggtggcggttttgggttgagggcgctatgggctgctgtaatgcccatggtgcggggaggcggggcggttagggtatgttgggtgtgctattgggggggggcgacactgctggtggtagggggcagggtgggttgggggccatatcaggggctgcactgattgctttagctaggatttctggtactatgttaaacaacagtggtgacagggggcatccttatcatgttccagatcttagaggaaaagctttccatttttccccattccatatgattctagctgtgggtgtctttcctgtagtttttattatgttgcggtatgtttcttctgtgcctgtttctttgaggatttatagcatgaagggatgttgaatttcatatgcttttttggtttcagttgacatgatcatacagtttttgtcgtttatttggttgatatgatgtatcacattgtatgttgagtgactcttgcattccagggatacatcccagttgatcatgatgaattatctttttaatgtattactgaatttgattcactggtattctgttgaggatttttgcatcaatattagagatcctgtcctgtagttttcttctttgatgcttttatctgattttcgtatcacagtaataatggtctcatagaataagtttggaagtattccctcctgtttttcaaaataatttgagcaggatttgtactaggtctttaaattgtttggtatgaagccatcagcagtgaagacatcatcagttcctgggcttttctttactgggagactttttctgatggcttcaatctcattacttgttaccaatctgttctggtcttggatgttttcattgtttaacctaagtaggttgtatgcatctaggaatttgccaatttctactaggctttccaatttattgg

SEQ ID NO: 16548 - DNA, 1006 bp, Artificial sequence
  DNA replication origin
caaaaagccgggtcgggcaaaaagccaggtcgggcagaaagccgtggcggcggcggggggggcaaaaagccgcggtgacaaaaagccacggcggcgggggtgaaaaagccacggcggcgggggtgaaaaagccgcggcagcgggggtgaaaaagccacggcggcgggggtgaaaaagccgcggcagcgggggtgaaaaagccacggcggcgggggtgaaaaagccgcggcagcgggggtgggcaaaaagccaggtcgggcaaaaagccgcggcggcggcgggggggggtggggggcaaaaagccgggtcgggcaaaaagccgcggcggcagggaactaaaagccgtggcgggcataaacccgaggcggcgggtgggggcaaaaaaccgcggtggggaaaaagccgcggcggcgggggaaaagccgaggtggtgcttggggcaaaaagccgcggcggcgaagggcaaaagagccgctgtgatgagggtcaaaaagccgcggcgacgcggggcaaaatagtggagatggggtagaaggccggcacagcttggctttgctggagtgtgatgtgataggaaatgtgcagccaaagacaaaaaaagatgtaagtaggcttgactcattgcagccaagaacccggatgttatcttgagggttttaactaataagcagtttaaatcagaatggcacattctgatttgttttttgtatattcacatttggcaggcatagataccgtttgaagagaaaaatgtcagtagatagaggtaacaaacttaaatatgtgccgagtctagaaacaagagactagggggataaggaccttttgaaataaaatgcgagatttgaaaactgattgggggatgaggaaaaggcaggtctttaaggtcaatccctgttttgctttaagttgttagggggtggttttatcacatattgtagaatacgtcatttcagttttgaacatcttgagttaaatcgtcctaacatagcttatgaatttgatt

SEQ ID NO: 16549 - DNA, 664 bp, Artificial sequence
  DNA replication origin
ctgaaagagatgcatccgcctcccggtggcgacgccagacccttgccctcctcccaaggctgaggaccaagtgagggctgcagcacgggaagggtgccggggtcgccaggtccgcgccttctgctttcttcggtgccccggcatagacgggggccgagagcagtaggtagcgaagaggatgcgggtgcagcagagcgtaagggcatctcccgggggcggtgttggggtaggcccccgggactggctgcggcggggcaggggccccaagcagagggcctgggtgggggttgtgcagggcggcgtgcgcagcaggtagagggaaggggtggggcaggtgggctcccggggtcagttggtggcgcttgaaacgcttcctacgccggagaaagctgccattgtcgaacatgtcctgggaggcggggtccaggctccagtagttgcccttgcctgggtggcccggctcgcgggggatcttaacgaagcagtcgttcagcgagaggttgtggcggatgctgttctgccaggcggggaacttgcggcggtagtatgggaagcggccactaatgaaggcgcagatgccgctgagcgtgaggcgcttgtgcgggttttgcaggatggccatggtgatgagcgcgatgtacgagtaggggggctttgccggctg

SEQ ID NO: 16550 - DNA, 600 bp, Artificial sequence
  DNA replication origin
atgtggtgagcccatcctatctcactcggagggggccagaatcggatctcaacgggagtccggagaacacagcaggcgtcctgaagctccccctccctccgtggaagtcggctcaagcaggtcctgaggacaggacccctgggggtttgggcttgggacaggacgagacacccgcggccccctctcccacgccgccccaaacaggacccaggatccagccgccgccacagcggcagcaggagcatcgcggccgccgcggggcggtggcaatatttaaaggggacgcagcctatctgtccggagcggagcgcgagtccgctcagccaatgcgcatgcgcgaggcgcgagcagtttctcccatcacagtggttcccacggttgtcttagaaaccagtccccgaggcttggcagagcaggagccctccgtggcagtgcttgggtgtccaggctctgaggctccggcctcacctctccacggggtcgaagggaacgtctccggatgccaggagtcgcaaagggccgaccatgatgatgaaaccccaggcggagacgggggaagcagcacgggatcccagcctcaggcctgcacagacggtgttg

SEQ ID NO: 16551 - DNA, 984 bp, Artificial sequence
  DNA replication origin
gcgaatcgtcccagccaatgcgcatgcgcgaggcgctagtggcttctcccttcacagtggttccttcggttgtcttagaaaccagtccctgaggcttggcaaagcaggagccctcggtggcagtgcttgggtgtcggggctgtgaggctccggcctgacctctccacggggtcgaagggaacgtctccggattccaggagtcgcaaagggccgaccacgatgaggaaaccccaggggggtacgggggaagcagcacgggatcccagcctcaggcctgcccggacggtgttgttggttgggtgggtctccccaaaagtcgtgccgccatccgagaccccgaggacaggtcggcctgcgtgaccctgggctgctctctcacccgagggtcgttctcgtcgtgaggagaactccgcagcctcagagattgcctggtggtgtgtgtttcaattcctctgctgtattactctgtgtgtgtgtgtgtgtgtgtgtgtgtgtgtgtgtgtgtgtgtgtgtgtgtgtgtctcccattctctcttctctctccctctctcagtctctgtgtgcttctttccctctctctgtgggtttgtgtgtgcatgcccgtgtgcgtgtgtgtttttggctggaggtgccctgtgtgccacaaagcggtttttcgcatggcggtctgtctttgttgagcctctttctgcgtctctgcctgggtcatgaggccggttgtcaatcgtttttgctgctgtggatccactttggctctgtgaaggcctggcccacgtgaggagatgtgtcggtctcggagcaattgaagtctcatccccatcctgagcggcctcttttctagcatcaaaacgaacacactgcagatgaggagaagaatcccacaggagctctttgtcctacaggagagcagcagacccatgtcagagaagatgcttgagtcttttcacggctcttctctgagaaatgaagccacaccacgataca

SEQ ID NO: 16552 - DNA, 1446 bp, Artificial sequence
  DNA replication origin
tacgtacagcaggctgtgggggtggagggtgagggaaggccaggaataaacgaccaggatggagcgggctggcaggagagaaaatgcgccccccgccctttgcgggaacagccaaggggcctcctcagctcgcagctcaggcggccgcgctgtgtaccggtccggagccagggccgggctgggggaggggaggcgggggagggaggggaggcgggggagggaggggaggcgggggagggaggggaggcgggggagggaggggaggcgggggagggaggggaggcgggggagggaggggaggcgggggagggaggggaggcgggggagggaggggaggcgggggagggaggggaggcgggggagggaggggaggcgggggagggaggggaggcgggggagggaggggaggcgggggagggaggggaggcggaggcgggccctccccgggcgctgtgaactttagctgggccgccgcctgtaagccccagaaagcattaaaggtgcagcagcccgcgccagactccgcagccgcctttgtacacgtgatttatgacttcaatcttggttcaccaagagttcacacggctttggctgctgttgaaggttaaaagatggtcttcgcttgacaagttggactattgaaaattccttcttcttcttttttttttttttattttagaagcaaagagcagaggctcaggagagaaaaaaattggggggtgggggcaggggacaggggttgcaggtgggccaaaatggtaggtcaggaaggtttgtcttcctatatttaggctttttgttgttaggatttgcgtgtgtgttggggagagggtagataataagagggagctaggcaagagatgtaaagatctctcatatgtagaggtcaaaggagtgaaaaaaaaactcgtgcttccacagttaattatctgggtaacttgggtcacaccccctaactgatcctcctccagaaaccagaaatgggccaggtaagggagagagtttgggtaaagggtaaggtttgtgtgcttctcactgggtgtacttgatcatccaccttacctgggtaactacttttttttttttttttttggaaatggggtccagctctgtttcccaggctggagtgttgtggcaccatcataattcactgaagcctcaaactcctgggctcaagtagtcctcccaccttagcctcttaagtatgtgagactgcagacatgtgccacaccaccaggttgggtagctgcttttcaatgtgcttctgcacccacagatttggaaaagggtatttttaggcagcagtctttcaactctcttcatcctgtatgtttagcctgccatttacatttgatgcacatgaagaggctaatgggaaggaaatctatagaactggaattggaagtccttttgaatcccaaatccccttggtctaagagccagtct

SEQ ID NO: 16553 - DNA, 1458 bp, Artificial sequence
  DNA replication origin
tcccaaatccctcccaaaggctgaggatactgcatctgagaaatgggcttctgaggatgtgtcagacatggcccaggaggcatcagccagggcagggctcaggggctcctacaagctgctcctggctgctgtgccctgcctgctggtcacccgtcctgcactaggtgatagggtcctggagggcagcaggaccatgtcataggaggtgtgaatggggctttgctgcaggctgtgggtggggactggggctcctgggggccgaggcacatggcaggcaggggaagaagctggggcagggtgcagagtgtggggagagcgtgctctcccggcccaggcctcatctggaaatgggaggtgattttccagcacaggaagctcctgggcttagaggctggacgttgcctcagtgagctatgggcagtgttcctcctggggtggggtgggagggggaacttatggcccctggggaccttggggcccggtggggtccagtgccctgggagggtcccagtgtgggggaaggaggggtcggggggtggtgtttaggcatgcaaagggtggagatgcccctgtaagtctggagctggcagcacgggtgtctcaactgcagcctttagggccacagtggaccagcagaggcttcacctccctggggaccccagcagagcacgaggcaggggcctctgtaggccttgatcccacttttctctgggtgggcccgtggcagcaggtgtttgatgagccggagatggggagcctgccttgcatggtctcgccctgcctgcacagacgctcaccccgccccaccctccaggacactccgtggggcatcgctgctgccccatgaggatcccccttggggggtggaggtgtgtgggggccaaaggtggggcctgaggagctgtgtctggggcctcagaagatgctggtcccctgccctgtctacacagcctggctgtcctggggggatggggagacaggacacaggccacgggtctgtgcgggctgctgtgcggctggggagagccagcaccccgagggaggaggtggctgctggggaggaggatgaagcaggaaggggtcaccccactgaatggggtgtgggtgcagtccctttgtcctgaagccacacatgcctggttcgtggcctttgactcatgctggtgatggtcaccatgtgtccaggacagagcctggaagattaagagcgtgtttaatttttaccactggccagtgatgctggtgttttcagaggggaactgaggcctgtggaagggaaatagctgaccgggggcagaacactgctggccagtgacaaagggagggacctacactggccgtgtgcctctaacacgtgtcctcccacgtggcaccacccacagcgaccccagcccccttgcctttcttcagcacctgtcatggggccaagaatccgagactgggctggtgaccgggctg

SEQ ID NO: 16554 - DNA, 1025 bp, Artificial sequence
  DNA replication origin
tcaactcatggaatccccaaaccagcccattttctggggaaactgaggcttagagctgcgcctgagcctgaactgaggctgcaaaggcagcacacacagatgcagggccctctgctccagagcctggctgtggtgatgcctcgaggcattggcccaccccacagccctgctttgctgctgtggagctaggggtgtgggaaggggcctcgggcccgggagggtgggaggaagaggccctgtgcagcctgcaggtgagacccttctcccgctgccagcctgcccaccaagccaccctcagaacatcactcagtaactctgcccagaaactggaaagataattgggtcatggcaaagagtgaattattcctccggagaaagttttaaaatgcatgagccctcaatggcagagagagaggcagttatgaagctcagaggcagtcttggaattggagccacagagtggctccttccctgtgccttccggggttcagggaggagctggacaggacccccatccgtaaaggagcccctattctggtgggagagacagagacccagacatgagtgctggcaatgctggcaatatgacctttcagggctgtgggaggagagggagagcctggggccagcctggagggggaagaggagggtcagggagcacccacagaagaggagatgagacagtgaggggtgccttagcgggagggaaccatgcaggctgaggctggggtttaaaatttcctagcatggtgagactcctttgaggactgctgaaagggagggcaccccagctagtgcagcgggcacggcaggacctcgggcagcacagggaaccccctgaccacaggtggcctgaaagtcgggataggagaactcctacacatgcttcagggccttgctcaagtgtcccaaatccctcccaaaggctgaggatactgcatctgagaaatgggcttctgaggatgtgtcagacatggcccaggaggcatcagccagggcagggctcaggggctcctacaagctgc

SEQ ID NO: 16555 - DNA, 1097 bp, Artificial sequence
  DNA replication origin
ctcctcggatgccgccttttttggagaggccttccccaccgcctctcccagaagagaagcccgtttctccctccaggacccagttctgccttacgtgtagcacttatcccctgacgtgcaacagctctttgttgatgtttcctgttcgtctcacccggctagaatgtgtgctcctctgtctaatttgttcctgaggtatacccagcacctcaatcaacacctggtgttggtgagtgcttgctaagtgtttgttagtgaatgcatatttgttgaatgaatttgtgggtggctggatatgtgaggaagagatggaaggagggttcaggaagtggcctggatagttggaaggggtggacggatgacaggtgaagagatgggtagatggatggggggcagtcactatggatgcttgcctggggtgttggatggatgggtggatgatggggtggggggaggaatggtttggcaggtggatagctgatagattgatggacagatgggtaggtggctggttaaatggatgggtgatagttggtttggtgatgtgtgaataggaagatcagccagactgacagatggctggtggattagttggtgtgtggttgtattactgaagaggtggtttgggttagggtggatgggtgaatggattcctggttgaataaaggagctgatcaatgaatcttttgctgattggatggaggtactggttgctattggattgatgtggcaagcaactggataactagttgctaagtgtgtgttgggtaaatgaagggcacgtgggtgttaggttgacaggtgggttagggtgagtggctggctggatgtgcatggagaatgggtacgcaggtaggtggatggtttgatggcaatgaatggctagtgggtaggaggactgttaggttgtgcttgtgggagatggtgggtggcactggaggagctgggcattggccagtgtgtgtgtagatggatggtgagggggctgcactggcaggtgttggtgtggggatagactcatggaggatgaatggccgtgtgtagatggataatgagggggatgtgctggcagctggatgaatggtcatgtggctggc

SEQ ID NO: 16556 - DNA, 1722 bp, Artificial sequence
  DNA replication origin
gtgcctgatgggatggtgtctccttggggatgtgtgtcccaggcaggtgccccaggatggctcaaagggagggcctagagcagagtcaacagcctttcaagtgggacccaccaggaggtgtcatctccagggctcattaaggtgtgtccaggctctcagatttccttggaaaccagaaactaaaggcaaagttgggggaagggtcttctggcatcttcctgtgggagcaaatgtgggcgggagcagcttccccctctgctgcatggcttcaccactcccgccctgccacctccctgtacccctcagccttcccactcccctcccagctctggctcaggctgcccttcttcttgctgattccttgctctagtgcagggtttctccagtggctccccatgacacgcccagggtgacatgccagtgtgtgtcaccagagctgcccaagcacagccctctcatagaaggcagttacagcgagcctgggggatgggccctgtgggctgtgtggggaagggcgttagcacagtgactgtgaccagcaggcaggatgggtgggtggaggcccaggaggaaggagaaaggagcagggagcagcaagacaggggggagcagcatgggagtgggagaagctgagcgtgggttctgggagggatggggaggggcagcctgggagcgggagaagctgagtgtgggttctgggaaggatggggggagcagcgtgggagggagaagctgagcatggggtctgggaaggacagcagggagcagcgtgggagggagaggttgagcgtggggtctgggaagggcaggggaggagcagtgtgggagggagaggctgaatgtggtgtctgggtaggacagggagaagcagcctgggagggggaggctgattgtggagtctgggaaagacaggggaggagcagcctgggatgggggaggctgaacatggggtctgggagggatgggggaagcagcctgggatggggagaagctgagcgtgggttctgggaaggacaagggcagagcaggtggaagggagaagctgagtgtggggtctgggagggatgagggaggagcagcgtgagaggaagaagctgagcctggggtatgggaaggactaggggggagcagtgtgagagggagaagctgagtgtggggtctgggaaggactggggaagagcagctgggagggagaagctgagtgtggggtctggaaaagactaggaaggagcagcgtgagagggggagaagctgagcatagggtctgggaaggacaaggagaagcagtgtgggatggggagaaactgaggatgaggtctgggatggactagggaggatcagtgtgagagggagaggctgagtgtggggtctgggaaggacagggaggagcagcgtgggagggggagaagctgagtgtggagtctgtgaaggaaagatgtctgggttggatttcttcatggtgttccctgtaaaccgcagggaggtttaacaaggaaattgacagtgaagaactacaattcctcaagtccctcagctctgatttggcttcctttgaagggaagtctgtgcatggactgggccatctggacccctgaagatatttgggttacagtgctaggccctggattgaattcctgtttagtagagttcattggttactcacagccacctctccagcctccccccgcttagatccccatcaagctgttgccagaattacac

SEQ ID NO: 16557 - DNA, 1330 bp, Artificial sequence
  DNA replication origin
ggggaagggaaggaggggaggggaagagagggataggagggaagaaggtagaggaagaaagggacgggagggaagaaggaagggagactgggaggggaagggagggacgggagggaagaagggagggaaggaggggggaagagggggaggggaaggacgagaggtcaatatgacacactcattccaaatacaggtagaattatgtaaatataaaggatttctggttacaaaaaaaaagaccagtctaatgtcttaccacttataagagacttcataaagcaaaataacacagaaaggctgggctccgagctaacagccagaccagcaagtgtgaagggcctctctcaactcccgctcagctgggagcctccccaggcagcagagtcaggaaacagggcacccttctgaccccccaccctcactcaggggccctcattttgtggggtctccaggacaaggccctgcccctgggcacagacggtgagagcaggaggccaggccaaggtgtcagaaaccacccccacctggacggaggagaaatcccgctcctacagagagcaggggctgagtgagagaggggagtggcaggacagtgtgaagggagggcaaatatccctgcctgtgtgtgggtgctcctggaggcctctgcccatgaacatgcatacacaacacaccacacacacacaacacacttacaaaccactcacacaaaccacacaacacaaagcctgaggtgagcacagtcttccaaagacacgcagcatggccccaggaagattgatggtttgacaagggcaagtgaggggggaggaaatacctgtttagacagatgaatggatgggtgacagatgatgggtagataatggatgggtgaatggataatggatgagtggatggataatggatgggtgggtggatgggtagatggatggatgcatgggttgatggatggatggatgcatgtgtcgatggaggttaaggtgggtggatgtatgggtggatgataggtggttgcatgggtgtaacatggatgatggatggatggatggatgagtggatgatggatggatggattgatgagtggatgatggatagatggatggatgagtggatgatggatggatggattgatgagtggatgatggatagatggatggatgagtggatgatggatagatggatggatgagtggatgggtagatggatgatgaatgggtgaatggatgatggatgggtgggtggatgggtagatggatggatgcatgggtggacattaaggtgggtggatggatgggtggatgatggatggacgggtgattgaatgggtgga

SEQ ID NO: 16558 - DNA, 3665 bp, Artificial sequence
  DNA replication origin
gtgcgtgctccgtgagcccctctgcaagtcccccgctagcatggcctggggatcctctgcctgctgttcccatgaccaggatgattcttctttgcttctgggtctcactctgttgcccaggctggaatgcagtggcatcatctcagctcactgcagcttcgaccacctgggctccagcgatccgccccctcggcctcccaagtagctgggattacaggtgcacgccaccacgcctggctaatttttgatttttatagagatggggtttcgccatgttgcccaggctgttctcaaactcctgtcctcaagtgatccttctgcctctgccttcaaagtgctggaattacaggcgtgagccaccttgctcggccttctccttcactttttttgggaagtagggaaataaaaacgcacagcaccatctttttccagtttggggaactagctgggtgatgaatggaagcatatccgtgttgtcctgtggaattcctcatgtgtgtacttgacggaggcagacagcagcagaacctggagcccacaccctgtcctggaggtgtgggggatgctgcgtctgcatctctggggggaccgggctcttgcattcagcctcggcctgcagtgcccatagggacctgaggaagagcagtctgggctccctagctttggctgtataaaactccttgcacctgggtggcctaaaacaccagctatcttatttagccgatgcttgttggatcaggtgacagcttccctggtctcagctggtggcagtctctctggtcagccggtggcttggaagttctagatggtctccctcccttgtttggtgctgggcttgatgtcagctggagagatgggaatgaccgggctggtgtcaccttccagagccccagcaccttcacgtgcaggagtcacaggcttcctgcaagcaagggggagccagccccgggacgcagtcagaggtggtgccctaagaagcacagcagtgcccaaagctttgtgcaaagcaggtccctgcctggggcctcccaggcccatgtgtggccttgtccctgctgccccctgtctgccgcccacctccgactggatgctccaactggagctccaggaatcatcctggtcatgggaacagcaggcagagaggatcgtgccccagcaggccatgctggcagaggcacttgcagaggggctcacggagcgagaacagaagagaggaaattagaacatagttgtaagaacagtgccaggatgccctgcacttctgcttcatgtgagtgtatgaggaagagaggcctctctcctgtgcctgcgcttggtgagccccactgcgagttacctgccaccatggcctggtagggggtgatcccctctgccctgcttctccagcctctgtggcactgcaggtcgcaaggccaggctcctgtcaaggggtggagaaagatggtctactccccgatggagtctctgagttatatggaaagatgtaaaggggtgtgcacacagcatgtggggtggggggcttgcagctgtttttgccccttagcacacaccccactcagccatcagtgaagcgtctgctgcatgccggtgaacctctgggttccgggctgggcaatgtttgggacaggggacattccagtgtggagagcatctgtccatggctcacaggacttggctcatgcacctccagctgcagagggccaggctgagatcccacgtcacaggtgttccccgtgtggccgggacaccaaagcaggcccgtgcctgggatgctgggaccctgctgatggtcatccagatagccctgcagaccttccgcagcctcccagggcccaggggcctccgcctggcctccccgtgttcgtcaaggtctcatgctcaccagccttcctggcctctctgctgccactcaggtgtgggtgcatccctccattcaaaagtctccttgcacatttaatcccacttggtgtctcctctgcagaggacctggaataagatggcatgaaaaccagagtgagaagggctatgagggtgggagagggctatgaggtgggcaggagaggggtgtgaggcagaagggagaggggtgtgacgcgggtgggagaggggtgggaggcgggcgggagaggggtgtgaggcggatgggagaggggtgtgaggcgggctggagaggggtgtgatgtgggctggagaggggtgtgatgtgggctggagaggggtgtgaggcaggcgggagaggggcgtgatgcaggcgcgagaggggtgtgatgtggatgggagagaggtgtgaggggggcgggagagggctgtgaggcgggtgggagagaggtgtgatgcgggtgggagaggggctttacgcaggcgcgagaggggtgtgatgcgggcgcgagttgagtgtgacatgggcgggagaggggtgtgacacaggtgggagaggggtgtgaggcagacgggagaggggtgtgacacgtgggagaggggtgtgaggtggggggagggggtgtgacacgggtgggagattggtgtgaggtgggggcagggggtgtgacacgtgggagaggggtgtgaggcagacgggagggggtgtgacacgggtgggagaggggtgtgaggtggggtgagggggtgtgacacaggtgggagaggggtgtgaggctgacaggaggggggtgtgacacgtgggagaggggtgtgaggtggatggaaggaggtgtgacaagtgggagaggggtgtgaggcggacaggaggggggtgtgacacgtgggagacgggtgtgagttgggggagggggcgtgacacgggtgggagaggggtgtggggcggacgggagggggtgtgacacgggtgggagaggggtgtgaggcgggtgggaggggggtgtgacacatgggagaggggtgtgaggtggatgggaggggcgtgtgacacgtgggagaggggtgactagttttgggaaagtggccagggaaggcctctcttgaggaggctgtgtttattgagactcctgtccaagtgatggaacatgggaacagaaaaccaaatactacatgttctcgcttgtaagtgggagctaaacattgagtacagatggacacatggacaccggcccgcttgagggcggaggtgggaggagcgtcagcatagaaaaaccacctgttggctgggtgcagtggctcacgtctgtcatctcagcactttgggaggccaaggcaggtggaacacgaggtcaggagttcaagaccagcctggccaagatagtgaaaccccgtctttactacaaatacacaaaaaaatttagccaggtttggtgaagggtgcctgtaatcccagctactcgggaggctgaggcagagaattgcttgaaccaagggggcagaggttgcagtgagccgagatcgtgccactgcactccagcctgggtgacagagcaagactccatctcagaaaaaacaaacaaacaaacaaaaaaaaaccacctgtcggtacaatgcgcagtgcctgggtgatgaaataatctgtacaccaagcctccgtgacatgcagtttacccgtgtaacagacctgcaggtgtatacctagaatctcaaatagaagttggaaggaaaaaaaaagaaacaacaaacaaaaacaatctgagactccctgaaggatgagaacgggctga

SEQ ID NO: 16559 - DNA, 1141 bp, Artificial sequence
  DNA replication origin
tgcagtttacaagtgtgtacttagcgtgtgtggtttatatgtgtatgtagtttgtgtgtgtagtttatgtgtttgtgtatagtttgtgtatgtggtttatatgtgtgtgtgtagtttgtgtatagtttatgtgtgtgtactttgtgtgtgtggtttatatgtatgtgtatggtttgtgtgtgtactttgtgtgtgtggtttatatgtatgtgtatggtttgtgtgtgtactttgtgtgtgtggtttatatgtgtgtgtggtttgtgtgtatagttggggtgtactttgtgtgtgtttttatatgtgtgaacagtttgtgtgtatagtttgtgtgtgtggtttgtgtggtttatgtgtgtgtgtggtttatgtgtgtagtttgtgtgtgaatagtttgtgtatcatttatatgtatgtgtagttgcatgtatgatttgtgtgtataggttgtgtgtgtagttcatgtgtgtgtaatttacatatgcatgtgtagtgtgtctgcctgtgtgatttctgtgtgtactttatatatgcctgtgtagtgaaggaatgtgtgatttttgtgtgtatagttgacgtgtgtggtgtgtgtgcatgtatatgatttgtgtgtgtgtggtttacatgtgcgtgtatggtgtgtgccgtgatttgtgtgtgtgtggattatgtgtgtgtatgatgtgtgtgatatgtgtgtgtgtggtttatgtgtgtatgtggtgtgtgtgatttgtgtgtgtggtctccatgtgcatgtgtggtgtgtctgatgtgtgtggtttgtgtgtgcgatttaagtgtgtgtgtagtgtgtgtgatttgtatgtggtttacatgtgcgtgtatggtgcatgtggtgtgtgattgtgtgtggtttacatgtgcatgtgtggtgtatctgatgtgtgtgatttgtgtgtgtggtttacttgtgtgtggtgtgtgattgtgtgtgtggtttacatgtgcatgtgtggtgtgtctgatgtgtgtgatttgtgtgtgtggcttacgtgtgtgtgtgatttgtgtgtgtggtttgcatgtgcatgtgtggtgtgtgtgtgtgtccccttacacccccttctcacccacctgcagacgccctcggcgctgcacctgccacaatgagcagcct

SEQ ID NO: 16560 - DNA, 964 bp, Artificial sequence
  DNA replication origin
gttgtcaagacctcctgaggctgtgtcacaggcccttacttcaccttggcaaaataagtgttttaaatttattgagacctgtctcagataccttttggtttacaacctgatggaggggttggcactgatagaagggttttgggtttccagcacctgccttcatgccttacttctcggtgggctcaggactcagaatggaagagtcccaggagaccccagtaactcttcaactcttttactctcgctgttttctctcctttacagcagacaccactatctgcaaagggtcctgttcactgctcctgcctgccaggaagcacagcctagagggcagtgtccatgactgtcctgagtaaccactgggtccccagcatctcagcttcacagctgttccataatgaccttcagacggagggacgaggcaggtgggtgggtggatggatggatggatgcatggatgggtggatgggtggataggtgagtgggtgggtggatggatgagtgggtgcatgggcaggtatgtggatagatggaagtatgggtagatggatgggtggatggatgggtcaataggtggatgggtgggtgggtgaatgggtggatggatggatggatggatgagtagatggatgcatgaatggatggatggatggtggatggatgggtgagtaggtggattgagagatggggaatggatggatagatgaacaaataagtgatggatgtgtgggtgtatgtatggatgggtgggtggatgggtgggtgggtagatggatggatgtgtagatgggtggatggataagtggatggatgggtgaatgggtggataagtagatgaatgggtgggtggagaaatacatgagtgtgtggatgaataggttacagagtaaaatgccaccaccagagcagagcaacagcgtgctttgcactcagctctgccatggaaaaagtggttccttcccag

SEQ ID NO: 16561 - DNA, 1327 bp, Artificial sequence
  DNA replication origin
atgaatggatgagtgggtggatgggtagatggatggggatgtattgataatgaatgaattgataggtgggtgggtgggtgggtggatggatgggtggatggatggatgggtaggaggatgggtagatggggatagatggatgatgaatggatgagtgggtgggtggatggatggataatgaatgcattggtaggtggatgggtggatggatggatgggtagatggggtggatagatggatgggtagatggggtggatggatggatgggtaagtggatggacggatgggaatagatgatgaatggatgagtgggtggatgggtagatggatggggatggattgataatgaatgaattgataggtgggtgggtgggtggatggatggatgggtggatggatggatgtgtagatggggatagatggatgatgaatggatgagtgggtgggtggatggatggggagggattgataatgaattgataggtggatgagtgggtggatggatggatggatggggatggatggataatgtaagaattggtaggtgaatggatggatggggtagatggataatgaatggattggtaggtggataggtggatgagtggatagatggatcgataatgattgatggatggatggatggggatggatggatagataaatggattggtaggtgaatggacaaatggatggatggatgagtgggtagctggatggggaatgagtgggtaggtgggagaatggatgatggatggatggatggatggataaatggagggatgcatgatgaatttctcccttgttcccagcctagtcctagaatatgttgcctattctcaaaaataaggtaccacaaagcctctggtgatggtggagcaaaggaatagatggtgaatgtctcatacccacttcggatccagaacaggcctaggagagactcaggtgggatctgctgctgaggaagggggttggggctgaagttggaggaggagggcagctctaaaccacctcttcctggctctaggcctctcaggccagacagcccccacccgtttctgcagatgcccgcatcatggtcctgaggggatgggggctggcctggagcctttcccccgtagtgtgtggctatagcggggacgtgaagggggtgtgttggggacgtagtgaccactcccttctaccgtcagagatcctgcttccccctgccccctgcccctcctcggctgcccttcataaccccccacccactccccacctgccatctcctgtgcttgtgtggatccagaaaacacctacctgggcacagagatcatcgcttggtgcc

SEQ ID NO: 16562 - DNA, 804 bp, Artificial sequence
  DNA replication origin
ccaaagtccttgatttaagcccttgagtgttgattggctgacttagctgtggattgtggtccactgagatcgctggatctttttaagctttagagttatgccctgccatgtggatgcaggtggacgaaggacttctcagtgtgacccatgagaggagtgcctctcctgggccccaggccccaggctgcatgcgtatgggagggaggaggagaagcaaggaaagcaggagagacagaagtatatactgagctggtagttgggggaagggttggcgggtggggagaagggaagagaggagtctgggccaaggccagatgtgtctccctggggagtcctcagagcgggcagccggacgtcgctccatccttcccgcctgacggatgggtctgctgcgcaggcacaagctgtcgggccaggccctgccaaggcagaacagtggcgcttctgtgcgcgctgctccgctctgctcaggaggatggggcccgcctgggaagccagggagtgatggagaaagcagacgtcccagaacaggagccgcggggtcacagaagcacaactgcctcccgaaacaaggagccacaggatgaggtgggaggggaccgggaatcaacgcgggggagcgtttgggggaagtgctggtccaaagaagagaggcagaaggacgcgcgctgaaggagcctggggatgaagagctagatgatttggccacaagccccctcacctttaagaacaaagcgtcctgcattcagttgcagagttttgtttcccggtcagatgctcagagaccttccaacctgtccccca

SEQ ID NO: 16563 - DNA, 970 bp, Artificial sequence
  DNA replication origin
ggctttaaaggccattatacagaagggagaactgagactccaggagatgggtggcttgttcagaatcacagaagcagcgtggatccaagaagggatctgttcccaaacagaaaccagtgtcttgggagagtgagagcagaggaagcccgcacctctgccctaacctgaggctttgcgcctcccgcaaagccgagtgagttgagagcgcccagaaggcagacgctgcggagggagagactcctgggctagccaaacagcagggcctcgggcaagagcgtcacctgcgcgtcctcattctgcgattactgtcaggggaccatccatcagcgccgccctggacgctgggccagactgcccgccgcccgcaccgacagggtctctccagatcgcattagcgtggggcgagggctcagtgcggcactggctgctgagggagaggcgtggtggggaggggggcggggcggggggacggggacatcgcggtggggccattgcaggggcaggggagtggctgctttaggaccctcctccttttcttccaatctcccgcctctgggatctaaggtggatgaaaggggcactagaatgggcggcttttggggggcagggggtgcagaacactgaaggcatcagggaaggatagtgatgggggcagttatcagaagcagagaggaagaaatacctgtaaaggggaaagccagagaaattgtctggggaggggagagactgaaaacgggggtgcagagattgggggttagtggaagaaaaagacttaaagggaaaggaaaagagaagctgtagagggaaagagaattggcaaggaattgacgagagagcagggaaacaggaaaccacagatcgtcaggggctgacaaaaccttagagacaatctactgcagcccctcattctacaaatgaagaaatggaggcccagagaggggaatcccttctccaaagacccactccacct

SEQ ID NO: 16564 - DNA, 593 bp, Artificial sequence
  DNA replication origin
tctattttatggatggctcagagaggttaagtaatttgcccaagtttgtacaactagcaagtgtcagatcagggacttgaatcacaaacccatgcttttaacccctgtggtacactgcctctcactttctcagggccagaagggaagggcttcaggtcaaccatatgaagtgcctacggaatgtcttggggaaggaaagaagagagaagcaaggagaagtatagggaagcagacaagggctacagatgcatagggcatggagggcagaatggtggctgggaaagactgaagagggtttgtagggctaagaggaggtacctgaaggagggtgtggtaagccaacacgtgcatgggaagggggcagtggctatggagatagctggggagtgggggaatggggtccaggagtgggtgccggcagttggaacatccagaacagtgagcagtgcccatcgtggactgggtggttggggagtgggagggacctcgtgtcagaggaggggtctttgtgagcatgaagtagtgaggaatgctccaccatgaatactaagggcaagaagagaaagggccagaggggaatgggtgatgtttag

SEQ ID NO: 16565 - DNA, 784 bp, Artificial sequence
  DNA replication origin
agatgccgctgagcgtgaggcgcttgtgcgggttttgcaggatggccatggtgatgagcgcgatgtacgagtaggggggctttgccggctgccgggcatcttcagaggccgccgcagaccttggcggtgccctgaacttggtgccaaactctgaagggtcactcgggccgccgccgccctcgatgtgctctcggggaagcgcaaccccgccccaccgggccacctgcagccccggctggagcgactgctctaggaactgctgtctcgcctcctcctcctcgtcttccacctcgtcttcatcttcctcctctcccaggacatcgattttaccgtcttccccatcggagtcccggaggctgcgctgcggtgtggagcgagggcgctcagctcttggcaggttcatggaggagcaggtgcttcagtcgcaggggatgtggcggccgatcacctggcctggggcgggctgagctggaagcctgggatgaatgttgcaagaagcaggaacgctagtggttaccctttgggatgttttcgtctgcttgtttctactcctttgcaacaacgtccggcaaagatgcctttgccttttataaaagcttcttcaagaccatgtgtggtggactcccccctttataacccttcttcccctacctcggagcggtgccacttcctcctaacgtagtccagggatgatggtcttctgggcaaacactgtccggagaaaagcccaggcccctcctcctcgcacccacctgccaccaaggaagatgctctactcatccgg

SEQ ID NO: 16566 - DNA, 911 bp, Artificial sequence
  DNA replication origin
gctgctgctattgctgcaaaattgtccgagcagcagcggcggcggacacttgcagcaaaggggcagcggtttggggatgcaacaggcttgatggtcgctggagcaggtggcagtagctccacgcggtcggggacaaactctgcgcagcccctgtacccgctcccctgaccccttgcataatactctcaatgctgaaagagaagcatccgcctcccggtggcgacgccagacccttgccctcctcccaaggctgaggaccaagtgagggctgcagcacgggaagggtgccggggtcgccaggtccgcgccttctgctttcttcggtgccccggcatagacgcgggccgagagcagtaggtagcgaagaggatgcgggtgcagcagagcgtaagggcgtctcccgggggcggtgttggggtaggcccccgggactggctgcggcggggcaggggccccaagcagagggcctgggtgggggttgtgcagggcggcgtgtgcagcaggtagagggaaggggtggggcaggtgggctcccggggtcagttggtggcgcttgaaacgcttcctacgccggagaaagctgccattgtcgaacatgtcctgggaggcggggtccaggctccagtagttgcccttgcctgggtggcccggctcgcgggggatcttaacgaagcagtcgttcagcgagaggttgtggcggatgctgttctgccaggcggggaacttgcggcggtagtatgggaagcggccactaatgaaggcgcagatgccgctgagcgtgaggcgcttgtgcgggttttgcaggatggccatggtgatgagcgcgatgtacgagtaggggggctttgccggctgccgggcatcttcagaggccgccgcagaccttggcggtgccctgaacttggtgccaa

SEQ ID NO: 16567 - DNA, 1018 bp, Artificial sequence
  DNA replication origin
gccgaggcgcgcaaaaagccgcgatggtgggggggcaaaaagccgcggcgatggggggcaaaacgccgcggcagcgggggacaaaaatccgtggcgcggaaaaagccgcggtggcgggggtgcaaaaagtcgcgacgtgcaaataaccgcggcaccgggggggtgggggtgtgggggggtgcaaaaagccgcggctgtcaaataaccgcggaaccgggcgggggccgcggcggtggggggggcaaaaagccgggtcgagcaaaaagccgcggcggcggcggggggggggtggggggcaaaaagccgggtcgggcaaaaagccgcggcggcagggaactaaaagccgtggcgggcataaacccgaggcggcgggtgggggcaaaaaaccgcggtggggaaaaagccgcggcggcgggggaaaagccgaggtggtgcttggggcaaaaagccgcggcggcgaagggcaaaagagccgctgtgatgagggtcaaaaagccgcggcgacgcggggcaaaatagtggagatggggtagaaggccggcacagcttggctttgctggagtgtgatgtgataggaaatgtgcagccaaagacaaaaaaagatgtaagtaggcttgactcattgcagccaagaacccagatgttatcttgagggttttaactaataagcagtttaaatcagaatggcacattctgatttgttttttgtatattcacatttggcaggcatagataccgttcgaagagaaaaatgtcagtagatagaggtaacaaacttaaatatgtgccgagtctagaaacaagagactagggggataaggaccttttgaaataaaatgcgagatttgaaaactgattgggggatgaggaaaaggcaggtctttaaggtcaatccctgttttgctttaagttgttagggggtggttttatcacatattgtagaatacgtcatttcagttttgaacatcttgagttaaatcgtcctaacatagcttatgaatttgattttcttccctgg

SEQ ID NO: 16568 - DNA, 1472 bp, Artificial sequence
  DNA replication origin
cctaaaaatagtattatatttttgtatcatataattttcaattaggtattatgaatattctgtacaggaaacacacccttaattacataagaataaacatttgttacactgagaaaaatctaatagagctaaaaataaaaattaatttggaaaggtcattagatactgatacattcttacgtttatacattctttcatatattcatatatccttttaacagtatcaatggtttggagttacgtgtacaaagccatgacccatatgtaatacaactaataacaggcacttacaattcaaggcatattatatacaaagctttaacttcttatcaaaatattttacttttttctttctgttttggcagatactatgaacacaacattcaactcacagacaccatggagcccttactaagcataaagtactgtgaaaggccagggctaggacagaactgagacagggccagggataggacagaactggggcagggtcatggccagagaaaaaccaggggcagggtcacagccagggacatgagaggaccaaggccaggtccagaagcagggaagaaccagggccagggcagggacatggcagggccagggccatggcaggatcagggtcagcagaaggccagggcagggctagggtggcacagggccaaggcagggcagggtcagtgtagagcaaggaacgggccagggtatggcagggcagggacagggaggtccagggccagagtcaggtccaggacctggacagggcagggccagaaacatggcaggaccagaaaggggacagggcaagggcaaggccagagaaggaccatgggaaaaacatggccagggagggtccagggcaagggcaagtccagggcagaaccagagccagagcaggccaaaggcagggccagggcagggcaaggccaggatagggcagggccagtgtagggtgagggtaggaccagggcgagttcagggccagggcaggactaagatagcacagggctaaggcagggccaaaaggaggggccagggccaagcatggccagtgtcagacctggggattgtcagggtcagggtcaaggctggtccagggacagggccagagcaagggcagggccagggagaaagcagaaccagagaggatccagagcaaggccagggtcagggcagaaccaggaccaggataaggcaaagccaaggccagggcagggcaaggccagggcagggcaacaccagggaagggcaaggccagggtagaaaaggccagggtagggccaggccagggtaggagaaggccatggtagggccaaggccaaggcagggcagggctagggtagcacagggcacggccaaaaacagagcagggccatagcagtggcaggactagcaacagggctagggcaagcgctggaccagagcatggtggggacaatatagggccaggacagaggatggcaaggcaggtc

SEQ ID NO: 16569 - DNA, 1359 bp, Artificial sequence
  DNA replication origin
cagggccagagccagggcagggccaagacagtggcagctccagggcagggccagggttaggaccacggacatgtccaaggccagtgccagggcaagggcaagggcaggggcaggggcagggtcatctaagaattagggacaaagccaggcccagagctgggccaggaccggtacctgcagggctagggtctgggccagggccacaaccaggtctgtgctatggccaggtccaacacagtgccctggtaaggctagggtgaaggccaaggtagggccagggcagggtcaaagccaggctagggccaaggcagggccaggaaagcatagggccagggcagggcagggccaggccagtgccaagacctgggcagggccagggccagggccatagaaacggcctgggcaggaccaggtttggggcaggagcaaaacaagggaaaggacagtgcaggttcttggcacagccagggtccaggacagtgtcagggcagggccaaggcagggtctgggccatggtaagaccagcaacagggctggggctaggtcagtgacaggaccagagtcagggcaagggccagagcagggcaaggccagggtagggccaggcatttcagggtcagggccatgggagaaccagggcaaggtctcaagcagggaagggccagggccaggacaggtccagggcagggtcatgacagggccaggggctgcattagggcaagggcagggccagagcaaggtaagggtcagggccaaggctagggtagggacagggcaagaaatatggcaggaccaggggcaatgccaaggccaaggctgagtcagggctgagtcagggcagggcagggcagggcatggtatggccagtgcaggacaggacaagagccggtccacagagagagcagggctgatgccaagaatgagccaggctagtgccaaggctgaggcagtgtcagagcatgtgcagggcagggccggggccagggccagaaccgagccagggcacagccaaggcagggtagggcggggaaatagcgtggccgggtcagtactgggacagggcagagcagggcaaggcgatggtaggggcagggcagagacaggccaatgcagagccatgttacaccggggccaggacacctccaagtccacttcagggccaaagctatggcaggacaaagaccagggccagggtcagagccaggtctgtgctgggcctagcgaagactagggtgagggccaaggcaaggccagggcagggtcaaaggcagagtagagccagggcagggtgatgacacatccagagcacagcagggcagggtgatggcaagaccaggggcagaccactgccagctcagg

SEQ ID NO: 16570 - DNA, 1034 bp, Artificial sequence
  DNA replication origin
caaagaccagggccagggtcagagccaggtctgtgctgggcctagcgaagactagggtgagggccaaggcaaggccagggcagggtcaaaggcagagtagagccagggcagggtgatgacacatccagagcacagcagggcagggtgatggcaagaccaggggcagaccactgccagctcagggccagggaaagaccagtgcagagccaggaaagggtctgggtctgggtcagggccaggaacaaggcagagcagggccagggccatggcagagtcagggcaggtccttgacaggaccaggttccaggccagggccagggcagcagcaggggcagggcctggataagggcagggtcagggatatggcaggaccagggctagggccagggccaggccatagtgagggcagggcaaaagccaaggcagggtcagggcaggtccagggcaggtccaggaagcggccagcaccaagcggggccaaggcacaaccagcgcagggtaaggcagggcaatggcaccactgggccatgacagggccaggtcagtgccaggagagggcagaacaggaaggcccatggtggggccagggcagggatgggccaaagcagagccaggacatttccaaggccaggtcagggccagaacaggagcaggaccatgaccactggcagggccagtgccatgacaggaccagggtcaggacaaggggcagggccagagccagggccagagccaaggtcaggccagtgcaggttcagggcagggccagtgccagggcaagaccagggcagggacagggtagcacggggccaagacagggtcaggatgggaccagagcaggacagggctgagagtccaggtaacagtagggcaggtacagggcaaggcagggcagtacagggccagatccacggcaggcacagggcaaagccaggcccattgccaatgcaccagccctccctacaaggctcctaccacctggccactgctgcagcccgtccatcgctgtaagcctgactcccaaccctgcctgc

SEQ ID NO: 16571 - DNA, 953 bp, Artificial sequence
  DNA replication origin
gtgtgttttttatttcaattttgtttctgctacgatcttatttattttcttattttcggtttagtttgttcttactttactagttctttaagatgtattgtttatttgaagtttttcttttgtttggatggtaggcacttatagctgtaaatctctgcctttgtactgctttctgcgtaacaagttttggtatactgtgttttcattaccctttgtttcatgaaatttttgaatttctgtcttagtatcttcattgacctttatttattcaggtcatttattcaggagggtagtgtttaacttccatgtgattgtattgtttccaaaattacttttcttattgatacctagttttatttctttgtagtgaaagaagattgccacggagacagacagcagcatggtcagtgtggtaggagccggccatcagcgagagctgctccatgcctggctgctgggagctagagcctgcggcccactggcttgcctcactgtagttggtggtggcagtgacagagactgcagcatgaccagagtggtaggacaggggctatccagggctgcacctttcgcagtgtggggtgggttgggggcgctatccagggtgtcattgcctgcattaggggtactggttggtagcactgcacaggactgcactgcccacagcagggagggtgggttatgggtgctttctggggctgcaatgcccatggaggaggacaggttagggcatatcgggtatatgctactggcggcattgggggacggaggtggggggcgctattgagggcaggactagccgtggagcgggggcgagttcggtgctatcaggggctgcactgctggcggcagtcaacagagttggcatccaaggaaggagtggttctcctctccctgactccacactccagagggcgaaccactcttggtcatactggagtgcggcagggcac

SEQ ID NO: 16572 - DNA, 1254 bp, Artificial sequence
  DNA replication origin
gggccgcatcgacggtgaataaaatccttcctgtttgcagccatgtttgtggttggtggcagcgatggacactgcagccagccagtgtagaaaggcattggggtaagtgcgccatccaggctgcactgctggtggcctgggacgggttgggagccctatctcaggcgtcactgcccgtcttgggtggctggttgggtgtgctatctggggctgtgctgcctgccgggggcgggggggggggcggtttgggggctcaaaccggggctgcactgcctttggcggggagccggttgggggcactatcccagactgtattgctggcaacagtgaggtgggttaagtgtgctatctggggctgcactgtgtggctgtggggggggggtggcggttttgggttgagggcgctatgggctgctataatgcccatggtgcggggaggcggggaggttagggtatgttgggtgtgctattgggggggggcgacactgctggtggtagggggcagggtgggttgggggccatatcaggggctgcactgattgctttagctaggatttctggtactatgttaaacaacagtggtgacagggggcatccttatcatgttccagatcttagaggaaaagctttccatttttccccattccatatgattctagctgtgggtgtctttcctgtagtttttattatgttgcggtatgtttcttctgtgcctgtttctttgaggatttatagcatgaagggatgttgaatttcatatgcttttttggtttcagttgacatgatcatacagtttttgtcgtttatttggttgatatgatgtatcacattgtatgttgagtgactcttgcattccagggatacatcccagttgatcatgatgaattatctttttaatgtattactgaatttgattcactggtattctgttgaggatttttgcatcaatattagagatcctgtcctgtagttttcttctttgatgcttttatctgattttcgtatcacagtaataatggtctcatagaataagtttggaagtattccctcctgtttttcaaaataatttgagcaggatttgtactaggtctttaaattgtttggtgtgaagccatcagcagtgaagacatcatcagttcctgggcttttctttactgggagactttttctgatggcttcaatctcattacttgttaccaatctgttctggtcttggatgttttcattgtttaacctaagtaggttgtatgcatc

SEQ ID NO: 16573 - DNA, 985 bp, Artificial sequence
  DNA replication origin
gcctttcctctgggactgtgaggcccagagtgcccacccagaactccacctctgacctcacaaaggcctgcttcagaactcagtctccactgcactgctggccagacgagggaagttattttgggcagtgcatctggacttggttcaagtggcaccagccaaatccctgccttactgacctctcccctggaggagcaggagcagcgctcaaggccgccttgggagggctgagaggcaggctctggactggggacacagggatagctgagccccagctgggggtggaagctgagccagagacagtcacagaggaacaagatcaagatgcgctttaactgagaagcccccaaggcagaggctgagaatcagaagacatttcagcagagtgagtggggctccaggcagggtggggatggggcagcctcctcagtgcccagatctggaagggtcattccctgggtaccatacagcgaggaggtgactgagggattgtttggggaaggagccccggctgggagtggaagtcccggctttcttgttatggtgcagtcctgtgttgctgtgtgacacaggcacatacaccttctctctgggcctcagtttccttacctgtaagttggttgttgggaggaccagcggtagagcagagatggcagggatgcactgggctgggctgtcagcagaccatgggggtgggacgaggagagagctgaagaccaccggcagtggaccacagggggaggcatgcaggccagagacgggtcagctgccggcttgctggagtcattcctcccacgcagtcccctcctgaggggctggagctggggctggagggtttcagcagtcagggctggagataagagtctgtgctggagctagagggaactgggctagagaatcaggaggacagacagggtgaggggacttcgggctaccttcatgctgtctgttagagataaagataggagtacaaaggggaattttt

SEQ ID NO: 16574 - DNA, 1294 bp, Artificial sequence
  DNA replication origin
ggtgcccactctttcagctggggcaatgctcatcacactgcatagtaattgctcagttaggccaggcacagtgtctcacgcctgtaatcccagcacttgctgaggcgagctgatcgcttgagcccaggagttcaagaccagcctgggcagtatgacaaaacctcatctctacaaaaaaaaaaaaaatacaaaaattagtcaggtgttgtggtgtacgcctgtggtcccagctaatggggaggctgatgtgagaggattgcctgagcccagaaggcagaggttgcagtgagctgagatcacaccactgcactccagcgtgggtgacagagcgacaccctgtctcaaaaaagaaaaaaaaaaaaagcttaattaattaacggtttttcttcctaagggctgggatcataccagtttgcttcactgcagtgcctgaacatagtaggcatagtagattcaataaatctttggttccttggctggttgttgcctgctctgtgctgatgagaaaggagccaggcttccaggattcccttggtgttcttggctccctgctctgtctacctctcccctgcctctatggtaccttcccaggactgtctttgggctgctgcttgcattgatagggtctcttcttcagggctgaggaggctggtcatgggataatgagacccctatacgatgctgcatgggagctggagttggatgggggccagtggaatatccgcgcaactctgcatccccctccatctactcatccctggttttgtttctctggagtaaggaatagagcaaggactgggatgggtgagccatgaacagagggtctcagctgaaaagtggaagatgttttattccatgcctggacgtctctcattccctctgcttactttttgctgctgtgaggtcaggggaatttaggagccctgaggaatgctgctgctctccctagcagggcgaggtgaccctccactggctcccatccaaccccacctcccatgctggaggtaaccacagaagaggagagagaagtggacagagcggaaagacaagaacaccaagagaatcctggaagcctggctccttcctcatcaccacacagcaggcaagacacagtaagcaacagataaccaccaaccagccaatgaactcaagatttcttgaatctactgtgcctagaatgttcagtcactgcagtaaaagacactggtacaatccagcctgtgggaagaaaagcaatcaattgagcaattactatgcagtgtgatgagcattgccccagctgaaagagtgggca

SEQ ID NO: 16575 - DNA, 1523 bp, Artificial sequence
  DNA replication origin
tatactatacatctgtttatgttctgtatatgttctgtgctttatacgtaaaaaagagtaagattttttttcacctccccttttaagaatcagttttaattcccttgagaatgcttgttatagattgaaggctggtaaggggttgggctcctctttcttcttcctggtgccagagtgctcccacatgaaggaataggaaaggaagatgcaaagagggaaatccttcgaacacatgaagacacaggaagaggcctcttagggctccaagggctccagggaagcagctgcagaggttgggtggggtgaggggccaggatccactgaccctggggccaggcaggaatcactctgttgcctggggctcagaaggcagtatcacccatggttcctgtcattgctcatgtattttgcctttcaacaattattgtgcacctactgtgtgcaggccctgcctggacactggggatgcgcagtggatgcactgggctctgcctttgagggttgcagtttaatgggtgacaggtaattataaggaagaaggtgagtgcagagtgggaggcttggaggctgtggggcttggggtgggggagctcacatccagcctctgggccaaggccaggaggcttcccagaggaggagacagagcagggtattgtggtggggggtgtcctttttggggctgggattgcactttacagtttgaggggatgggcagaggaggctgggcttcattctggaggtggggacatggtgaggtgaggtttagaaagcacacctgagccgcagtgtgtaggatgctggaaatggtggagatgggcctgcgaagagagtgctgggaagtgatgacccaggagcagcagccgggcacctaacaatgggtcagcaccgtgggcgtggagacaagggccgggattgatcaatacccgagaagtacaatgtacaggacttgggctccatttggatggagtgggtgagggaggagtcagaaatggcttccggtttccagcttgggcctggggattggagatgtccccactgagagtagggcacaagtgaggaaattgtttggagaggaagatgataagttacatcatggatgtgctgagtctgagttgcctatgggacttggaatggggggtggcaaaaggtgtgtgatcttgagcaagatattcaactcttctgggccttggtcttctcatttgtaaaacggtgataagaatattacttcccatttgtgttgctgtgaatattaaatgcgctaccacatgtaaaatgttgagaatcgtttctagctcagagtaagtgctcaataaacaccattatgccttttatatggtctggagctcagaagtggaagacagggttttgtgaagtcatggctttgtggatgtagctagattgtggagtaatggcaggagggtcgggggcatggcacaaggtaggtggtcaagagacactggacacaacccaaatgtccatccacaggggaacagatacatacactgctgcgcaattgcacataa

SEQ ID NO: 16576 - DNA, 789 bp, Artificial sequence
  DNA replication origin
tggggtgacctggtcaacgggggtctgagcggtacatgcctgttcagtggtgcctagtcactaggttcctggtcggggcatctggtcacctcaggcctggttagtagggacctggtcactggcagcctgttccctggagacctggtcagtggggcttcatctgtggggccaggcaatggggtcatgattggtggaatgtggtcagggaggtcttgtcagtgaggccctggtcagtgaggccttgtcagtgaggtccttgtcagtggggtcctggacactgtgggcctggcagcgggaatctagttagtggggcctggtgatgggggcctaatcagtgagagtgtggtcagggaggacctgatgtgcgggatctggtcagcagggacctggtcagtggggctgctgagcactgctgggaggtgtcaggggaaatgcatgttatcaggggccctatggacagctgggatggcccagtggtgtccaatggcccagtcaaaagtggacaaagcaggtgtttggatggacctgggagatcttgctcagagattctgaaagaacaaaggtaaaggaagggccagagtggctagagagatggtaacagtctatgggctgcacaggatggaggaagccagggaacaggcagggtgggcagtaggggtgcagggagaggcaggtgcatgctgggaggtcggaccctgtgagggctgtgggggcgtcaggtggggtgggctccaggtgcactctcagtgtgcactgggcaggtctcggtccaggctctctggaccctgg

SEQ ID NO: 16577 - DNA, 931 bp, Artificial sequence
  DNA replication origin
tctcattgccacttggccttctggtatgattaggaagggcctggtcagtgtgggcctggtcagtgaactagtcagttgggacttggtcagtgaggcctatttactgggggaatggtcagccagggtctgcttagagagggtctcattagagggatcgagtagtgcaggtcttggtgagtggggacctagtggcagacaaatgtttggtgtctggtcagtgcaaacctgggctgcagggcttggtgagtggagacctggtcagctgtggcttagtggtagccttgtcagaatgggctgggtcactggtgacccggtcaaggggtgctattcagtggaggcctggtcacatggcacctagtcagcagggcatgtcctcatcagtgagacccttgtcagtgggaccctggtcatggcagcctggtcaggtcagtggaacctaatcagtgggggcctggtcagagaggacttgatcagtggtggcttttgtagcactggtctatggggtgacctggtcaacgggggtctgagcggtacatgcctgttcagtggtgcctagtcactaggttcctggtcggggcatctggtcacctcaggcctggttagtagggacctggtcactggcagcctgttccctggagacctggtcagtggggcttcatctgtggggccaggcaatggggtcatgattggtggaatgtggtcagggaggtcttgtcagtgaggccctggtcagtgaggccttgtcagtgaggtccttgtcagtggggtcctggacactgtgggcctggcagcgggaatctagttagtggggcctggtgatgggggcctaatcagtgagagtgtggtcagggaggacctgatgtgcgggatctggtcagcagggacctggtcagtggggctgctgagcactgctgggaggtgtcaggggaaa

SEQ ID NO: 16578 - DNA, 1656 bp, Artificial sequence
  DNA replication origin
aggcatcattgtattttgcagtgtgacaacgatatgagatgtggggggacctgggtgagaataatatgatttggccctgtgtcactaccaatactctcgtgaaattgtaatggggaatgttaaaggtggggcctggtgggagatgatttaatcatggagaagagtgggggttggaggtgggggagtggggagaataggagagattattttgtgggtgggggtgaaaaatgaggggggacggattcttcacaactggtgaaacactatctccttaatactgtctgcgtgatagtgagttctcttgatgattatggagcttaaagattgagtgaatattgtcctgctggggtttggactgacatttttgtcatttttctggggaatttcttccctttggattgagaaaccttacttaatgcttgtactatcattgtatcttgaaagaaaagaaatgccttttgaactcagggactgataggccgaagggactgtagccttgtctcagatgagactttgaattttttatatttggaatgagttaagaattttggaaacttttgaacatgcatgactgtgttttgctgtgtgagaaggacatgaggttctggggtatctgggtcaaataatatggattgactgtgtgtccatataaaactcatatggaattgtaatccttaattttggggcctggtggtaggcgatttaatcttgaatgggagggggttcggggtggtaggaaaaggaggggtagggtggggaggagtaggttgtcagtagggtggtaggaggatggggggtagtaggaagggggagtagccttctgcagaggcagaggctcatggaaaacctctactagggcagtgcacctgtggctttgcaggctttagccccatggctgctctcatgggctgggctggtgttgagtgcctgtagcttttccatactgagggtgtgagctgttggtgggcctatgaatccgggatctggaggatggtggcctcctttttgggggctccaagcccatattttccttctgcactgccatagtggaagtttctcaagaggcttggcctctgcaggaggcttctgcctggaaacagtgggcggtggtgtgggtgcaggatcttcttgatgctgatctcctgatagtgagacctcatgtgatctggttgtctaacagggtgtggtacctctttcctctctctgtcttgctcctacccctgccatatgaaacatctcattgccacttggccttctggtatgattaggaagggcctggtcagtgtgggcctggtcagtgaactagtcagttgggacttggtcagtgaggcctatttactgggggaatggtcagccagggtctgcttagagagggtctcattagagggatcgagtagtgcaggtcttggtgagtggggacctagtggcagacaaatgtttggtgtctggtcagtgcaaacctgggctgcagggcttggtgagtggagacctggtcagctgtggcttagtggtagccttgtcagaatgggctgggtcactggtgacccggtcaaggggtgctattcagtggaggcctggtcacatggcacctagtcagcagggcatgtcctcatcagtgagacccttgtcagtgggaccctggtcatggcagcctgg

SEQ ID NO: 16579 - DNA, 1794 bp, Artificial sequence
  DNA replication origin
acattcatgtatcctatgaatcccgtctgtgttttgtgcttctttctagcagttttttttttttttttcttttggctgagaaggcttacccattgcctgtacaatcattataccttggaagtagtgaagttgccttataatccagagactcatgggcagaagggactgtagacttgtctcagataagacttcgggctttggacacctgagtaaatgctggaatgagttaagatttgggggactgcagggaaggcatcattgtattttgcaatgtgagaaagacatgagatttgggggaccagggacagaataatatgatttggctctgtgcctcccccaaaacttgtggaattttaatggggaatgttaaaggtgggggctggtggaaggtgatttaatcatggtggagagtggatgttggatgggggggatggggagagttggagggtattggagggtggggagagttggggggtttttcgggggatggggagagttgggattgtggtggggttatgggtgaaaggcaggtgtggaggtggatccttcagaaatggttaaacacagtctccttaatgctgtccttctgatagtgagttctcttcataattttggagccgtgagactgaatgaacactgacctgctgggttttggatgtccattgtgcctgtggtcccacttgtgttatttttcttggaaatttcttccgtttggattgagaaaacttacccaatacctgtaccatcattgttccttgaaagaaaggagtgtgcttttaatttcagggactcataggcagaagggccttgtctcagatgagacttttaacttttcacacttgagttaatgcgggaatgagttaaggcttttggaaacttttgaacaggtgtgattgtattttactgtgtgagaaggacatgggatttgggggggtcaaggtcagcataatatgatttggttgtgtgcctctagaaaaactcacttggaattgtaatcccaaatgttggaggtggggcctggtgggagattatttaatcatggatgggaggtgtgggggtggaagaaaaaaggggtgggtagggtggggaacagtatgctggctgtagggtggtcggagggtggtgggtagtaggaagggggagtagcctgctgcagaggcagaggctcatggaaaacctctaccacggcagtgcacctgtggctttgcaggctttagcccccatggctgcctttatgggctgggctggtattgagtgcctatggcttttccatactgagggtgtgaactgttggtaggtctatgaatctggggtctagaggagggcggcctcctgcagagcgactcaaagcccttgttttccttctgcactgccacagaacaggatttccaagaggctctgcctctgcagcaggcttctgtctggaaacagtagggggtggaggtgtgttggggggtggatccttcaccaatggttaagcaccatcttcttgatgctgacttagtgatagtgagttctcatgagatctggttgtataacaggctgtggcacctctttcctctgtgagtcttgctcctactcctgccgtatgaaacatttcattgctgctttccttctggtatgattgggaggcttcctgagtcttcccagaagcagaagccaccatgctttctttacagcctgaagacccatgagccaatgaatccccttttcattatgaccacacagaaaataagtactgcaaagtggagctatgaaatatcttcaatgacttttccccactgttttggctgt

SEQ ID NO: 16580 - DNA, 897 bp, Artificial sequence
  DNA replication origin
tccaaaggaagctccgccaacctgcgccagtgccagatctgcagctgcaaaccgcgcgtgtggcactggcagcagtgagggcgggtgggggaaggagcagcccctgactctgcctccatccctctccagctacctgacactagccacacagatttcagggccagagcctcagcgttcagccaatccgcgaagccactcaggtggccgcggagtgcccttgccagcaccgtatctcccttccgaggaggagcggggcgggctgcaaggccagacaggccctccttctcaggccgggctggctgcgcgcctgcgatcctggggccgcccgggcgatcccaggagaaccggcgagcccatcggcgcacgcccggagctgcagccccacctgctggcgcgcgcctctagggagcgtcttccgggagcccggcagcaaccgcggtgcaggcgcgcgccgccagggagcgtcttctgggagcccggcagcaactgccgtgcaggcgcgcgcccaacggctttgcgaggctcactcggtctgagaggtcggaggctgcgagtgtcgctgctgaaggctgtggtggaccgggctggatcgcggattgtggagtagattatagatttgaaatagcggagttggggttggatcggggctttggggttggataggggatttggggctgggtcggccggggtcggggaggggggtggtgaaaaggtgacagggagctgccctcgctcaagagccggtggttgggggtctgagaagaagtcaccaatatgaagttattcggcttcgggagccgcaggggccagacggcccagggctccatagaccacgtctacacgggttccggataccgaatccgggactccgaactgcagaagatccacagggcagct

SEQ ID NO: 16581 - DNA, 1571 bp, Artificial sequence
  DNA replication origin
cccctccccgaccccggccgacccagccccaaatcccctatccaaccccaaagccccgatccaaccccaactccgctatttcaaatctataatctactccacaatccgcgatccagcccggtccaccacagccttcagcagcgacactcgcagcctccgacctctcagaccgagtgagcctcgcaaagccgttgggcgcgcgcctgcacggcagttgctgccgggctcccagaagacgctccctggcggcgcgcgcctgcaccgcggttgctgccgggctcccggaagacgctccctagaggcgcgcgccagcaggtggggctgcagctccgggcgtgcgccgatgggctcgccggttctcctgggatcgcccgggcggccccaggatcgcaggcgcgcagccagcccggcctgagaaggagggcctgtctggccttgcagcccgccccgctcctcctcggaagggagatacggtgctggcaagggcactccgcggccacctgagtggcttcgcggattggctgaacgctgaggctctggccctgaaatctgtgtggctagtgtcaggtagctggagagggatggaggcagagtcaggggctgctccttcccccacccgccctcactgctgccagtgccacacgcgcggtttgcagctgcagatctggcactggcgcaggttggcggagcttcctttggatggcctcagggccgcagagcgcacagcccacctggcctcaaggtccgctcctcttggacatctttctggatcctgggccctggcgctgggcactctgtgtccacacggatgaaacagcggctgctggcggggccggttgcctgattttgccgcctgggggtctggcctcaggatccacgctactgcggggcgggcctggtctggagtgtccagtcacttgctgccggtgcaccacgtctagactgcagctgcggctccgatgccggcgtgagctggcgggcctggtacctgatgtcctcagggtcaagtgcatcgccctcccacttgagaggttgctctgacttggcctcctccaagaacgcaggggccgccgggactggctcttcgtggtaaccgggatggtaccgagcagcaggttttcaccctggtgccactgctgtgcggactgcctgacttgggcgcccaggcacccgccccagggtccgcgcggcaggtgtgcaggtagggtgagtggcgcggagggttgggggttgctccgtcatctctgcccgtgtgcaacttgcagttttgcagttttctgcagcagctgaggcgctggcgcgggaaggcggagctcccctggatggcgtcaggtttgcgggcacagagcacagcccaccaggcctgaaggtccgctcaggggccatagtggttgagttctctgtggaactgggatggggtgaacagccagttcccgtcctttggccgcctggccaactgccagacttaaccgctgccgcccaggcatctgtctctagcgttgccactacttgggtagaagtgggggtcggggtggggcgtggagcgtcaccggttgccaagccagcactgt

SEQ ID NO: 16582 - DNA, 2484 bp, Artificial sequence
  DNA replication origin
aggctctggctccagcctccagcatgcagcggtgtctcttccttctcctcgtcttccagcccggcaggagaagctcctgctgctagcctccctcctaccgctccgtcaccaacaccaccaacagggaggcagcgccccaggctccaggctccaggctccaggcggtgaaaactaatggacccttctagttctctaacccaggtacctagcagctggacacaccgacacagaagacccaaaaatgacgcaccacttcctcagcatgctttatatactgaagttacggatcctggactacatgttctgattggatgagagaaaaacctctaggcctactctgattggactttattttcatgctgtgattggttatcttaagacttgctcttatgcaatcagaacatgaagtctaggaaccggcatgcgcataacctccgtatataaatgatgctgaagagccgttacggtttttttttttttttttttttttagggttgggtgttttactgttgagctgctcagtgcccagcttagaggaccaggaaaaggagtcaccggccgtatgctggaggcttgagacacggcacagaggcgcagctcgcctcgctatggttggtggtggcagtggagattgcgattgcagcgcggctggaagggtaggaagaggaaaatagttttgggatagatagaggggtgggtaaagagtttggttattgccaaagggaaaaaaggatagcgaggaggagaaggcattgcaaaaagacgatggggaaaagatggtggggaaaaaaggttttgggtagacggaggtggaaagacgggttgtggagcgggagtgagggaaggttttgcagaaagacggtggataggaagtttatgggtggatgaagggggaaaagatggtggcaattggggagaggagagagtggtgaggtgggggaaatgggcgagcagtagggagagagggttttgtgaaaagacagtggggagagaagtttttgggtagatagaggagcagaagaagatagcaagtgggagaaggaaaaagagggtaactagcgggaggaagacaaggttttgcgaaaaaacagtggcagaaaagaaagatggtggagaaaagatggtaggtaaaaagtgtttgggtagatggaggagggaaagagggtgacaaggaggagaaagagggtggcgagaagggagcagggaaagaaggttgggaaaaagacgggaaaatagtttgggatagatgcagggcaaaaaaaagggtggcaagcaggataggggagagaagaggacgagtgggaagagggggcagactttgtgaaaatatggggaaattttggggggtagatgggggaagagggaggtgagcaggagtggggagaaggcttcgagaaaagatggtggggaaatgtttttgggtagatggagaagggaaagagtggcaaggaggagcaggaggaaagacaatgaggaaaacagtttttgggtagataaagggggaaaagagggtggtgagcagcaggagtggggaaaaggctttgggaaaagacgggggggaaatgtttttgcttagatggaggaggaaaagggcatgatgacagcaggagggggaaaaaagagggtggccagggagaagggggaaaatacggtgggaaaaaacgggagaaagtgtttgggtagatggttggggaaaagcgtggtgagcgggagaatagagaaggctttgcgaaatgacgcggggtggggcggggagaaaacgaaatgatggtggggagaaaacggtgaaaacgtttgggggtagatggaggaagagaaagggtggtgagagggagagggcgaaatgcggtcgggaaaagaaggtggggaaatggtgggggacaaaagttttgggtggatttttaaaaataagattatttgtattttcacttttgagtagtttgagttctttagatattttgtgtattaacctcttgcctgatgcatagtttgcaaagactttcttccattctcgggttctgtcttcattatactgattgcttcctctgctttggaaaaggttttaagtttaatgtaattacatctttgctttcgttgcttgtgcttttgatgtctatttgaaaattccttgtcctaaccaatttcatgaagcatttatcctatgttttcttctctggtagtttcatagtttcaggtcctgtatttaaatctttattttgagtagatttttgtatatggtaaggtaatggcctagatgtatccttgtacatgtgggtgttgggttttcctagtacagtttattgaagagattgtctttcccgaaggtgtgttcttggggcctttgttaaaaatgaattgaccgtaaacgcgtgaatttatttatgatttctctattctgtttcacttgtctatgtctgtctgtctcattcgttcatctctcttgtctctcccccgccccttttattgatagtaccatgctgtttt

SEQ ID NO: 16583 - DNA, 2168 bp, Artificial sequence
  DNA replication origin
gcagcccacgggcacacagggagacctgtcctcgacatcacaagggcgccacttttggggagactcacccgcacaccgtccgcgcacgcctgaggctgggatcccgcgctgcctccccggcgatctgtctgaggtttcttcctcctggggtttcttcctgctggtggaccctccgcgaatcccggcctccggagaccgtcctggtaactgccctggccagggctggtctcagccccgactctgacgcacgatcacacagggctcctacttcgccaagtctcagggacccatcccccggcgacggtggcggtcactgtgaccaaagcggcggctcgggcctcgcgcatgcgcactggcgaggccgactcacccgccccacccccccttactcggcagagtcaggctgcggaccctttaaaaaatggcggcgacgcggcggctgcggggactggggcggcggtgctggaggttgcggcggcggctgcggcgcagccccgggcggcgggtgggaagaggactaccagaggggcctgcgggagacccagggtcggacccataggagtcctgtcgtcaggacctccttgatcggtcttctgcttgggttctcggtgaaggaggagcttcggggtgtcggctgggctgcgcggactcctcttgggatccgatgatggatcccacccggtgatcgggaatggggttacaatgcagtgaggcggaaaggctctcgccggggcacagaaagatccccagggccgcaaggcgtgctgtcgcctgcaaaggcactgacccacgagcccactgcctccctccttcctgggtggagcaggggcctgccttcatctccaaggcccgggggctccggcatctcgacgcggcttccggcgacacgggcaaagagagacagaggctagtccgagccggagccagtgtgaccacacgtggcactgacgtcccccaagagcacatgcagtgagcctgtgtctctgaggccgtagtgggcgacgatgagacggacagtgatgtccaggcctgcgcccgggggccactggagacctgcccctcaaagcggaggaaacgccaagcgcacctgaaaacctgcgagacagggcctgtgcacgagtccagtactcctacttcgccaagtctcagggacccatcccccagcaacggtggcggcgcagagaagagcacggcgccggcgcaggtgcagagagacaggaggctgatggggggaagttgaggcacctggggcagagaaaaaaatgcatcgccaagcggtttctgggtcatctactgacgaaaatgtcttcccatcagcccttgcgctggtccccagggaccctggcatccgtcgttggcgcccagggtgcgcgtcgggccactaggggtaccccaactcggacagaaggcccatgagttgaatttgaagtttgtgggaatagaggtgaggcaccaggggcaggaaaaaaacaggagacctcgcctcagacaagtggggcctgggtcccccatggatgaaagtgccttcccattatgctgtaccctgggcagagtggacagtgacgaccctggttcgagcccagggtgcgcttcgggaccgcttgcggtaccagaaagcgaacaaatggtccatgagcggaaggtgaggcacctgaggcagagaaagtaaagaaacgcgccgccgagaagcagtgcctgggtccctcacggaggaaattgtcttctccttagcccgttcgcttggcactgaggtccctggcgtccctggtttgatcccagggtacgcctcgggccactagtgttaccccaaggtgggcagaaagcccataaggggaaggcgaggcacctggggcagagaaaaaaaaaacttcgctgcagagaagcgcggcctgattccccacggacgaaagtgtcttcccatcagtccctgcactgggacccggggaccctggtgtccctggttcgagctcagggtgtgcctcagccgctacgtgcaccccaaggggagctttgggagcacaaagcccatgagggaaggtgagttttgagggaggagtggtgaggcacctgtcacagaaaaagaaaaaaaaacaacccgcgccacggagaagcagggcctgggtcccccacgatgaaaatgccttcccatcagctcctgctctgggccc

SEQ ID NO: 16584 - DNA, 900 bp, Artificial sequence
  DNA replication origin
cctttgcaggcgacagcacgccttgcggccctggggatctttctgtgccccggcgagagcctttccgcctcactgcattgtaaccccattcccgatcaccgggtgggatccatcatcggatcccaagaggagtccgcgcagcccagccgacaccccgaagctcctccttcaccgagaacccaagcagaagaccgatcaaggaggtcctgacgacaggactcctatgggtccgaccctgggtctcccgcaggcccctctggtagtcctcttcccacccgccgcccggggctgcgccgcagccgccgccgcaacctccagcaccgccgccccagtccccgcagccgccgcgtcgccgccattttttaaagggtccgcagcctgactctgccgagtaagggggggtggggcgggtgagtcggcctcgccagtgcgcatgcgcgaggcccgagccgccgctttggtcacagtgaccgccaccgtcgccgggggatgggtccctgagacttggcgaagtaggagccctgtgtgatcgtgcgtcagagtcggggctgagaccagccctggccagggcagttaccaggacggtctccggaggccgggattcgcggagggtccaccagcaggaagaaaccccaggaggaagaaacctcagacagatcgccggggaggcagcgcgggatcccagcctcaggcgtgcgcggacggtgtgcgggtgagtctccccaaaagtggcgcccttgtgatgtcgaggacaggtctccctgtgtgcccgtgggctgctgtctcaccggtggctcgtagtcgcggagaccagaacccggcagcttcaggggctgcctgggggtgggtgttacctgctgtatgtctgtgtccattatgggtgtgtgtgtgtgtgtgtgt

SEQ ID NO: 16585 - DNA, 1098 bp, Artificial sequence
  DNA replication origin
gacacattttataatgtagtatacattttttaattaaaaatattttataatttccattatgatttgctcttgggtgttgagttactaagaagtatatttctgaggtttttcttcaatatgactgactatagatatttgactctagttattctcagaaagagaaagcaaagttatggataaataatcgttaattccaatatctatatagacggaagtgtgctagagcaccacaagaagaaatttgaacacagaaaaataaggaagcaagaacccagcagacattatactctgagggacttgatgttccatggaaaagcataggtgggggtgtcttttgctcttctcacctctgcggcagactgcttgtttctgaactgttggagagccctccattctcacaagcccaagcactggtgtgggccgcaatcttggaacaaattgaggacagagaacaaggctactatttcctgcagtgccacttgcccttcacccagccccaagatgaggtggtgggcaccatactggatatgcctctgtggtggacttctatactgcctttgagtgagagagaggcttgccccatccccttgccggcttccttctccgtccctgcgtcgagctgtggctagatttctccatgagggcagagggcagggcaagaggcgtgagaagcatcttctggaaggtctgcgggcaccctcctgcgggtggacaatgagcgcctgggaggccgttgtccttggttggggagcggtcgtctggatctagcctagcaaagaggctgctccggatggggagggaatgaaaacccctgcggctccgacgcagatgcccacgttgcccaggccttcacagacccccaagccggaaccgccgggaaaacgattgccaaccggccacaacacccaggcagagacgcggggagaggctgaccagaagaaaggccgacgtgcaagaaacccagcctccggcgcacagggaacatgtgtcccaaggcgcacgcacacacagacggacagagacagaaagcgagggcgacggaaagagcgagaagggagagagggagagagagagagagagagagagagagagagagag

SEQ ID NO: 16586 - DNA, 1084 bp, Artificial sequence
  DNA replication origin
gacctgaggtagacagagataagcagcaggcgcttcccccagcgcgggacccaggcgcgggacagcggctccggggagaggagccctggaggccggagggcagacacggacggggtccaggcggttctgcgagtggggcccgattgcgtcttggggcgaaaagacacccccttcccggggtgattgtgctgctacggtgccggccccgggaaggggcagggagaacctagctgcccaccaccccctcctggaaagggggtgtgtgtcaatggccctgagatcagaagaaagtggggtcccgtccccaaagacaaaggaaagtgaaagtcccctcccacagcccgacgggagagtgaacctagactcaggggctcagaagccccccagccccctcccccaggggtctccaaggctatgcggaggttgggcggttgggagtcgggggagttggggagtccccttcctcaccgacccccaatgccggtggcctaacagggctcccagggcccaattagagacccaggcttaccatgggaatagctgagttaatccccaccccaccacaagagaaatgaaagcccggagctcccgtgtaggacgcgacagcccagccggtcaccaggcgggtccaacaaggtccccagaccctgccgagcatttcagactcctgcctttctgctccagcagctccagccaaaataacccccagctcggctgctgtaaacccactttctcctaggctggcagaggggcactgacccacagggttggggggcagcctcccttctcggcctcgatttagtcaccgcacaactcagggagctcgcagccccggcacaaaagcggtcgggagaagaggaagagatagaaggaggagaatgttggggtgtggggtgtgttcagtaagccagggccccgaaatcctcaccctgagctaggtctggcttcacccccactccccagtattgttagtccccaaaagcagcccttttggacaagagaagaatcccaatgagaaggccacattcatccctgagacaggagcctgggggctgtgacaagaaccacccccgccccccaggcc

SEQ ID NO: 16587 - DNA, 1076 bp, Artificial sequence
  DNA replication origin
ccccggagccgctgtcccgcgcctgggtcccgcgctgggggaagcgcctgctgcttatctctgtctacctcaggtctgacttttgatgccaaaatctgagcccctggggtgcctctcccccgcctcccgtgcaccagggtctgcagcagccactggggcctggttgcctgctgcatctggcggccctggagggggccatgggcccctttgcacccgcccgcctcggtgtctggggaggggctgcgcagggccgtgggctgggtggtctctctcgggctgcgtgtgttgcgctcccgtgtgcacgtgtgtgtgtcgggaatcctgcgtgtcgtgcctgtgtgggcgatccggccccctggctgtgggtgggactggattctaactcagggaacttgggcctgctgttaacttcgatgattgtagggacaggtggggcgggcggtgggtgggcacggggctgggtcctgggcggcctggcgactccaggagaaggaaatcactgaaggcagtggtcgtggaaatgggagggggtcgcagggggtctgtggggcccggtcctggatactgggcaggaagccttggtctccagagggtactccctgcctcaggtggccccgttcaaccccagccgtacccatctcccgccactgcctgtcggtgggggtttaaagttggggtggctttctggggtgcagctcagcatcccctcttatgcagactgggatggggtcgggcacctccctcagccacgaggaccctggacgggttcgagttctcttggggccgtggggttagctgtgtactgggcggggaccccacactcgaggccgagcgggggctctccctgctctgagatgttgggggacaggcagcttctggaatcttcagtgggacccttaagtggccgtcaggacaggcgggagggtgggcatggggcactggggagagccggggtcgttaagggtcacgcatctgtacagtctgaatttcctttatcttttttttttttttttacccactttgtccctcttttcccctaattgtgcttttgcatttttttttcttggcaaacgtaa

SEQ ID NO: 16588 - DNA, 1108 bp, Artificial sequence
  DNA replication origin
ttgggcacatgtcgtcaaaacctcctgaggctgtgtcacaggcccttacttcaccttggcaaaataagtattttaaatttattgagacctgtctcagataccctttggtttacaacctgatggaggggttggcattgttagaagggttttgggtttccagcacctgccttcatgccttacttctcggtgggctcaggactcagaatggaaaagagtcccaggagaccccagtaactcttcaactcttttactctcactgttttctctcctttacagcagacaccactatctgcaaagggtccttttcgctgctcctgcctgccaggaagcacagcctagatggcagtgtccatgactgtcctgagtaaccactgggtccccagcatctcagcttcacagctgttctgtaaagaccttcagacggagggacgaggcgggtgggtgggtggatggatggatggatgcatggatgggtgggtgggtggattgatggatggatgcatggatgggtggatgggtggataggtgagtgggtgggtggatggatgagtgggtgcataggcaggtatgtggatagatggaagtatgggtagatggatgggtggatggatgggtcaataggtggatgggtgggtgggtgaatggatggatggatggatggatgcatggatggatggatgagtggatggatgcatgaatagatggatggatggtggatggatgggtgagtaggtggatggagagatgggggaatggatggatagatgaacaaataagtgatggatgggtgggtgtatgtatggatgggcgggtggatgggtgggtgggtggatggatggatgtgtagatgggtggatggataagtggatggatgggtgaatgggtggataagtagatgaatgggtgggtggagaaatacatgagtatgtggatgaataggttacagagtaaaatgccaccaccagagcagtgcaacagcgtgctttgcactcagctctgccatggaaaaagtggttccttcccaggctctcaccaggctcacatgggctccagacccctgcacccccaaccagactggggacacagggactgtctgctcagctctgca

SEQ ID NO: 16589 - DNA, 1396 bp, Artificial sequence
  DNA replication origin
gtagatgggtaggtggatgggtggggacagatggatggatggagatagatggatgatgaatggtggatggatgagtggggggatagatggatggggatggatggataatgaatgaattggtaagtggatgggtgggtggatggatggatgggtggatgagtgggtggatggatggatgggaatagatggatgctgaatgggtgggtgggttgatggatggatggggatagatggatgatgaatggatgggtgggtgggtggatagatggataatgggtggatagatggatgggtagatggggtgaatggatggatgggtaagtggatggatggatgggaatagatgatgaatggatgagtgggtggatgggtagatggatggggatggattgataatgaatgaattgataggtgggtgggtgggtggatggatgtatgggtggatggatggatgggtaggtggatgggtagatggggatagatggatgatgaatggatgagtgggtgggtggatggatggggagggattgataatgaatgaattgataggtggatgagtgggtggatggatggatggatggggatggatggataatgtaagaattggtaggtgaatggatggatggggtagatggataatgaatggattggtaggtggatggataatgaatggattgataggtagatacatggatggatgtacaggaatgaatggataatgaatggattggtaggtggatagatggatgagtggatagatggatcgataatgattgatggatggatggatggggatggatggatagataaatggattggtaggtgaatggacaaatggatggatggatgagtgggtagctggatggggaatgagtgggtaggtgggagaatggatgatggatggatggatggatggatggatggatggatggataaatggagggatgcatgatgaacttctcccttgttcccagcctagtcctagaatatgttgcctcttctcaaaaataaggtaccacaaagcctctggtgacggtggagcaaaggaatagatggtgaatgtctcatacccacttcggatccagaacaggcctaggagagactcaggtgggatctgctgctgaggaagggggttggggctgaagttggaggaggagggcagctctaaaccacctgttcctggctctaggcctctcaggccagacagcccccacccgtttctgcagatgcccgcatcatggtcctgaggggatgggggccggcctggagcctttcccccgtggtgtgtggctatagcggggacatgaagggggtgtgttggggacgtagtgaccactcccttctaccgtcagagatcctgcttccccctgccccctgcccctcctcggctgccctt

SEQ ID NO: 16590 - DNA, 852 bp, Artificial sequence
  DNA replication origin
agggtttgcccaaagtccttgatttaagcccttgagtgttgattggctgacttagctttggattgtggtccactgagatcgctggatctttttaagctttagagttatgccctgccatgtggatgcaggtggaggaaggacttctcagtgtgacccatgagaggagtagctctcctgggccccaggccccaggctgcatgtgtatgggagggaggaggagaagcaaggaaaggaggagagacagaagtatatactgagctggtatttgggggaagggttggcgggttgggagaagggaagagaggagtctgggccaaggccagatgtgtctccctggggagtcctcagagcgggcagccggacgtcgctccatccttcccgcctgacggatgggtctgctgcgcaggcacaagctgtcgggccaggccctgccaaggcagaacagtggcgcttctgtgcgcgctgctccgctccgctcaggaggatggggcccgcccgggaagccagggagtgatggagaaagcagacgtcccagaacaggagccgcggggtcacagaagcacaactgcgtcccgaaacaaggagccacaggatgaggtgggaggggaccgggaatcaacgcgggggagcgtttgggggaagtgctggtcgaaagaagagaggcagaaggacgcgcgctgaaggagcctggggatgaagagctcgatgatttggccacaagccccctcacctttaagaacaaagcttcctgcattcagttgcagagttttgtttcccggtcagatgctcagagaccttccaacctgtcccccacccctcagccttgcccatctccacgggcatcttccgcgc

SEQ ID NO: 16591 - DNA, 973 bp, Artificial sequence
  DNA replication origin
actgagactccaggagatgggtggcttgttcagaatcacagaagcagcgtggatccaagaagggatctgttcccaaacagaaaccagtgtcttgggagagagagagcagaggaagcccgcacctctgccctaacctgaggctttgagcctcccgcaaagccgagtgagttgagagcgcccagaaggcagacgctgcggagggagagactcctgggctagccaaacagcagggcctcgggcaagagcgtcacctgcgcgtcctcattctgcgattactgtcaggggaccatccatcagcgccgccctggacgctgggccagactgcccgccgcccgcaccgaccgggtctctccagatcgcattagcattagcgtggggcgagggctcagtgcggcactggctgctgagggagaggcgtggcggggaggggggcggggcggggggacggggacatcgcggtggggccattgcagggcaggggagtggctgctttaggaccctcctccttttcttccaatctcccgcctctggcatctaaggtggatgaaaggggcactggaatgggcggcttttggggggcagggggtgcagaacactgaaggcatcagggaagggtagtgatgggggcagttatcagaagcagagaggaagaaatacctgtaaaggggaaagccagagaaattgtctggggaggggagagactgaaaatgggggtgcagagattgggggttagtggaagaaaaagacttaaagggaaaggaaaagagaagctgtagagggaaaaagaataggcaaggaattgacgagagagcagggaaacaggaaaccacagatcgtcaggggctgacaaaaccttagagacaatctactgcagcccctcattctacaaatgaagaaatggaggcccagagaggggaatcccttctccaaagacccactccacctgctggctgggcaggctcttgaccgcagg

SEQ ID NO: 16592 - DNA, 1080 bp, Artificial sequence
  DNA replication origin
atttgcctatttacgtacagcaggctgtgggggtggggggtgagggaaggccgggaataaacgaccaggatggagcgggctggcaggagagaaaatgcgccccccactctttgcgggaacagccaacgggcctcctcagctcgcagctcaagcggccgcgcggcgggccagtccggggccgggggccggggccggcctgggggaggggaggcgggggcgggaggggaggcggaggcgggccctccccgggcgctgtgaactttagctgggccgccgcctgtcagcgccagaaagcgttaaaggtgcagcagcccgcgccagcctccgcagccgcctttgtacgagtgatttatgacttcagtcttggttcaccaagagttcacacggctttcgctgctgttgaaggttaaaagatggtcttcgcttgacaagttggactattgaaaattccttcttcttcttctttttttattttagaagcgaagagcagaggctcaggagagaaaaacattggggagggggcgggggacaggggttgcaggtgggccaaaatggtaagtcaggaaggtttgtcttcctatatttaggattttttgttgttaggatttgcgtgcgtgttggggagagggtagagaataagagggagctaggcaagagatgtaaagatctctcatatttagaggccaaaggagtgaaaaaaaaacttgcttccacagttaattatctgggtaacttgggtcacaccccctaactgatcctcctctagagaccggaaatgggccaggtaagggagagagtttgggtaaagggtaaggtttgtgtgcttctcactgggtgtacttgatcatccaccttacctgggtaactactttttttttttttttttttttttttttggaaatggggtccagctctgtttcccaggctggagtgttgtggcaccatcatagttcactgaagcctcaaactcctgggctcaagtagtcctcccaccttagcctcttaagtatgtgagactgcaggcatgtgccacaccgccaggctgggtagctgcctttcaatgtgcttctgcacccacag

SEQ ID NO: 16593 - DNA, 2554 bp, Artificial sequence
  DNA replication origin
gtaagccacggaggcgcaggctctggctccagcctccagcatgcagcggtgtctcttccttctcctcgtcttccagcccggcaggagaagctcccgctgctagcctccctcctaccgctccgtcaccaacacaaccaacagggaggcagcgccccaggctccaggctccaggctccagcgggtgaaaactaatggacccttctagttctctaacccaggtacctagcagctgagcacactgacacagaagacccaaaaatgacgcaccacttcctcagcacgctttatatactgaagttacggatcctggactacatgttctgattggatgagagaaaaacctctaggcctactctgattggactttattttcatgctgtgattggttattttaagacttgctctcatgcaatcagaacatgaagtctaggaaccggcatgcgcataacctccgtatataaatgatgctgaaaaactgttacggtttttttttttttagggttcggtgttttactgttgagctgctcagtgcccagcttagaggaccaggaaaaggagtcaccggccgtatgctggaggcttgagacacggcacagcggcgcagctcgcctcgctatggttggtggtggcagtggagattgcgattgccgcgcggctggagggataggaagaggaaaatagttttgggatagatagaggggtgggtaaagagtttggttattgccaaagggaaaaaaggatagcgaggaggagaaggcgttgcaaaaagacgatggggaaaagatggtggggaaaaaaggttttgggtagatggaggtggaaagacagggtgtggagcgggagtgagggaaggttttgcagaaagacggtggatagaaagtttatgggtggatgaagggggaaaagatggtggcaattggggagaggagagagtggtgaggtgggggaaatgggctagcagtagggagagagggttttgtgaaaagacagtggggagagaagtttttgggtagatagaggagcagaagaagatagcaagtgggagaaggaaaaagggtaactagcgggaggaagacaaggttttgcgaaaaaacagtggcagaaaagaaagatggtggcgaaaagacggtaggtaaaaagtgtttgggtagatggaggagggaaagagggtgacgaggaggagaagggagggtggcgagaagggagcagggaaagaagggtgggaaaaagacgggaaaatagtttgggatagatgcagggcaaaaaaaagggtgacaagcaggataggggagagaagaggacgagtgggaagagggggcagactttgtgaaaagatggggaaattttggggggtagatggggggaagagagaggtgagcaggagtggggagaaggctttgagaaaagatggtggggaaatgtttttgggtagatggagaagggaaagagtggcaaggaggagcaggaggaaagacaatgaggaaaacagtttttgggtagataaagggggaaaagagggtggtgagcagcaggagtagggaaaaggctttgggaaaagacggggggaaaatgtttttgcttagatggaggaggaaaagggcatgatgacagcaggagggggaaaaaagagggtggccagggagaagggggaaaatacggtgggaaaaaacgggagaaagtgtttgggtagatggttggggaaaagcgtggtgagcgggagaatagagaaggctttgcgaaatgacgggggtgggggcggggagaaaacgaaatgatggtggggagaaaacgatgaaaacggtgaaaacgtttgggggtagatggaggaagagaaagggtggtgagagggagagagcgaaatgcggtcgggaaaagaaggtggggaaatagtgggggacaaaagttttgggtagatttttaaaaataagattatttgtattttcacttttgagtagtttgagttctttagatattttgtgtattaacctcttgcctgatgcatagctgcaaagactttcttccattctcgggttctgtcttcattatactgattgtgcttcctctgctttggaaaaggttttaagtttaatgtaattacatctttgcttttgttgcttgtgcttttgatgtctatttgaaaattccttgtcctaaccaatttcatgaagcatttatcctatgttttcttctctggtagtttcatagtttcaggtcctgtatttaaatcttttattttgagtagatttttgtatatggtaaggtaatggcctagatgtattcttgtacatgtgggtgttgggttttcctagtacagtttattgaagagattgtccttcccgaaggtgtgttcttggggcctttgttaaaaatgaattgaccgtaaacgcgtgaatttatttatgatttctctattctgtttcacttgtctatgtctgtctgtctcattcgttcatctctcttgtctctcccccgccccttttattgagagtaccatactgttttgatagtaccatccttactataaatttgtagtatattttgaaatcaggtagtg

SEQ ID NO: 16594 - DNA, 867 bp, Artificial sequence
  DNA replication origin
gcgccagtgccagatctgcagctgcaaaccgcgcgtgtggcactggcagcagtgagggcgggtgggggaaggagcagcccctgactctgcctccatccctctccagctacctgacactagccacacagacttcagggccagagcctcagcgttcagccaatccgcgaagccactcaggtggccgcggagtgcccttgccagcaccctatctcccttctgaggaggagcggggcgggctgcaaggccagacaggccctctttctcaggccgggctggctgcgcgcctgcgatcctggggccgcccgggcgatcccaggagaaccggcgagcccatcggcgcacgcccagagctgcagccccacctgctggcgcgcgccgccagggagcgtcttccgggagcccggcagcaaccgcggtgcaggcgcgctccgccagggaccgtcttctgggagctcggcagcaactgccgtgcaggcgcgcgcccaacggctttgcgaggctcactcggtctgagaggtcggaggctgcgagtgtcgctgctgaaggctgtggtggaccgggctggatcgcggattgtggagtagaccatagatttgaaatagcggagttggggttggatcggggctttggggttggataggggatttggggctgggtcggccggggtcggggaggggggtggtgaaaaggtgacagggagctgcccccgctcaagagccggtggttgggggtctgagaagaagtcaccaatatgaagttattcggcttcgggagccgcaggggccagacggcccagggctccatagaccacgtctacacgggttccggataccgaatccgggactccgaactgcagaagatccacag

SEQ ID NO: 16595 - DNA, 1032 bp, Artificial sequence
  DNA replication origin
cctacgccggagaaagctgccattgtcgaacatgtcttgggaggcggggtccaggctccagtagttgcccttgcctgggtggcccggctcgcgggggatcttaacgaagcagtcgttcagcgagaggttgtggcggatgctgttctgccaggcggggaacttgcggcggtagtaggggaagcggccactaatgaaggcgcagatgccgctgagcgtgaggcgcttgtgcgggttttgcaggatggccatggtgatgagcgcgatgtacgagtaggggggctttgccggctgccgggcatcttcagaggccgccgcagaccttggcggtgccctgaacttggtgccaaactctgaggggtcgctcgggccgccgccgccctcgatgtgctctcggggaagcgcaaccccgccccaccgggccacctgcagccccggctggagcgactgctctaggaactgctggctcgccgcctcctcctcgtcttccacctcgtcttcatcttcctcctctcccaggacatcgattttaccgtcttccccatcggagtcccggaggctgcgctgcggtgtggagcgaaggcgctcagctcttggcaggttcatggaggagcaggtgcttcagtcgcaggggatgtggcggccgatcacctggcctggggcgggctgagctggaagcctgggatgaatgttgcaagaagcaggaacgctagtggttaccctttgggatgttttcgtctgcttgtttctactcctttgcaacaacgtccggcaaagatgcctttgccttttataaaagcttcttcaagaccatgtgtggtggactcccccctttataacccttcttcccctacctcggagcggtgccacttcctcctaacgtagtccagggatgatggtcttctgggcaaacacccgtccggagaaaagcccagccccctcctcctcgcacccacctgccaccaaggaagatgctctactcatccggtgcagccagacagttggcaagcctttgcacgggttctgttaaggcgc

SEQ ID NO: 16596 - DNA, 680 bp, Artificial sequence
  DNA replication origin
gcccctgtacccgctcccctgaccccttgcataatactctcaatgctgaaagagatgcatccgcctcccggtggcgacgccagacccttgccctcctcccaaggctgaggaccaagtgagggctgcagcacgggaagggtgccggggtcgccagggccgcgccttctgctttcttcggtgccccggcatagacgggggccgagagcagtaggtagcgaagaggatgcgggtgcagcagagcgtaagggcgtctcccgggggcggtgttggggtaggcccccgggactggctgcggcggggcaggggccccaagcagagggcctgggcgggggttgtgcagggcggcgtgtgcagcaggtagagggaaggggtggggcaggtgggctcccggggtcagttggtggcgcttgaaacgcttcctacgccggagaaagctgccattgtcgaacatgtcttgggaggcggggtccaggctccagtagttgcccttgcctgggtggcccggctcgcgggggatcttaacgaagcagtcgttcagcgagaggttgtggcggatgctgttctgccaggcggggaacttgcggcggtagtaggggaagcggccactaatgaaggcgcagatgccgctgagcgtgaggcgcttgtgcgggttttgcaggatggccatggtgatgagcgcg

SEQ ID NO: 16597 - DNA, 978 bp, Artificial sequence
  DNA replication origin
gggacgcgtcgttgcgggggagttgggggggctggggcgcctccacgacgcctggtctgcccggcaagtgcttggtgtcgttggtgggttcgtagctgcgacaggtaaacgtccgttccgcgaaccgggcagggcaacccctgcgggtcgcacccgaaggccggacctctccaagctgcctgggtgcttccaaacaggtggacccgaagctcctgtttgatcggagaataacgtttaatttactccgccactgaattgattgtttaaatattcatctttggatatggtttaacattaggcaaaaattaggagcttggaggcggttccgggaaggggtctgaccctcagtcacccatgttcgtagctgtgttggtctgccctcgggcaagagaaggaagataattgggagggtgccaagaaagcctagagaaagtcccttctgggttcagcggccggctgtagccgctctcccaggacgtttgttgacaataaatgaatgaaggtcggcctggagacgttttcgcacaacggacagaggggagttggaatgtaaaccagcgagaacctggcatgaaataggacccctctattctcagtttgtttccaaactcttagactgccccagccctgccggatttgctaaaagtggtctattttggacgctggtggtgctatggggctgacggctacctgtgcaaagaagagggaagaattggaagctggggtctgggcagctaccaaaggtggggcttgggaacttttcagaacgtcctcagaaccgcaggagccaagaggaaatctcccgtaggggatctcaggtagggcgtgccaagaaattccaagagacgggatggagaagagaagccggagaaaaatcggccaattagactcctgtaaaaatgtgtgtctccatgtttgtcctccctcctgaaataagaaattcatagctgggggtggggagtagatgggggctggggg

SEQ ID NO: 16598 - DNA, 908 bp, Artificial sequence
  DNA replication origin
ccaccctgcgatgggggtcccaagagccagggggggaagagcggctggctctaattccgcgcctcgcgaggggtgcatccccccactgcgatgggcgtcctaagagccagggagggaagaagggctgactctgagtccttgcctcgcggggggtgcctcaccccctgcgatggggatcctaagagccacgggggaagaggagctggctctcagtccccgcctcgcgaggggtgcctcctccccctgcgatgggggtcctaagagccaggagcggaagaggggctggctctctgtatccacctcgcggggggtgcctccccgccctgtgatgggtgttctaagagccagaaggcttaggggggctgtctctcagtccccgcctcgcggggagtgcctccccttcctgcgacgggggtcctaagagccagggggggaacaggggctggctcagtccccgccttgcggggggtggctcgctcccctgcgatgggcatcctaagaaccaggggaggaagagggggagaggatgataataatttcagcatcgcaggctgtgttcacccagcctgttaaatcgttatttatatcctgaaagggagaggatgatattactccccgtaatagacagatatgactccccatcgtagagcacgaggtgtacacccgccctgtgattttcttcctcatattcagagaccgagaggttgatgtcactcccaatatcggaggaagtatacacccccgtgtgagatggtccttaataatattccacggcggagggggtgatatgactacatacatggcagaaagtggaaacctcccagggatattgttcccacgatcctggagggaagaagatgatgttactttcaatatgacagaaggtggatgaagtggtggactgcccc

SEQ ID NO: 16599 - DNA, 1122 bp, Artificial sequence
  DNA replication origin
cccctcctctccgcgcggccgctcggctgactctctcggcagagattgcttctgccttcctgtaaagttttctcccacccaccttctccgctgccagaccgcccgagctgccctcagtttctccccaagttggactcactttcggggtgtcccaaaagcctgattccagggcctgctagcccgaccccggtgacgcctccacccgcgcctggccccagccttcacccgcgatcgccgccctccggggcacaccctccgccagaaaacagccggcgggcggcgagactttgggcagagtccgggttcctctccggcgcccggcccgtctccctgtctccctgggagtgcgcagcctacacacaccagtttctctttagaacaaggacggggagggatttgggagggggctgaaaccttttgccatcagcgaacagcctcagccaaaaataaccctggaaaggcgagctaagaatggttatctcctgccagcgctgaaatcggaggctgggcgctgcgtgtggggtgtgtgtgtgtgtgtgtgtgtgtgtgtgtaccctcccaccccgaccatttgttgaagggaatcaccactgtcagacttcaatccaacaggacccactcgagccatccacactttccccagcctcctccaaaacagcacactttccggtatggacaattctttttttttttttttttttttttcacttgtttgtttgttgtggtggttgcaacagcagcaacacagacgacacatatttccctattcttctcgcccttctcaccctccctacccagctcctgccttagaaataggctttcctacactgtatctgtccacactgtctgaactcttccttgaattaatcgttttcaataggagggggctaaatcccttattaatgccctaccaggagtgaatgaataaagccaagttaaaggagacctgggtaccagatactgtgctaggttcctttgcatgtatcctttcattctgctggagctaaagattttctgcctcctctccataaaacgcacccaaactccaaaaccaggaaattctccatagaaaataggagtgaagagagaaaagactaacaggataaaacccaaagcaggaag

SEQ ID NO: 16600 - DNA, 1081 bp, Artificial sequence
  DNA replication origin
cctgcaacaccgagaaggaggaattatagtagataaatatgaagcatggagatcctttaaaaatgtttttaataataaatgagaaaatgaaaaggagagggttgggaaggaaggagggaattcaaatgccagggaattgttcagtttcgcttttaaagatgttaacactcatttatacatctgcaagacactttccttaaagaaaagttctatgagtgtgggtctggttgcatgaataaggataaaattacttttttagacgatgtttcccacatataattcagagacccctgaaattaggtatccctcttgtagatgtccttgagatgctgctggacctgggaaagaggaaactgggatatgggtctatgccaaaaggtgcttctagttataggacagagaggaaaggggcagagggagaaaaacctgaagtctgagaatctggattgcagaagactaccgaggtcgtgggagaagggagagaaaacaaggatgaaaaccgaaaggggaagaggcatgaaatgttgtcaaatgccaaaaggcatttggagagaagttgggaattgcattaagaaaaccactgcaaatctcatttcagaccatttagagatatgccccctgggaactgcgagctcaggctgtttagcatcaaacaaatggatccactccatccctaccctaattaaataaatcattcagtaattccactgggttaaagaaccaaaataataaaaaccttcagggcctactcttgccaaatatgtcagggatcgtgtgtgtgtgtgtgtgtgtgtgtgtgtgtgtgtgtgtgtgtgtgtgtgtgttctgagacaccactactgttaaataggcagagctaagacttaggggactggcagattattgcaaaaagggcacggggcagagggactatgttgtgagcctgcgaaagaagtttgtgtggggactgtgggcagtgaatgcgttgggaacaatatggaaaactgggagctgccttggaatctacagggccgggtaagagaatgtccgaaagaaaaatgagcaggtgcgggatgtgcgcagagtcggagaagagtccagg

SEQ ID NO: 16601 - DNA, 1249 bp, Artificial sequence
  DNA replication origin
gtgtgtgtgtccccgctttccccttccttccccgccggtcctccggccagacggagcagcgagcggccgccaaagcccagcagctccgagcggctccactgccgggcgcagcctcgccgcggcgcgttcggggaccgggaaccggggaccgagaggagcagcagcggcgcccgccgggctcgggcgcgggttcccgcttggtgcgcgccggagtcggagcgaggcgcagagagagccggctgcgcggcggctgccgcggctggggaggctgcaggccccgcctgccggccgcccaggctcttccccttttctctccacccacttgccccatccccgcaagccctgcagcgaaggcagaccggtttgcagcacctgccgcaacagcggccggagcttcagccgcagtgggctgggcgtctcagccggtgtgtggggaccgggcgcctgtcccgccgccgctggcccagactgagagcggggttggggtgggcccctggaattggcgggtgcctccaagactccaggggttcccggccgttctcagcgtcttgaagccctgcgaaacagggctgtggggatagggcgtcccctttccccaggccacagaactcagctacgcctggtcgcccgcctgctagactctgcctgaggcggcgaagccggcacttgagcgcaggcgcccccttcacgaggaagggacaggccaggattccaaggcgttggttgctcccattctaaggacagcaggtgttcccagcaagtaagacctacccaacaggtaggggtaggctggcgaggaggtcctaggagagagaagctgggggatgtcatgggaaagcgctgtgacggggctgagggccaattcctactgatagcgcttagtgggctgggggcacttgcaacgtcacctgatgtcagtctagctgcgaagagggtaggggtcagatctaaaggactcctttgggaaaatgctatcatgaaagctaaagctaaattcacttaataggaaccaaaaggtagcggatccttcgcggctgaattgaagcaaatggtatttttcagcctcatcacttccttccacttacccttctttaccaaaaacaacgccggtggaaaacgtgggatacattctgtctggggaataacaacatttcatgatccttatcttcagagatctctggcttccagtttctgtttgaaggatactcccttagttctctgcaaatgaacacctcttttcagttttgta

SEQ ID NO: 16602 - DNA, 997 bp, Artificial sequence
  DNA replication origin
cactcgtagccgcgcgcccccgccaaggcgcgtccggagcgagtttggccccgcggctccagccccggcacctgcccgccctcagcgttgcccccggccccggccccgcccgccgccccctccgccctcccgcccctcccgcccctcccgcccctcgcctgcactgctctcccttcgctgtggggaagcgacaacgtcccgataacttgcagactgtggcgcaactggtcttggtagcggaggcacccgaatgctgcccgggtgaggtaagtttcctgtgcgtccccggccccttcccactagacccttctgaggggcttgcgcttaggggctctgcatctctgctgaaacccgtcggtctctctacccttccactttgcctgtctgcgttgtgctgggggtgacgtggagagggcgcccgtggccaccgaagcggaccttcgttccgcgggggccacagctgcgcgctcccaacggacacccacccgctcgtcacccggatccccggggccgcagtgacactcggagatcactctgggttcacttaaataggagtactctccccttttccggggaacctgcagagtttggcagcggaaggaaaggtctcccaccaccctcccccggtacgaaacagcggtgaacttgttaggcgccctggtatctcaagaggggcttgcgagttggtgttctgctcatttctggcgctggtgccggattgaacaggtgcggtatggttccagtctaaatgcagcaacagacttctgcgtttcccaggctttctcccccagcctggtcaacgtgacgcttcaacatctggggcaggggctgggagtgtaggggcactggggagggagaatgcccgggtttgatttactatgccggtgccaggagtcgccagaacagaagaaaacaaatgtctgcttatctggcatctatgcagatgagcgtgttgtcatttcttatcccccccaacccccagctctcttgtctggtg

SEQ ID NO: 16603 - DNA, 974 bp, Artificial sequence
  DNA replication origin
cacttctcattgatggagatccggagctcttcctcctcgtagtcgtcaaagttactggcatccccagggcctgtgtacttcgggatgaagggagcttccaccttcttctcatagatggcgatccagctggttgtggcgaaccacttgtggttcttgatgtcgccaaccccgttcctgaggtttccgaagcgcttggtgaggtccacctgcagcaggctccgcagcagatgcttgaggtcagagctgagtttggagggaaaccgcaccctcccagagacgatcttctcgtagatctggatgggctggtcggcgtagaagggtgggaagcccacggccatctcatagatgagcacccctagggcccaccagtccacggccttgttgtagcctttgctcaggatgatctcgggggccaggtactctggggtcccgcacaaggtccaagtgcggcccttcacgcgcttggcgaaaccgaagtccgtcacctgcaggtagccctgctggtcgatgaggagattctcgggcttcaggtcgcggtggatgaggtcgagcgagtgtaggtactggacggccaggacgacctgggcggcatagaaacaggcatggggctcgctaaaccttccgacgcgctgtaggcgggagaacatctccccacccggcacgtactccatcaccaggtacaggtaggagttgtccttaaaggagaactggagcttgacgaggaacggaaagtcgatcgcctgcaggatgcgcttctcgttcagtatgtgctcgacctgcttcatcttcaccaccttctgcttgttgaggatcttcatggcgtagtggccgccggtctcctggtgcctcaccagcatcacccgcccgaaggagcccatgcccagcgtcctgagccgttcgaactgatccgagctggcggtgttttgagcggggtttccccatctgtagaggaaatctcctctggctttggctag

SEQ ID NO: 16604 - DNA, 1243 bp, Artificial sequence
  DNA replication origin
caccggggaaacaccgcggacagtcgggccagcagcgcccggagctcactccaggtctccaaacttgcagcacttcccagagcgcgcgcgctcggagcgggacctgcttgctccagtgcacgccgcggagcgaaccatcgggctggcgggggtggaggggtgcaggcgtgggggctgcgggccgctcgggccttgggcttctcctgccgccgccgccgcctcccgcccccggccaggagtcgcgcgtgacgcggttcgccgcaggagcctcgaaggcgcggcgccggcgagcccttccccggcaggcgcgtgggtggtagcggccaatttgacagtttcccgggccgggcggccagcgcggaggcgccacgctcgggtcgggggcgggctgacgccgccgccgccgcgggaggagggacaaaggggtgggtccccgcgggtcggcaccccggcggttgggctgcgggtcagagcactgtccggtggtgcccaggaggagtaggagcaggagcagaagcagaagcggggtccggagctgcgcgcctacgcgggacctgtgtccgaaatgccggtgcgaggagaccgcgggtttccaccccggcgggagctgtcaggttggctccgcgtaagtgcctccttgtgccgcgcggttgggaggagggtcgtgagcgtgagcgtgggagcgctgggggctctgctcgcgtgctgctctgaagttgttccccgatgcgccgtaggaagctgggattctcccatccggacgtgggacgcaggggaggggtaggtttcaccgtccgggctgatgactcgtggcctccggggctcctggaacctttactctgaagtcacttgggctggagattaaggcgcgagtaggggacactgtcttgaacccggtgtcctggatttctgctggcttggaggcatctcgtgtctgttgtgtcgcttgcatgtctttgtgttttccttctctatttcaaaccacactcggtattgatgcaaagttacaggcttgtgtacgtgagagaaactgaaaactcatcacagagcagaatcccttttccctttcaatcagctgcgtctgtaatagaagtaaaagttgtttttttttttttttttttccagtagggaatggggatggaggtttggaaggacccacaaaagaggagtgtgatgaatgctttgtattctagtactagcctacctgtcaccagttctttttatgtcttcatttgtcaagttt

SEQ ID NO: 16605 - DNA, 1345 bp, Artificial sequence
  DNA replication origin
cctctgcccgccgcagccggccgcacccggccgcacccttccccgtccgtccatgtccctgcccgtggtgctcccgggctcctgctgccccgtggctgggctttcgggtgggccgcaggccgggggcccgggcgccgctgccgccgccgctcaggagccgccgctgcccccgctgcggccgcgctggccccggggcgcgctgcagcccccgtcgcggcctcgctgcgcggccaccgctgctgccggggtgctggccgcgccgccggcgctctcctcccgccgggcagtcgccgccgctgccgccgcggccccgggctccgcgctgctgcccgcccgcccgctgctgtcacttgggctgcttcagctgatcttgggctgctgcatggtggcgctcagcttcggggcgctgtcgctgagcagctccccgcaggtgaagaactcgtgcccgttctgggccggctcctcggtgagtaccgcgcgcgcgccccgttcgcccggtcatcccggtgatagggggctctggtcgttcctctccattgcccctttgttggcctccagggctgcagttgggggagcctcacgccacctgaagtttttggaggctggagaaaaatgttccgcgacggtcgagttcaggggtgaattgggttgcacctgggtagtgtctgttgcgcgcaggctgaagaattttattttccctgtcaagctaatagaattaaagacacccagctctttgggagattggaaggacagggtgtgggtggcaggaaagtgggaggaaaatgattaaacttcttttggttattgagtatttgctgcactgacaacgtctgtgctgggagggcagggattttgatcatttttgttcactgatgtatcaagaatgcctggcacatagtaggtgtatttgtgagatgggacagtttgactggggcacatcgcttgttttattctgcattaagacacacgtaaatgtgaaatgtgtagggtggctcgacccccagacgagttcaggaggtaatgagggggtgtgtgtgaactggcgcttgtacctggtcattaaaggaaggccttaaccccactgggttcctggagccatgcaggctgctgtgcagaattcagtttgtgagaaccgggacctgtcattatggatgagctggccaaaagtcctggagtgcccagcagctagctagagatgtctgctctacaggacccactcctccctcctccaaccgggaacgctgagcctggggccaaagagtgcccaacttcagagaaaagctgctgccagccagtatctatggacaccgggtggccactcccccctgcctcctaacaatctcac

SEQ ID NO: 16606 - DNA, 940 bp, Artificial sequence
  DNA replication origin
catgcgccaggacattagccccaccagggactgtgacgaccagaggccgatggacggagatgtaagtaggtgcgggtttgggcttcctcggccccacgcggtgggagggaagatggcgccccatggccttgtgtgcccttgggtagtgactttacgggaagtagtctgtggggacgctaagaacttttccaccgtaagcctcagaaacagcttgcacctaaactgtcaaacgccagcgggagagaattaaagtgttgaatgcactcatcagattcttagcaggatggcctcaaatcagtgcttcccacactgtgcctggagaccttgtgagaaatgcattattgggtacatcgccctccaccccccgccccccccccccccagtttctgattcagaaagtatggagtggggcccgagaatttgtatttctaatgccaaataaaaaacaagccatgcttgaggaaggagagacttcactggaaaggattattgcaaaggggagaaagatactgtttcgttttagggaggaaggactgttgccatatgagaacctctgaccttaagatctttaagggtctctagagttaggtacaagggggaagttgttttatagggaggagtagccaagtagaaagaatagggtatgtgaaagtggcatgaaaagggtgggagttgaatgtgctgtggatcagagaatgtttccacctgagaccagcgttttctcaggagtggttgtatgctggccaaagttcacgcacctggaggaaggagagacacttaaccaaagtttggttagcaagcagttcagctgatcgtttgtgaagaaagaatgggaatgtggagggtctgcgtctggccttgtcataggaaaacaagaggagcatccctatccctgctctgtgtcagaaaagaaggagtttcccagaacacaaaaggttgg

SEQ ID NO: 16607 - DNA, 1012 bp, Artificial sequence
  DNA replication origin
cctactcaggctacgtctacacgcaccggctcttccaccgcggtgaggacgagccctactccgagccctatgccgactacggcggcctccaggagcacgtgtacgaggagataggggacgcgcccgagctggacgcacgcgacggcctgcggctctacgagcaggagcgcgacgaggcggccgcgtaccgccaggaggccctgggcgcgcggctgcaccattacgacgagcgctccgacggcgagtccgacagccccgagaaggaggccgagttcgcgccctacccgcgcatggacagctacgagcaggaggaggacatcgaccagatagtggccgaggtgaagcagagcatgagctcgcagagcctcgacaaggcagccgaggacatgcctgaggccgagcaggacctggagcgtccccctaccccggccgggggtcgccccgacagccccgggctgcaggcgccggcggggcagcagcgggcggtgggccccgcgggcggcggcgaggcggggcagcggtacagcaaggagaagcgcgatgccatctcgctggccatcaaggacatcaaggaggccatcgaggaggtgaaaaccaggaccatccgttcgccttacacccccgacgagcccaaagagcccatctgggtcatgcgccaggacattagccccaccagggactgtgacgaccagaggccgatggacggagatgtaagtaggtgcgggtttgggcttcctcggccccacgcggtgggagggaagatggcgccccatggccttgtgtgcccttgggtagtgactttacgggaagtagtctgtggggacgctaagaacttttccaccgtaagcctcagaaacagcttgcacctaaactgtcaaacgccagcgggagagaattaaagtgttgaatgcactcatcagattcttagcaggatggcctcaaatcagtgcttcccacactgtgcctggagaccttgtgagaaatgcattattgggtacatcgccctccaccc

SEQ ID NO: 16608 - DNA, 1995 bp, Artificial sequence
  DNA replication origin
gcgcgctcccccgcgccctccctcgcaggcccgcccggccccagcgcgcgtcacgaggggccagcgagctagctggagggcgggagggagggtggggaaagggggtggggccgcgagaccggaggggtccgagcagcggctgcggagccggagctgggcgagggcggctgcggtcccggcggcggcggcggcggcggcagctgcggcgggagaagatggtggcgctggaggcagcagcggctggagcggagctttattcccaggcttggcaccagcgctgtcactagcgccgcctgctcccgcgggcccgcggacccagctgtcaggcaaggtaccacagccagggaggggtgggtgagaaggggtgcccggcgctgatgcggcccccgacggagcccgggtcctcgccaaagggcgcccccggacgcgagaggggctgcctggaacaatagtgcggaggagcggaggcagcaggcgacatccaggaggcagtgcctggaaccatcagctagcgaggcgggggaaggcggcgttgcgagcgagacgcctggggtccggtgcccgctgagatgccgggcttcgggcgcagcaggcgggcctgatgacagtcatggcaggagtgagtgtgtgagagtgtgtgtgtaaaaggtacagcagaggggatggggtggcggacggaggtgttggggggtgacatttccaggaatccccgctaggaccccctcatctctcggctgactctcctggagaaagaatgtgatgatggaaacggtgaggtgggcaggatgcacttggtgtgtgaagtgtggagggaggcagtgggataggggccggtttgtaaaatcctgtatatgtgtgtgtacgcgtgtggttgcatccacgttccccaaactgcgccccaaatccagagatctgccgctgcccttacttgatgtcaccggctaagactgtgggacagtgtttgttattttgaccctgcaactctgagcacagtgtctgttctgctcctgcgtgtggatggcccagtgtagggattctcgcttccccttcctctggcctcatgacatggggatgtggaagtgagcatgttgctttgaggcacatggcagggaaataggataaccgttacacattctgggcttgctaatgtacctggttttgaaggggccttccatcctgtgatactacttctctccttagcacctgttccataagggtcttgtactccctgactgtgcagtttctattgtttttctcttgtctgaccagaaggagaaggatgttgaatgatcagattcctcttcctgtccccacaactttcaatgctagctagaccttctccttccacatttaagcactgaaaaccttatggctagaggatggatggtctttgtgttggttcttttagaatgaactctggaggtgtatacgtatagagagatgcggtggggcggggggcggtcttttaaaaagaagaaaaatatcacacggagaaatgtttggtgcccacttggtcagcatcacacagccagggcgttttcctcaggaaacaggatactttatttctactgctggtgacatccactctcccagctgtcacaatagctaggtggtgccgtgtatcatttggaaactgaaatctcctgagacccacagcgatggggtcccaggtcagtaaagtccctgctttcctacctgatagagcccactagtagggaatttggaaaaatgtcaggctggcaacaactcacccagtgggaacaaggacacagaaatgcatccagagtctatggctgtttaattgtctctgcgtggtaaagataggtgtgtgtaggtagggttgggtagaggtaggcagggagatggcatattcatgtgtatccagggcagtgtgattccccctcacctatgtttctcctgcggtattcataggaatgagtgcactttacacttaatatctcgacacttctttattaaaatgttgtatgactagct

SEQ ID NO: 16609 - DNA, 851 bp, Artificial sequence
  DNA replication origin
tcgcggcagttcgcgcgggagcggggcgcctgggtggatgggcgcttgggcgcctgggctgccggacggtgggaacggaagtcgctgtgggacgctgaggaagccaggatggcgactccgagcaagaagacgtcaactccaagcccccagccttccaagagagctctcccgagagacccttcgtcggaggtcccgagcaagaggaagaattcggccccgcagctgccgctgttgcagtcgtccgggcctttcgtggaaggctctatcgtccgcatctcgatggagaacttcctgtaagttgcccggaggccgcgccgcgggtgtggaggtgtgctggccagcaggccccggggctccggcagcgcgcgggcgtgggcgtgtgggtgtgtacctggcttgtgggtctggccttgaattcgtgccggggttcccttgaggattttcctacgtaggctgtggagattgacgtgtatgatgtaggagatgtgtgccttgggtgatgtggtttttaaatttagtcagccaaggttttccaaaggtgtcatgtagcaggtagtggttgtaggagggagtaggtctctgcccgctgggagtcgcgatccatagcggccctggtctggaattcacagaagtattgtccccgggaacttaagaggaggcaacagttaattcggcgtgatagtgatgctgtggcggattcttagggtaggcatttgccagagaggagtagataagacggtaaaggttgttcgggaatggaggttacaggtacaaaaaaattaaacacttactggcaattgttggacctccctacaaacccttgaccccactaaacccagttttcttccctg

SEQ ID NO: 16610 - DNA, 1167 bp, Artificial sequence
  DNA replication origin
cggcgtccggagcgaccccatgctccggcaccgcagcgcggttcgaaatggaaaccagacactgggcagccacgaagtccatgtaggcggccgcggacatggtgcgggcgacggcagcccaggcggcgcggacaaacttggcggtggctgcggaggttcggctcgccctgccctggcctcggacgacgagcgcggcgcggcgcggcacggcgcggcggccaagggggcgggggcgcggggcgcttccgactcgcaggagcgccgaggcgacctcagcccctcatctttacgtaaccggcagcgcctccgcacgcagcatccacggccccgggctccgccgcgccgccgcctctagccgccgcccctgccccgcgccggccgcgatcccccgacgggcgcgccggcccctctgagccggctcccttggaaagatgccacacgtggcggtcgcaagtttattcgactgaaaacgcccccgaggcgctgggagaggaaactgcaagagaggtgcacgccctcggccgcctcgccgtcgagccaaagccccaggacattcacccgatcaccccgacgcgggtggcgagggtcccgccgagcgccaggtctaagagacactttttcccgagtccactgacggcttctgaacccctgctccggccggtccgcaccgttccggcattctcttgctcagtaacaatttcgcagaatcccatcacgtcacaaaccaaaccccctccaattggccagtggggagggtgattcaactctgtttactttctccccctgccagtcagaacggccttcggtggagaggtgcgtctagaactgaggcgtgcggccaatccgactgttccgtttcgctgcctcgtgctacccctacagcctcgaacactgacatttaaaagggtaacagctgggaggcagggaaggggcagccgcacactttcggagtgcctcgcggtcccgtggccggtccgggcctcctggctcacgttccagcttgcggagctttgggacacatctttcctagtcagttgcgctcgttcctatggcaaaagagaacttcagcttcggttttccagctcccaaacagttaagtgacttcctgcaaacgctacagtcccagcaaccagccttccaatcaaaagtaagttggttgatgtcact

SEQ ID NO: 16611 - DNA, 1040 bp, Artificial sequence
  DNA replication origin
cgggggcggtacgtgcacgcggagagcgcaaagcaagggcctgggccgcgcggggctcccccccggtccccgcccactcccacccccgcgctcccgggtgcaggggctaatttcaaggttagctcacgtgggcgtgggcgcccggagctccttgcacgagtttggggcgggttcctggtcccccaatctagggcagtttgttcaactgcagtaaagggagcttgatgttccagcagggaagggatttctgagaactgggactgtcctcagatgaactcgcctcctcaggctgctgcggcggcggccgcctgcggaagactttttaaaagggcgatgccaggccggggcgcgcggtccacgagtggctgagtcgcccgccagtccgcggccggagccgagcgcccgcccccgagcgcgggtgattcaccgagtgccgcgctgggccggtcggagcgcggggggctgcgagctaaacttatcctcctgcatatgcatgaacgggcggcctttctgcgctgcagaggagagggctggagttttgcggaaggctgctaagtggggcgggagcaaagtagggcggcgtgcaagttttcgcgcttgcctgagcgcccttccccctccagcccctgggtgttagctgtcattatggccacgggcgttccaccagatcgggctttacctgattgtatttcaaaatccaggaacatcgccattgttggaagctttatccctttagcctctcccctcctcaagctcgcctccttctctaattcccctgctttcaacaaaatgaacactggtttcctccacatatgttccgtgtgcctaggtggggtcgctggagctggaggggctgggccctgaaagggagaggtctggatgcagcccagaatgaggtccaacacgtgatcctctacccccagtgggccatctgttctcctccttccttcccgcctggaggctggcagttctgcccggcacggtccacccctcccagcaggaaagagtgagaaaagccagaactggcagaacccaatacc

SEQ ID NO: 16612 - DNA, 956 bp, Artificial sequence
  DNA replication origin
ctccccaccggggtagggggttgggggaggtgggaggaaaacagttcagcaaacgcccacctccaagtaccagtagctggttcagctgtcggtgaatcagacactgtctcagcagcttgtcacctgcgcttgggaggggaacagagggcaaccttggaacttgggagggggaggttgggaaagtgcaggatccagcactgggcctgggcctgggcgtaggggtgacgcctacggctcggaaaagggctatccacctccctacacctacacacgtctcgacccagtacccggacgccgagtagagggggtgggacaagagcatgggggccgtacagaagggggaactggaagaaggggaggggagaatgggttgggggtgtgctgcggcgggaagcgctgggtgccgggcgggcgcggccgcggggagagctgctgcccggtgcctgcccgcgcgaggttatgcgaggtaaccgagcggagaggaggagggaggcggcgggggccgcgggccggggtgtctggcactcgttggacaaagagatgatgaaacgtgagcgctatatttaccaagggggtggagacggggcggggggggcggagagtaaaaaggacaaactgttccacaacaaccacaggaaacacagcccattctgactcactgggagggccacaccgaacccctcgcaggcttagcctgaaggcagacgcggggcgcaggtgctcccgggaccggaccgaacctgggctggggctggattgatttataaataaaggcacattcgatccaagagtgcgtgtgtgcgtgcgtgtggttcttgtggggtaggggagagcacggaatggcaggaatgtttcctaaccccttggccgggccatcgcgggagagatctgccggcaaactctgggagcgcaattcctgcaaagtcatctcctcccgcacagcctggccggcctgc

SEQ ID NO: 16613 - DNA, 1296 bp, Artificial sequence
  DNA replication origin
ttgtttctgcctctgtgcaacattgtgctgggaaggacagggagctggtaaccatggcagtggagcagagggtggtggtgaagaggtggtttttaaatggggtgaacttcaggcaggcggcacccagagctggaacccccacggcctccttggagtcctttgttcattcagcttacttagggagagagcctgcattcttccccgctgtgaagcaagctttgaaaggaaaggttttgccagactccataaggagagggtgtgtccctaggagcaggttttggggttctgcctgaaaaccttggtcggcagagaattttgggcaccctgttacgaacaggacagtctgtgatggcaaagaagccagctctgcagcatcctggatgcagagttcttacacaccgttagctgtctcaccacttctccctggacaggtggccactcgtgggggtggcccagaatcctggccaaaaaagacagccaggcagggcccccacaggaaggtagctggcaggggagtcaggaggagaggaagggggagggaagcagtcacctcttccacgttcctggatagggagccttaagacccttttcaggacaaataagtgccccccaaaaagcggacacagggcaaggcaggacaggacagggcaaacctggggcacagctcggggccagggaagtcccatgactgcagtgttcagctgcaggtttcccagctgctctgggcgggaagcggcgccgggagatgggggcggggagaagggaggggaaaagaggaggagggaagtaaacaggagaccacagagagagccagttcccggcgttcagagaacactagccgcctccggtccccggtgggtggctgtatgtgtggaaatgaaactgggaggaggagggagagagggaagagcgggcacgcacttctcggctgtcatccaccttgcctcttccgaccctccagcccgctccccaccggggtagggggttgggggaggtgggaggaaaacagttcagcaaacgcccacctccaagtaccagtagctggttcagctgtcggtgaatcagacactgtctcagcagcttgtcacctgcgcttgggaggggaacagagggcaaccttggaacttgggagggggaggttgggaaagtgcaggatccagcactgggcctgggcctgggcgtaggggtgacgcctacggctcggaaaagggctatccacctccctacacctacacacgtctcgacccagtacccggacgccgagtagagggggtgggacaagagcatgggggccgt

SEQ ID NO: 16614 - DNA, 1295 bp, Artificial sequence
  DNA replication origin
cctcctctttctcccggaggggaaggaacggagaaagccgagcggcggctccgggagagagcgagccgaggcccctgcccccgaggctcggggcaggaggaggaggaggaggaggaggcggaggcggagggaagtgcgcgtcactctcgggaggagagtatttcacctccaggcagaggctgcggctgccagttgagtacgagcggcagctgcgggcgccggcaatcgagtggcttcctggccatggagaggagatctggacccgaggacgccagggactcctctccgtctccctggaccgctgtgtaggcacctgagttaacggacgctaagcggggtaggggaaggtaagaagcgactcggtcacccgcccccccaccccgctccacctcgtttgctgccctcgggggccactgcggggacgcagacccgggtctcgcccaccttttctgctcccggcggcctggccggctccggcgttgggcatttctgccgaaaaggaaaacgtcctcccgcccttcccccgtgcgcctcctttcccggtttcatctctggattgggactgacccgactccccaggagtcagtcctctcttcttaagaaagggtcctcgggaacggtgtcttgatttctttctctccactctctcttttcattacgtttacggggaagggaacaatggacctttcaaagtcggtgcgaacagccttaaactttctggagagggatggggtgaggggataaaccccacagtaagccgattacagtgaaaggttgatggaatgtgctttgcagtccgggcttcagtgcgcgcgcgcttgtgcgtttggggtcatctttgtctccttacaattcccctgggttggtgggtcctccgccctccgccccctgcctctctgttagctgaggtaaggtgaggctttaaaatcgtgtacagcttcctttaaatctggggaatagccttagccctggaccctattcccagcttttctctgcagagttgggagatcctggtaaaggaggggggccctctctgtgaggacccagagtgctgctgttaatagcactagtggctacacccttagcgataaaaccaaggtcctgaattccctggatgctctctgctgagggttgatgagtgtcaccagacttcgacctggagcggaaacagctcacttgaattctccgcaggttaggaaaacagactttgatatatatctccttttatcagcagttgggattaaggatagactgcctaataatttttaaaactttcattgtgcacatgagctact

SEQ ID NO: 16615 - DNA, 924 bp, Artificial sequence
  DNA replication origin
gccccaggggattcttatcatcagccaagatttggaaacagtaatttcttatacaaagtcctgaactaatacccttgaaataggggattccccttcactgccgggtgtgtcgcggttacaggactgagtttgttgagggaggaggaatgaacaaccctgaaaactaaactatcctaccttgtatattattcactgaaagagtttcctggagggaaaacttccaattccaattaaatcgaggatgacgacggcccggatttggcagtcctgcagctgtcactagctcgggacctcgtgcgtctgagtgatccagcccgggccgcgccctcacccagagccaaggctgtgagagcagctccagcgagggggcagggtggcggcggcagggctgcttcagggccggtgccggtgtcctcagagcggcgttttggcactggggtgggccggggcgtggctttcggcgccacctctgcaagcggccgccactccagagtggcgcaggtagggggcgtgggaagacctaagtatatttattccggcctgcgagcgggatgctggggttgctccaagggaccagaagagctgccctgtgtcccagagcaggctggttcttctgacagcgctgagaacctggcgctcgcgcctggccaggtaggggctgtgactggacgctcagaacatttgtgggagtgtggaaatctctttacgggtgatggggctcaaagtctgacgcagccgagggttgatggggtgcagtcacgctcagccaggggactttgggggcgcagtgtcaggctcagccagggagtgacaggcgcagtaccagccttatctgggggtgctggaggcacaggctccggttcggccaggcgggtgtgcgcgcccaggaagggtaggagcctgcagccgcagcggggggcgctg

SEQ ID NO: 16616 - DNA, 1058 bp, Artificial sequence
  DNA replication origin
ggtggcgtctgcagtgccagaaagggaggcggtggcggcggcggctgcgaccacggccgcgcgggacgtgaggcccgagagcaaccgacgggcagcggcggccgctccagcgccccgcaccggggccgttagtcagcagaacgcgagctcttgtggaggagcagggccggcgcgaggcgagactcgggagcgtgagcggggcccctggggcgccgccgtccttcttcgccccggcgccgggggctgtagccctggtccccgctcctctgtcgggccagtctgcaggcggagagagtcggacggcgcccggagcgcggatctcgccttgtggaggacagcgcgtcggctgcggttctctctcgaccccttctgcccggcgcttcggcccgggccgctcaggtgcaggtgcgtgcggcctcggggtttggggacgccgcagcccggctcggggagggggcgctaggccgggagccgcagcgcgggagggacgagcccgggccggcggggggaggggagcgggaagcgtctttgttgttggcgaccgggatcccttctcggcacaggggaaaggcggggaagccactcctcatcgggtctgtgtttttgagaggattctctgatggttgcgtgaaggggagcggtaggacagtccctgcggtccgtggagcggccggagtcagggggtgggggagggaggaccgaccgacactctaagaaggtctttggtcctcctcggtgaagagaagggttccatttcatttcctttgcttttctctcagtggatgaaaagatggggtcaggttcccattcccctcactggcgcactgagagattcgcgggtgcctaaaagctttctcctgaatgtccttatatctctgtcgggcgcgattttagattgaatctgcacggggcttggcgatttgtgtattccggtggggctgtcgtagggttctttttctttagatggttgggctttaatcttatttgttttcgaactctaaggtaggcttatcaggaatcgtttttgaattggaaaatttaaaggttttgtttgggat

SEQ ID NO: 16617 - DNA, 1314 bp, Artificial sequence
  DNA replication origin
cccgagtctcgcctcgcgccggccctgctcctccacaagagctcgcgttctgctgactaacggccccggtgcggggcgctggagcggccgccgctgcccgtcggttgctctcgggcctcacgtcccgcgcggccgtggtcgcagccgccgccgccaccgcctccctttctggcactgcagacgccacccagacctagccaggtcttccttctctttaatcctgctttctttgctcctcctcagcctgccaagcgcgaggctcgttccggtagcgggaggaagactggaggggaacggaggggacgagcacaatccccactgagccaggagttggccactgactggaggaaggtgccaaagctgaccccggctccagcctactagcgggcggggggagagacggagcccagccttgcctcacttccaccaatcagaggccgcccggcagggtgggaggcgctctgagctcaaggagaggctgagctcgctcagcaggaggcggggattgcggaaaagaagaaccaataggaacaaaggttccccgcccctttgatttgatggactacacattcgggccaatgggggaattctcatttcgaagaaagtgggacttgttctccgggtttgagaaagaggctgcgcggagccggaggggtcgaggctgcgccgcgtggagtggcttggcttaacagcagggagggcagagcgatgctctttgacctcccagaagagtcacgtgggctgacccagagccggggcggaaaggctgcgtttgtttcttccgggtcattgacagaagcgtcaattcctgggagtagttcgttggttttctttcccctcatccttttgcctgctcccggcgaggggtggctttgatttcggcgatgagctcccagaaaggcaacgtggctcgttccagacctcagaagcaccagaatacgtttagcttcaaaaatgacaagttcgataaaagtgtgcagaccaaggtaggaacctgcctgttgcaccgtctttgactccaggaaggaatggctcactggagaggggagagaggaaatgagaggagtcggctggggcgagtgtggaccgcagcccagagttagtcttggctgcagtgcaactctttctaaaatgttattctcacgccctttctttgacctggacatgttgtctcctggtaaatatttgatggtcagcacacttaactaattgcacagagtgaacaggaccctaatgaaatctaaggtgcagatggggcagttacgtcgttcagcgttcccatctggatcacattagcagagggaaacgaggatt

SEQ ID NO: 16618 - DNA, 931 bp, Artificial sequence
  DNA replication origin
tcggcccggcctcatcgtgccggcttcgcgcgcgaacccggctttcgcatttgggaccctgcagggtgagtgatacggggctgcgggtgggagccgggctccttgttgccgggccgggggcgggagtgaagggaccggggcgccgcgggccaatggcgaagccggagcaggccgcggatggcggcgtccgggggaggggagcccgcccgccagcccaggaagcacaaagacggaggcgtcatcctgtcgtcgtggcccgagacctggctcccggcgtccctggctcgctccacagcacggtcgggaaacaatgcacggcgtgccgcctctgcggggccggcctctaggccgctcgcctccgcggcggcgcccggcgtgggcaccacgacccagagaaacaaagaggccgaggcggcggccgcgccccctgcccgttgcagccccccctagctctcccctaagaggagccgttcggggtcgggggtcgggggtcggggatccgcgtggggcctgcaggcgaagggctggccgggcctgctgagctgctgttctgcatgactcagtggttttcggagagggccctgttgggctttattgagtgaggcctttgcttagagggggatggggtatcagtgggacccgaacttgttccaaaatccattggaacatggggccgggggttctcggcgtcgtcttttgggcttctcgacgtcgctgcgtttttatcctgagatccgttttcatggaggaaatggaacacctcctttgtttggtgcatttaggctgatgaatgtgaaattttttgctcgctttccacgcactccgtggaggtgtgttttcggggaagggtcggattatctttattgattgagtgtctcctaagggatagcatctaaggagataccaagataaaggaacatataggtcacac

SEQ ID NO: 16619 - DNA, 847 bp, Artificial sequence
  DNA replication origin
ttgttcctgcagcagcgtcgagcgtggccgggacacgccggagctcgggaagtgggaggagggaagcgagggggggccgaggaggaggtggagggaggaccggcggccgcagcggctaacgctgctcgaggcgctcgcctgtcgtcgcctcacgcctccacaggccgcaggttgggcggacgaggagggcgagcggaccgcgcgccgcgaggcctggggccgtaagggcccgctgatggcgctcttcgccgctcctgccaccgccggggaagctgcgcggctcccgggagcgagcgagcccgcgtaggagatgcacacagctccgcgtcccggccgactaacgcactcgccgcccggcgcccgggctgtgagggaaaagagggggagggggcgggacccgtgcgtcagcgaaaaccccggcggcggcggcggcggcggggagcgcggtgacgtcgcgggcccaaggccacgcccccggtgccctgtcagtaggtccaggaggcggggccgagacgggttgctgtgccttctcgcggagcccagccactggcctggcagtcggcccctagggtggagctgggaagagcgagtcctgtggaggatgcgtttctatttttaacccaattgtccgccctcagcctccctccttcggattttctcattcaaacccgtttttcgccatcctagttctcacgctttgtctccagccctgggcagacattccctcccccaagaatcgtaaggattcacccccagaaaaggaaaagaattgccttatggcttcgaggtcttttctgtttatgaaacctcctcactccccacacccattttgagctccgaagtccag

SEQ ID NO: 16620 - DNA, 798 bp, Artificial sequence
  DNA replication origin
ccctgtcagtaggtccaggaggcggggccgagacgggttgctgtgccttctcgcggagcccagccactggcctggcagtcggcccctagggtggagctgggaagagcgagtcctgtggaggatgcgtttctatttttaacccaattgtccgccctcagcctccctccttcggattttctcattcaaacccgtttttcgccatcctagttctcacgctttgtctccagccctgggcagacattccctcccccaagaatcgtaaggattcacccccagaaaaggaaaagaattgccttatggcttcgaggtcttttctgtttatgaaacctcctcactccccacacccattttgagctccgaagtccagcccgagcgtggccctgacgcagctggcggcgtgcgttcgctcgcccaaggtcacgggtggttgtgcggagtgaggaaacgcgcggccgcccagggctgccaatgccccggcggcgctgttctgaacaaactgttttggccagcctgtgaaatccctggaaattgacgattccagcaaagcgtcgtgaactgggaaagcaccaaatgttctactcaaaagccgcgaagggacaaaacaagctagacccgaggcccagatgaagcgggaggaggaggcttgcgagaggaagttcaaggggggaggtactaggcgggcagttcaggcacgaggcacaggtcccccatgggtgaaaggatgactttacccggaacactgggaaccttttcagagcacaaacaaaaaacattttcaactgaccgctccaagtgaat

SEQ ID NO: 16621 - DNA, 856 bp, Artificial sequence
  DNA replication origin
ctccgcccggcagccgccccgtctgagaaatgaggagcctctccgcccggcagccacccagtctgggaactgaggagcgtctccgcccggcagccaccccgtccgggagggaggtgggggcgtcagccccccgcccggccagccgccccgtccgggagggaggtgggggggtcagccccccacccggccagccgccccgtccaggaggtgaggggcgcctctgcccggctgcccctactgggaagtgaggagcccctctgcccggccagccgccccatccgggagggaggtggggtggtcagccccctgcccggccagccgccccgtccgggaggggaggtggggggtcagccccccgcccggccagccgccccgcccgggaggtgaggggcgcctctgcccggccgcccctactgggaagtgaggagcccctctgcccggccaccaccccgtctgggaggtgtgcccaacagctcattgagaatgggcccggatgacaatggcggctttgtggaatagaaaggcgggaaaggtggggaaaagattgagaaatcggatggttgccgtgtctgtgtagaaagaagtagacatgggagacttttcattttgttctgtactaagaaaacttcttctgccgtgggatcctgttgatctgtgaccttgcccccaaccctgtgctctctgaaacatgtgctgtgtccactcagggttaaatggattaagggtggtgcaagatgtgctttgttaaacagatgcttgaaggcagcatgctccttaagagtcatcaccactccctaatctcaagtacccagggacacaaacactgcggaaggccgcagggtcctctgcctaggaa

SEQ ID NO: 16622 - DNA, 1551 bp, Artificial sequence
  DNA replication origin
tcaatcttttccccacctttcccgcctttctattccacaaagccgccattgtcatccgggcccattctcaatgagctgttgggcacacctcccagacggggtggtggccgggcagaggggctcctcacttcccagtaggggcggccgggcagaggcgcccctcacctcccgggcggggcggctggccgggcggggggctgaccccccacctcccctcccggacggggcggctggccgggcagggggctgaccaccccacctccctcccggatggggcggctggccgggcagaggggctcctcacttcccagtaggggcagccgggcagaggcgcccctcacctcctggacggggcggctggccgggtggggggctgacccccccacctccctcccggacggggcggctggccgggcggggggctgacgcccccacctccctcccggacggggtggctgccgggcggagacgctcctcagttcccagactgggtggctgccgggcggagaggctcctcatttctcagacggggcggctgccgggcggaggggctcctcacttctcagacggggcagttgccgggcagagggtctcctcacttctcagatggggcggccgggcagagatgctcctcacctcccagacggggtcgcagccgggcagaggtgctcctcacatcccagatgatgggcggccgggcagaggcgctcctcacttcctagatgtgatggtggccgggaagaggtgctcctcacttcctaggtgggatggcggccgggcggagacgctcctcactttccagactgggcagccaggcagaggggctcctcacatcccagacgatgggcggccaggcagagacgctcctcacttcccagacggggtggcagccgagcagaggctgcaatctcggcactttgggaggccaaggcaggcggctgggaggtggaggttgtagcgagccgagatcacgccactgcactccagcctgggcaccattgagcactgagtgaacgagactccgtctgcaatcccggcacctcgggaggctgaggctggcggatcacttgcggtttggggctggagactggcctggccaacacagcgaaaccccgtctccaccaaaaccagtcaggcgtgtcggcgcgagcctgcaatcgcaggcactcggcatgctcagtcaggagaatcaggcagggaggttgcagtgagccgagatggcagcagtacagtccagcttcggctcagcatgagagggagaccgtggaaagagagggagagggagaccatggggagagggagagggagtaattttgcgcttataaggtttttcctttgtaattcgtcatttacacacactatataagagaaaggcatcatagagtttagtggatgggatcaccgttttaggtgcaataaatgaagaccaatgagtacatttataatgcagagaagttcagactcgagtatcatggtttacaatattctagtaaaattagcacaagatagcaaaagcaatggacctcaacttgtcagctgaaatgttgaact

SEQ ID NO: 16623 - DNA, 1346 bp, Artificial sequence
  DNA replication origin
cttataaaaggtaccatctcaaagtcagacagccagacagatctagcctgaaatcttgaaaacagtcctaactgttggactcatccagagactagagggcaggagataaaagagatagaagatcagctataaaggatattccctcactggtgaggagagaagcattactggctcaataactcaaaaacattacaaacactgagactccatgggcacatgcttcgaaggaggcagagttctggcaatagacagtgctgccttgatggtgcaaaaatgagaaggttcaacattcaaacagccagccaacacatgctgcctgctacgtgactcacacagttcaaataagagaggtcagggcctctattttcatagagtattctttctaacagagggagatagaccatgagtacattttacaagagtaatgtcaaatagatgcacatcttatgaagaaaacagaacagtgtgttgatataaacagtgcctgattggctacattagaataggtggtcagagaagagcactaaggaggtaacataatagctgagtctttaatgacaagaagaaaccagccattcctagctctagggcaacagcaccccttgcgggagaaacagcaattacaaatgcaaggaccatcttgtgtttgagcataaaaagcagcccatgtttgagcataaaaagaagcccatgtgaactttacaaagcaagagcaaaagaggtagcaaatgacttgagagagaaagaaaaggagcagatcatccagggtactgaaggcctagaaagggatttggaaatcattctaagtacttgagaagccactggaagattttaagcaaatgagtactaccaaccccccaggtcatattttccaggatgactgagaccagtttgactcaaaggaggacagtggaaaccaggcaatgtgctaatcacagggtgatgagtgtgctgttgccctcagactttgttgggggacctgaggatgaccatagaaggaaagctggtgatggagtcagcaccagtgtggttctgagagacctgagccattgtttcaggaaaagaagccgcccctgccagaattcagctccaccacttgccagatgcatgacagcaaactaggccttccttgaaccttctgcagcctcttgtgtgtgtctctttcgagctcttattagactgtgaactttgtgaagcaagtaccatatttatcaaatccttttatccaccccatctactgcacagtgactggcatatgatagtatccaggagtttagtagaattcaaaggcataaatagaatatgcagttgatattagccatctttccctgcttctagaaatgcta

SEQ ID NO: 16624 - DNA, 917 bp, Artificial sequence
  DNA replication origin
ccccgtccgggaggtgaggggcgcctctgcccggccgcccctactgggaagtgaggagcccctctgcccggccagccgccccgtccgggagggaggtgggggggggggtcagccccctgcccggccagccgccccatccgggaggtgaggggtgcctctgcctggccgcccctactgggaagtgaggagcccctctgcctggccagccgccccgtccgggagggaggtggggggggtcagccccccccgcccggtcagccgccccgtccgggaggtgaggggcgcctctgcccggccgcccctactgggaagtgaggagcccctctgcccggccagccgccccgtccgggagggaggtgggggggtcagccccccgcccggccagccgcccggtccgggaggtgaggggtgcctctgcccggccgcccctactgggaagtgaggagcccctctgcccggccaccaccccgtctgggaggtgtgcccaacagctcattgagaacgggccaggatgacaatggcagctttgtggaatagaaaggcgggaaaggtggggaaaagattgagaaatcggatggttgccgtgtctgtgtagaaagaagtagacatgggagacttttcattttgttctgcactaagaaaaattcttctgccttgggatcctgttgatctgtgaccttacccccaaccctgtgctctctgaaacctgtgctgtgtccactcagggttaaatggattaagggcggtgcaagatgtgctttgttaaacagatgcttgaaggcagcatgctccttaagagtcatcaccactccctaatctcaagtaatcagggacacaaacactgcggaaggccgcagggtcctctgcctaggaaaaccagagacctttgttcacttgtttatctgctgaccttccct

SEQ ID NO: 16625 - DNA, 1276 bp, Artificial sequence
  DNA replication origin
acccccccacctccctcctggacggggcggctggctgggcagggggctgaccccccacctccctcccggaccgggcggctggccgggcagaggagctcctcacttcccagtaggggcggccgggcagaggcgcccctcacctcccagacggggcggctggccgggcggagggctgaccccccacctccctcccggatggggcggctggccaggcggggggctgacccccccacctccctcccggacggggcggctggccgggtgtgggggctgacccccccatctccctcccggacggggtggctggccaggctgaggggctcctcacttcccagtaggggcggccgggcagaggcacccctcacctcccggacggggcggctggccgggcggggggctgaccccccaacctccctcccggatggcacggctggccgggcgggggggctgacccccccacctccctcccggacggggtggctgccgggcggagacgttcctcacttcccagatggggtggctgccgggcggagaggctcctcacttctcagacggggcagctgccgggcggagggtctcctcacttctcagacggggcggccgggcagagacgctcctcacctcccagacggggtctcggccgggcagaggcgctcctcacatcccagatggggcggcggggcagaggcgctccccacatctcagacggtgggcggccgggcagagacgctcctcacttcctagatgtgatggcggctgggaagaggcgctcctcacttcctagatgggatggcggccgggcgcagacgctcctcactttccagactgggcagccaggcagaggggctcctcacatcccagacgatgggcggccaggcagagacactcctcacttcccagacggggtggcggccgggcagaggctgcaatctcggcactttgggaggccaaggcaggcggctgggaggtgtaggttgtagtgagccgagatcacgccactgcactcctgcctgggcaccattgagcaccgagtgaacgagactccgtctgcaatcccggcacctcgggaggccaaggctggcggatcactcgcggctaggggctggagaccggcccggccaacacagcaaaaccccgtctccaccaaaaccagtcaggcgtggcggcgcgtgcctgcaatcgcaggcactcggcaggctgaggcaggagaatcaggcagggaggttgcagtgagccgagatggcagcagtacagtccagcttcggctccacatgag

SEQ ID NO: 16626 - DNA, 966 bp, Artificial sequence
  DNA replication origin
ctccgcccggcagccaccttgtccgggagggaggtgggggggtcagccccccgcccggccagccgccccgtccgggagggaggtggggggatcagccccccgcctggccagccgccccgtccgggaggtgaggggcacctctgcccggccgcccctactgggaagtgaggagcccctctgcccggccagccgcctgtccgggagggaggtgggggggtcagccccccgcctggccagccgccccgtctgggaggtgaggggcacctctgcccggccgcccctactgggaagtgaggagcccctctgcccggccagccgcctgtccgggagggaggtgggggggtcagccccccgcccggccagccgccccgtccgggagggagggaggtggggggctcagccccccgcccggccagccgccctgtccgggaggtgaggggcgcctctgcccggccgcccctactgggaagtgaggtgcccctctgcccggccaccaccccgtatgggaggtgtacccaacagctcattgagaacgggccatgatgacaatggcggttttgtagaatagaaaggcgggaaaggtggggaaaagattgagaaatcggatggttgccgtgtctgtgtagaaagaagtagacatgggagacttttcattttgttctgtactaagaaaaattcttctgccgtgggatcctgttaatcggtgaccttacccccaaccctgtgctctctgaaacatgtgctgtatccactcagggttgaatggattaagggcggtgcaagatgtgctttgttaaacagatgcttgaaggcagcatgctccttaagagtcatcaccactccctaatctcaagtacccagggacacaaacactgcggaaggccgcagggtcctctgcctaggaaaaccagagacctttgttcacttgtttatctgctgaccttccctccactattgtcctgtgtc

SEQ ID NO: 16627 - DNA, 1247 bp, Artificial sequence
  DNA replication origin
gccaggcagaggggctcctcactttccagtaggggcggccgggcagaggcgccccttgcctcccagacggggcggctggccgggcggggggctgaccccccacctccctcccagacagggcggctggctgggcagggggctgaccccccacctccctcccggaaagggcagctggccgggcggggggctgatacccccacctccgtcccggacggggcggctggcagggcggggggctgacccccccacctacctcccggatggggtggctggccgggcagaggggctcctcacttcccagtaggggcggctgggcagaggcgcccctcacctcccggatggggtggctggccgggtggggggctccctcccagacggggcggctggccgggtggggggctgacacccacctccctcccggacagggtggctgccgggcggagatgctcctcacttcccagacggggtggctgccgggtggaggggcttctcacttctcagatggggcggctgctgggcggaggggctcctcacttcttagacggggcggttgccaggcggagggtctcctcacttctcagacggggcggctgggcagagacgctcctcacctcccagatggggtcacgaccgggcagaggcactcctcacatcccagatggggcagcggggcagaggcgctccccacatctcagacgatgggcggccggacagagacgctcctcacttcctagatgggatggtggccgggcagagacgctcctcactttccagactgggcagccaggcagaggggctcctcacgtcccagacgatgggcagccaggcagagacactcctcacttcccggatggggtggcggccgggcagaggctgcactcttggcactttgggaggccaaggcaggctgctgggaggtggaggttgtagtgagctgagaccacgccactgcactccagcctgggcaccattgagcactgagtgaaccagactccgtctgcaatcccggcacctcgggaggccgaggctggcggatcactcgcggttaggagctggagaccagcccggccaacacagcgaaaccccgtctccaccaaaaaaatacgaaaaccagtccggcgtggcggcgggcgcctgcaatcgcaggcactcggcaggctgaggcaggagaatcaggcagggaggttgcagtgagccgagatggcagcagtacagtccagcttcggctgggcatcagagggagacgg

SEQ ID NO: 16628 - DNA, 932 bp, Artificial sequence
  DNA replication origin
ccctccacccggcagccaccccgtctgggaagtgaggagcatctccgcccggcagccaccctgtccgggagggaggtgggtgtcagccccccacccggccagccgccccgtctgggagggagccccccacccggccagccaccccatccgggaggtgaggggcgcctctgcccagccgcccctactgggaagtgaggagcccctctgcccggccagccaccccatccgggaggtaggtgggggggtcagccccccgccctgccagccgccccgtccgggacggaggtgggggtatcagccccccgcccggccagctgccctttccgggagggaggtggggggtcagccccctgcccagccagccgccctgtctgggagggaggtggggggtcagccccccgcccggccagccgccccgtctgggaggcaaggggcgcctctgcccggccgcccctactggaaagtgaggagcccctctgcctggccagccgccccgtctgggaggtgtacccaacagctgagaacgggccatgatgacaatggcggttttgtggagtggaaaggggggaaaggtggggaaaagattgagaaatcggatggttgccgtgtctgtgtagaaagaggtagacatgggagatttttcattttgttctgtactaagaaaaattcttctgccttgggatcctgttgatctgtgaccttacccccaaccctgtgctctctgaaacatgtgctgtgtccactcagggttaaatggattaagggcggtgcaagatgtgctttgttaaacagatgcttgaaggcagcatgctcgttaagagtcatcaccactccctaatctcaagtacccagggacacaaacactgtggaaggccgcagggtcctctgcctaggaaaaccagagacctttgttcacttgtttatctgctgac

SEQ ID NO: 16629 - DNA, 873 bp, Artificial sequence
  DNA replication origin
ttctttctgtttccttttttcccccttgttccttctccctcttctttgtaactaacaaaaccaccaccaactcctcctcctgctgctgcccttcctcctcctcctcagtccaagtgatcacaaaagaaatcttctgagccggaggcggtggcattttttaaaaagcaagcacattggagagaaagaaaaagaaaaacaaaaccaaaacaaaacccaggcaccagacagccagaacatttttttttcacccttcctgaaaacaaacaaacaaacaaacaatcatcaaaacagtcaccaccaacatcaaaactgttaacatagcggcggcggcggcaaacgtcaccctgcagccacggcgtccgcctaaagggatggttttctcggcagagcagctcttcgccgaccaccttcttcactcgtgctgagcgggatttttgggctctccggggttcgggctgggagcagcttcatgactacgcggagcgggagagcggccacaccatgcgaggtaagcgagtctgcgggcaccgaggctccccgagtccggccaactccagccagacggggagatgggggaggggagggcacccagcagaaagggaaagaggttgcccaggcgcagttccccgaattcgctctcgcaggtggggctgcaaatggcctgggcgtagaaagttgcgggaaggtgttgatgtctttcgggagttctggagggacgcgggagggcgcttttttggagaggggagacaggctagttggttcttaccagtccttgagttgcactgaatcttttttgcttgtcgctctcgggtgcggaagcggacgcgggatggagaaagccgaaagagggatgcctctggacaggagcagttt

SEQ ID NO: 16630 - DNA, 1472 bp, Artificial sequence
  DNA replication origin
gtggtcgccggccgggtttgggcgcgcggggcgcaccggccgggggcagggtggacacgcgcgggcacacactcgccaggttacgaggcccactaagcgtcctggccagcaggcatgtcccttcgctggagtagcaagcagaagagcagtgctgcgaggctggacgcggctgaggaaacagttagttccccggcacgcggctgaggaaacagttctgcggcgcgcgccttcgtgccggcgctgcgccctggccaggtcctcgtgcccgagcccgcgcggcccagggagtagtgcgaccccggaaaagttgtaatgagaaagttctggaggcttggaaaggccacactgctcacagtcggagagtcatgggctccggctcttttgtcagataaagggccggtagtggaaggaggtgctggtgcaccctcgggccaggaccctcgcagtcgcaggcggtggcggcggcggcggcgggaccccggggcgagctggggtctgcagggatgcgcgccagggactgtagcgttacgcttgctccggctggactctgggcctctcgaagggctggagggtgggtttcggggagtcacttggtctcctctcctgccttgccggagacctcaggtttccttcgcgctgtgctcggcctttcttcactcttttactgaagagccaggcgggtgtccgcttgacatggggatctgtgcaagctctgggcacccacccccactcccagtccctcttcctggccacacagcggttaatcgggggctcttctctatccttcgcacgtacccctgggtcttgacaacagaaagttagtaacggccagctccagaccttcttgcatcccagacccggagagaggtggtctaggcagggagcacttgggagagttgggatgcaatcactggtctcctccttccactgaaagtgatcctctcccacccagtccccctacgcccctagaggagcaccccaggaggcagcgggtctcactcccactccctcccgcacccggtgagccccgagcctggactcaagggtttgctggctggacgctgggatgtgtcaggaaagggaaggagaagaaggaacggagagagactgtccatgggggagggggttgactgtagataagaaacaaggacgtcctgatgggatggtcttgattggccggctcgctgggagtggggcacccgtgtgtgtgcgcgctggctccagctgattgtcccggttgggggttggttacacgctccactgtctaaattctttcaagaaactatacttgggcaattggagagtagagaaccttggcttagtaagagacgcccggtcttttgtttttctttttctagcccatctcaccatcccatccattctttcggtttcccccgtcccagtccagagctgccagttcgtccctccccttcttcccttctaactttccccctgtggctgggttcatactt

SEQ ID NO: 16631 - DNA, 1299 bp, Artificial sequence
  DNA replication origin
gcgtggaaaaatacttccatgagaagatggaagatgtgaattgtagttgtgaggaacgaatccgagtgacatcagaaaggtaaaagatataaatcttttccattctgaaaccactaacacaacgtgattctgctagaatatctaaaggtgtagaaagatctttcaaatcccagaggtttgagttctttataatttgaaacatttaacaacatataatattcatgtaatcaaagtatatttattaagcatctactatattccaggcactcttttagttactaggaataagtggttaataagacataagaatccttgtcctcatgggacttacattcatgcgcgcgcgcgtgtgtgtgtgtgcgcatgtgtgtaggtggtgagagaaatgaagtggatggagaacaaaacctaagtaaggaaccacaaaaatagatttgtaatttattatcaggcagtaaaagagctatgaagaaaaataaagtagctggagagaacaggaaatgatggtggcgtgaaatctagcggagctgggggttgagtggactgtttagatggtctggttctagaaggtcgctctgagggcattgagtggaggcctgaaagaagtgaggcagtgggcgaggcaggggcgtctggtggaatagcgcccctggcggaaggaacagcaagcgcagccgcctgaggccacatggtgtgtctggcagcagccagaggggaggaggaggtagatggagggtgctggttggatggggagtggggttctcagggcgtctgaccggcggttgttgtgcagtggagttggcggctgcttcactgaagtgggtgaagacagaataggagaagcagagactgcaattacaggtggcttttgggagaagtattacggtgcagggaagcttggtatggggacacggtaaggtttttttgttggattttgcgtaatgtggcaataaataaaacagcatggtcctgaaaatgatccaccagcaagggagaaactcaggagtggagggaggaggccatttgctgaagagaagtccctaagaagctgggaaaatggagggtctggctttttgcccgaagcaggggaacgggacaggatatggccagagtagacgggaaggcagacaaggttggtggggacccaggtctcgaggcagagtcgtcggctgggtgtgcctatgtgtgggattttgagggaggcaggcggtatgggggacattcagaagtttgaggaaagaggaggagacacactggagagactgaacatattaggaagctataatgtgatctgagtta

SEQ ID NO: 16632 - DNA, 1080 bp, Artificial sequence
  DNA replication origin
aaaaagcacatcttgcaccgcccttaatccatttaaccctgagtggacacagcacatgtttcagagagcacagggttgggggtaaggttatagattaacagcatcccaaggcagaagaatttttcttagtacagaacaaaatggagtctcctatgtctacttatttccgcacagacacggtaacaatctgatttctcttccttttccccacatttccccctttttctatttgacaaaaccgccatcgtcatcatggcccgccctcaatgagctgttgggtacacctcccagacggggtggcagccgggcagaggcgccccccaacctcccggatggggcggctgccgggcggagacgctcctcacttccctgacggggcggctgccgggcggaggggctcctcacttccccgatggggcggctgccgggcggaggggcttctcacttctcagacggggcggccgggcagagacgctgctcacctcccagatggggtggcggtcgagcagagacactcctcagttcccagacggggtcgcggccgggcagaggcgctcctcacatcccagacggggcggcggggcagaggcgctccccacatctcagacgacggggggccgggcagagacgctcctcacttcccagactgggcggccaggcagagaggctcctcacatcccagacgatgggcggccaagcagagatgctcctcacttcccagacggggtggctgctgggcagaggctgcaatctcggcactttgggaggccaaagcaggtggctgggaggtggaggttgtagcgagccgagatcacaccactgcactccagcctgggcaacattgagcactgagtgagcgagactccgtctgcaatcccggcacctcgggaggccgaggcgggcagatcactcgcggtcaggagctggagacaagtccggccaacactgcgaaaccccgtctccaccaaaaaatacaaaaaccagtcaggcgtggcggcgcgcgcctgcaatcccaggcactcggcaggctgaggcaggagaatcaggcagggaggttgcagtgagccgagatggtggcgg

SEQ ID NO: 16633 - DNA, 843 bp, Artificial sequence
  DNA replication origin
tctgggaagtgaggagcatctctgcttggccgcccatcgtctgggatgtgaggagcctctctgcctggccgcccagtctgggaagtgaggagcgtctctgcccggccccccgtcgtctgagatgtggggagcgcctctgccccgccgccccgtctgggatgtgaggagcgcctctgcccggccgcgaccccgtctgggaactgaggagtgtctctgctcgaccgccaccccatctgggaggtgagcagcgtctctgcccggccgccccgtctgagaagtgagaagcccctccgcccggcagccgccccatcggggaagtgaggagcccctccgcccggcagccgccccgtcagggaagtgaggagcgtctccgcccggcagccgccccatccgggaggttggggggcgcctctgcccggctgccaccccgtctgggaggtgtacccaacagctcattgagggcgggccatgatgacgatggcggttttgtcaaatagaaaaagggggaaatgtggggaaaaggaagagaaatcagattgttaccgtgtctgtgcggaaataagtagacataggagactccattttgttctgtactaagaaaaattcttctgccttgggatgctgttaatctataaccttacccccaaccctgtgctctctgaaacatgtgctgtgtccactcagggttaaatggattaagggcggtgcaagatgtgcttttttaaacagatgcttgaaggcagcatgctcgttaagagtcatcgccactccctaatctcaagtacccagggacacaaacactgcggaaggccgcagggtcctctgcctaggaaaaccagagac

SEQ ID NO: 16634 - DNA, 1326 bp, Artificial sequence
  DNA replication origin
gcgcctggcgggctccgcccgagcctctgggcccatggccaagcggcgtgcggccgagccggtgacgttccacgtgccttggaagcggctcctgctttgcgacttcgctgagcagccgccgccaccgcctctctggatccggccgcccggggtcgcgcatgctgggcagctcctcggcgtcccagagcagcaccgaaagcgcaaaatcgacgcagggaccatggcagagccctcggcttcgcccagcaagcgccgtgacagcggggacaacagcgccccgagcggccaggagcgtgaggaccacggtctggagacaggcgatccgccgctgccgccgccgcccgtactgccggggccgggggaggagctcccgggcgcccggctcccggggggcggtggcgacgacggggcggggcgcgcaggacccccgcggggagactggggggtcgcatcgcgccaggtaggggctgggggcgggtgggctgaggggcgaaggggcttgccttttccccacacacacaaaacgccccggttcccactcatgacttgtgtaggttaagacgcctgagggggttgaaagaaggggtcaccgctccgggagaggacgccgaccgccagaagcacaccccgagagtccgatgggcagaaagcactgggctgggcgagggggaaacagaccgtggtcgggagcgatagaagtggccttgcggcgtcagcgccgcgctccgtaaaagggaaacgggaccgtgggtcgtggcgggctgtgagcatggcgagaacgcagaccgtcagggcataggttcagcccaaagacaaacgacagataaaggtgtagagggccttcctgggtttaacgatgattagtctagaattcgggatagagttctttttctagagggagaccagtgtggtagccattgattaattgaacgtcctaccggctggtacagcttctggagaaaaggatggaccaccgtaccttggtcaaagctttgttttaactcatagtgttaaatctgatcctaggcaaaagtatcattgaaaattaatttgggggcggggcgtggtgtctcacgcctggaatcccaggactttgggaggccacggcgggtggatcacctgaggtcgggagttcgagaccagcctggccaatagggtgaaactctgtctctattaaaacacaaaaactagctgggtgtggtggtgtatgcccgtaatcacagctactcgggaggctgaggcacaagaatcactttaacctgggagatggcggttgcagtgagctgagattgggccagtgcactccagcctgggccacagagtgag

SEQ ID NO: 16635 - DNA, 972 bp, Artificial sequence
  DNA replication origin
gcccagcatgcgcgaccccgggcggccggatccagagaggcggtggcggcggctgctcagcgaagtcgcaaagcaggagccgcttccaaggcacgtggaacgtcaccggctcggccgcacgccgcttggccatgggcccagaggctcgggcggagcccgccaggcgcgggagaccgagtgccgatagctgcggggggcgaagagcgaggactgagcgcgtgagagagggacaggccgaagtcgggcgaggaggcgacaggacgctggagggggtagggcggggcagctcgcgcagggcctagggctggggctccggctcggaggcagctcccgcgctcagccctcgccgccgccgagatgcggcccggacgttgagaagcaaccgcgaagcggcggagattcgaacctgcgcacaacgtgcgcgcgcgcactctgtctggccaggcggagccgctggttggtggaggctcgcggggcgcgctcccgagcgccctcgcgaccggaagtgcgcgctcgggggtaggcgggaaggccgcggcgggattaattaaagacccgatcaagcggcccgcagaggggcgtgaccttgtttcctcaggagtgtggcggtggtcttactactatgttcgttatagcgcggtacgttctagacccttctataggaaatttaaaacctttaaaatgtgtatttccttcctccagtcagtgaccacgggggcgtctccatgagattaagacaaagattataatagagttccagactatcctgggcaacatagcaagacctcgtctctacaaaaaatcaaaaataggccaggcttgttggcctgcccctgtggtcccagctactcgggaggctgaggaggaagattcacttgagcctgggaggtggaggctgtagtgagccagagatcgcaccactacactgcagcctgggcaacagagcgagatgccgtctcaaaaaaaaaaaaa

SEQ ID NO: 16636 - DNA, 997 bp, Artificial sequence
  DNA replication origin
ccacgctgtcggtcgcggagagacgcaagcgagccaggccgagggccgcggcggcgatgcagcgacggcgtcgccctccgccgcccacctcccggctgcccgagggctgcgggggaggaggcggtggcagcgaggaggtggaagtgcagttttccgccgggcgttggggctcggccgcggcggtttcggcggcagcggcggcggccacgcgcagcaccgaggaggaggaggagaggcttgagcgtgagcacttctggaagatcattaatgccttccgctactacgggtaaggagcccgtggcggaccccggcccagaccgtcggggcgcccactggtggcggcggacccgccggaacgggggcgctcgccgtcccgccgccacgcctccgaggcgtcgggacccggctgctgcagctgacctccgggccccgagtcacctcgcaccaccccagcccctcccggccctgcacacccgcgtgtccgccgcgccgtctgctgcacagcctcgtgtcttctgacctcaggatcagattagctctcctgcctccgtcctcgtaaaggtttggctttgaggccgatgggggtgaccagagaagcgctgtaacaatttcagatagaagacgatggtggtacaatcgtccactgctgggctgattggtgtgtgtggtcgatgtcctccaaactgaacacacggagagcccaagttcacctacgcgtgggatgctgtaggacgtattttcccaaactgttaccagtgcttgtaagagcagtttaagatttccacccacccctctttggcgctgtgaacgcacttgcacttttgtgtgagcgattgaatgatgctgctcagtgtctttaactggtgggtgattaagggcggaagtggtccggatattctaaaatttgctaattattaggagagatgagagaagtcacaataagagctgcctttacgttctttttttctgcaaatctgtatctaattctccctggtgt

SEQ ID NO: 16637 - DNA, 1225 bp, Artificial sequence
  DNA replication origin
tcccctctgcgtggaaccccctccccctcttccagatgtgctctagcagctgttgccctaactcttgggcgatgctctgtctcctgcgcgcgcgcgcgtacgcacacacacacacacacacacacacacacacaccccagagttgccgggtccgtgttttgtttacttgtcttttccaagccacgcgggactggtagggtctcgggaaaaatccagagtgcccccgtggtggcttcagagacggctggaccttttgacctgaaaagtcgagtagcactagtaatctgaggcagtctcagagagggtgatcgtggggagagggggaaattaggtcttttgggggatagggggtgagcgcgcctctgatgcctgcggggaagggaaagcctttcctgctcggacctgaatttagcccagaaagaagtttcctcttgggcgagagaacctctggcgctggagactccggaggcgcggggactggagctggaagggaggagaaaggagggggagggaagagggggccggccccggtgtgagtgcagatttaggggagacctctaggctttctcgccttaagcgaggtccgcgtgggggctcccggaagggagttgtagtggggaggtgggaaacttccgaaaccggctggctgggttccgctccgggaaaacgaggagtcttaccccgggacggaaggtgccgggccgggaggttgcgccgtggggcgagagttgggcaggcagcaggggcgcggggtttttgtggggtgccgctctcgggcttttggcagagctctcctgctagggagaaatgcccataaactaaggtgatgctatgaggatgattggaagcgtaacagatttggaagtactccgggttcagtggtcttggctttctggttctcttcccccgacacccctgcgagaaatgggggtagagagggctatgaaagtgggtcccagaaagtacccccctccacatacacaccgcaagcatctttggggttggccggaggggcgggccctggctgggctcaggcgagaatccgctggaatgggaggtgaggatgatggatggcgcctttccagcaggcgcgctttggggactgcccggggtgcacgcaccctgcgtgctctgccagggggaagggagagggaggtgctggctggtgccggcggagtgggagagtacggacagtttctgaggccattgcgttccacgcccagga

SEQ ID NO: 16638 - DNA, 937 bp, Artificial sequence
  DNA replication origin
gctatgaggatgattggaagcgtaacagatttggaagtactccgggttcagtggtcttggctttctggttctcttcccccgacacccctgcgagaaatgggggtagagagggctatgaaagtgggtcccagaaagtacccccctccacatacacaccgcaagcatctttggggttggccggaggggcgggccctggctgggctcaggcgagaatccgctggaatgggaggtgaggatgatggatggcgcctttccagcaggcgcgctttggggactgcccggggtgcacgcaccctgcgtgctctgccagggggaagggagagggaggtgctggctggtgccggcggagtgggagagtacggacagtttctgaggccattgcgttccacgcccaggaacccggggacaccccccgcccctcctccccgccgcctgggggatgcggcacctggagaggaggcagagctgctgtcgccgcgtttagaaggagctggggagtgcggggagtgttcagaggagcaagagcacaagatcttgctctttgcccgcccagagggaggacatattccagagaagccagccctgtggagaactgagactagggcaaggggcacggtttgtattccctcctgcccctggaactaaggaagtaagggaagccagccagattttgttgcttgagtgactgttatctgcggaagatttccattctaaaggctcgttgggattctactggcttctttttctctggaagaaaacactgagtccgttcaggtctttttacatgaacttaaagttgggcactgcctatgccctgggaatggaactggggaggctagcactgaaagtagctagtactattaatctttccagagattcatctcgggttctgctaacattgaacatctcacacatgaccaggcatttttggaggaat

SEQ ID NO: 16639 - DNA, 940 bp, Artificial sequence
  DNA replication origin
tgaggggcgcctctgcccggccgcccctactgggaagtgaggagccccttagcccggccagccaccccgtccaggagggagatgggggggtcagccccccacccggccagccgccccgtccgggagggaggtgggggggtcagccccccgcctggccagccgccccgtccgggagggaggtgggggggtcagccctccgcccagccagccgccccgtctgggaggtgaggggcgcctctgcccagctgcccctactgggaagtgaggagcccctctgcccggccagctgccccgtccgggagggaggtgggggggtcagccccccgcccggccagccgccctgtccgggagggaggtgggggggtcagccctccgcccggccaggcgccccgtctgggaggtgaggggcgcctctgcccagctgcccctactgggaagtgaggagcccctctgcccggccaccaccccgtctgggaggtgtgcccaacagctcattgagaacgggccaggatgacaatggcggctttgtggaatagaaaggcgggaaaggtggggaaaagattgagaaatcggatggttgccgtgtctgtgtagaaagaagtagacatgggagacttgtcattttgttctgcactaagaaaaattcctctgccttgggatcctgttgatctgtgaccttacccccaaccctgtgctctctgaaacatgtgctgtgtccactcagggttaaatggattaagggcggtgcaagatgtgctttgttaaacagatgcttgaaggcagcatgctcgttaagagtcatcaccaatccctaatctcaagtaatcagggacacaaacactgcggaaggccgcagggtcctctgcctaggaaaaccagagacctttgttcacttgtttatctgctgaccttccctccactattgtcccatgaccctgcc

SEQ ID NO: 16640 - DNA, 1294 bp, Artificial sequence
  DNA replication origin
cagaggggctcctcacttcccagtaggggcagctgggcagaggcgcccctcacctcccagacggggcggctggctgggcggagggctgacccccccacctccctcccggacggggcggctggccaggcggggggctgacccccccacctccctcccggacggggcggctggccgggtggggggctgacccccccatctccctcctggacggggtggctggccgggctaaggggctcctcacttcccagtaggggcggccgggcagaggcgcccctcacctcccggacggggcggctggccgggcggggggctgacccccccacctccctcccggacggcacggctggccaggcggggggctgacccccccacctccctcccggatggcacggctggccgggcgggggggctgaccccccacctccctcccggatggggcggctggccgggcggggggctgaacccccccaacctccctcccggacggggtggctgccgggcggagacgctcctcacttcccagatggggtggctgccgggcggagaggctcctcacttctcagacggggcagctgccaggcggaggggctcctcacttctcagacggggtggttgccaggcagagggtctcctcacttctcagacggggcggccgggcagagacgctcctcacctcccagacggggtctcggccgggcagaggcgctcctcacatcccagatggggcggcggggcagaggcgctccccacatctcagacgatgggcggccgggcagagacgctcctcacttcctagatgtgatctcttttttatttttgtagagacgcagtctccctatcttgcctaggctggctttgaactcctgggctcaagtaatcctcctgacttggcctcccaaagtgttgggattacaggcatgggccactgcatctggccaggatttcattctgttttatggctaatattccattgtgtacatataccacattttcttattcattcatctgttgatggacacttatcttggctattgtgaatagtgctgcagtaaacataagtgtgcagatatcttttcaataggctgacttcctttattttggatatatacccagccatgggattgctggatgataagctagatctatttttaggttttacgggacccgccatactgttttctgtagtggctatactaatttacattcccaccagcagtgttctcttttcactgcactctctgatccgatcatttcttcgatctgttttttatagcatttgttattttctgtcttt

SEQ ID NO: 16641 - DNA, 1087 bp, Artificial sequence
  DNA replication origin
agcacatcttgcaccacccttaatccattcaaccctgagtggacacagcacatgtttcagagagcacagggttgggggtaaggtcacagatcaacagaatcccaaggcagaagaatttttcttagtacagaacaaaatgaaaagtctcccatgtctacctctttctacacagacacggcaaccatccgatttctcagtcttttccccacctttcccccctttctattccacaaaaccgccattgtcatcatggcctgttctcaatgagctgttgagtacacctcctggacagggcggctggccgggcagaggggctcctcacttcccagtaggggcggccaggcagaggcgcccctcacctcccggacggggtggctggccgggtggggggctgacccccccacctccttcccggacggggcggctggccgggcagaggggcttctcacttcccagacggggtggctgccaggcggaggggctcctcacttctcagacggtgtggctgccaggcggaggggctcctcacttctcagacgggcagagacgctcctcacatcccagacggggctgcagggcagaggcgctccccacatctcagacgatgggcggccgggtagagacgctcctcacttcctagatgggatggcggccgggcagagacgctcctcactttccagactgggcagccaggcagagaggctcctcacatcccagaagatgggcggccaggcagagacgctcctcacttcccagacggggtggcggccgggcagaggctgcaatctcggcactttggggggccaaggcaggcggctgggaggtggaggttgtagcgagccgagatcacgccactgcactccagactgggcaccattgagcactgagtgaacgcgactccgtctgccatcccggcacctcgggaggccgaggctggcggatcactcgcggttaggagctggagaccagcctggccaacacagcgaaaccccgtctccatcaaaaaaatacgaaaaccagtcaggcgtggtggtgcgcgcctgcagtcgcaggcactcggcaggctgaggcaggagaatcaggcagg

SEQ ID NO: 16642 - DNA, 869 bp, Artificial sequence
  DNA replication origin
gcgtctctgcctggccgcccatcttctgggatgtgaggagcctctctgcctggctgcccagtctggaaagtgaggagcgtctctgcccggccgccatcccatctaggaagtgaggagcgtctctacccggccgcccatcgtctgagatgtggggagcgcctctgccctgcagccccgtctgggatgtgaggagcgtctctgcccgtctgagaagtgaggagcccctccgcctggcagccacaccgtctgagaagtgaggagcccctccgcctggcagccaccccgtctgggaagtgagaagcccctctgcccggccagccgccccgtccgggaaggaggtgggggggtcagccccccacccggccagccaccccgtccgggaggtgaggggcgcctctgcctggccgcccctactgggaagtgaggagcccctctgcccggccagccgccctgtccaggaggtgtactcaacagctcattgagaacaggccatgatgacaatggcggttttgtggaatagaaaggggggaaaggtggggaaaagactgagaaatcggatggttgccgtgtctgtgtagaaagaggtagacatgggagacttttcattttgttctgtactaagaaaaattcttctgccttgggattctgttgatctgtgaccttacccccaaccctgtgctctctgaaacatgtgctgtgtccactcagggttgaatggattaagggtggtgcaagatgtgctttgttaaacagatgcttgaaggcagcatgctcgttaagagtcatcaccactccctaatctcaagtacccagggacacaaacactgcggaaggccgcagggtcctctgcctaggaaaaccagagacct

SEQ ID NO: 16643 - DNA, 1148 bp, Artificial sequence
  DNA replication origin
ggcacggggtagcccaggtggtgcatgacggacgccaagggcagccctccagcctgcagcacgcccttgtagtcccggccaataatgttctcaatggcaaaggggtgcttgaagcctgacgtggacgccgcggccgcggcggcagcggcggcggccgagcccagcccgtagggtgggaactgagacaggcgtcccacgctgcccaccgcggctgccgcggccgccgccgccgccgccgccacggccgccgcctcctgcatcttgccggggtgagacggctgctgaggctgcgactgctggggcggttgctgcgggggctgtgacgggaggtgcggaggcggctgcggagcagtaggcggttgctgatggaaatagtgtaccatgtgcggcggcggcgggggcggcggcggcggcggctggggtgggtggtggtgatggtggtggtgtgcggcagcgtggtgatgatggtggtggtgggggtggtggtggtgatgggggtgaaggtgccctcccggaccggcgcccggcgcgctcttggtgcttcccgcgtgcaagtgagtatggtcggcgcgcagcaccttgaagcgcttgcgacgccgcaggaagctgccgttctcgaacatgtccccgcagtcggggtgcagcgcccagaagctacccttgccaggctggtcgggcctccgcggaatcttgatgaagcagtcgttgaaggagaggttgtggcgcaggctgttctgccagcgctgtgtgtgctcgcggtagtaggggaagcgctccatgatgaacttgtagatgtcgctcagcggcagcatcttctcggccgagtgctggattgccatggcggtcagcgagatgtaagagtagggcggtttttggtcgctgtacgagctcttccccggccgcggcatcgcccccggctcctccaccgccctccggcccgcactggaccacagaatctctccgcactccgttcctggggcctggctgcccccactaattcccactcggcccctccagtcccgccactttgccctctcgccctccaggccctctctgcttctctctcctgccttctccgaattgcctggtgtctccgaccttggcctttcgggcctactcagctctcggaagctggcaacttctggccc

SEQ ID NO: 16644 - DNA, 890 bp, Artificial sequence
  DNA replication origin
aaagtgaggagcgtctctgcccggccgccatcccatctaggaagtgaggagcgcctcttccctgccgccatcccatctaggaagtgaggagcgtctctgcccggccgcccattgtctgagatgtggggagtgcctctgccccgccgccccgtctgggatgtgaggagcgcctctgcccggccgctaccccgtttgggaggtgaggagcgtctctgcctggccgccccatctgagaagtgaggagaccctccgcccggcagccaccccgtctgggaagtgaggagcttctccgcccggcagccaccccgtccgggatggaggtgggggtcagccccccgcccggccagccgccccgtccgggaggtgaggggcgcctctgcccggccgcccctactgggaagtgaggagcccctctgcccggccaccaccccgtctgggaggtgtgccccacagctcattgagaacgggccatgatgacaatggcggttttgtggaatagaaatgggggaaaggtggggaaaagattgagaaattggatggttgccgtgtctgtgtagaaagaagtagacatgggagacttttcattttcttctgtactaagaaaaattcttctgccttgggattctgttgatctgtgaccttacccccaaccctgtgctctctgaaacatgtgctgtgtccactcagggttgaatggattaagggcggtacaagatgtgctttgttaaacagatgcttgaaggcagcatgctcattaagagtcatcaccactccctaatctcaagtacccagggacacaaacattgcggaaggccgcagggtcctctgcctgggaaaaccagagacctttgttcacttgtttatctgctgaccttccctccgctattgtc

SEQ ID NO: 16645 - DNA, 1170 bp, Artificial sequence
  DNA replication origin
tgagcatgctgccttcaagcatctgtttaacaaagcacatcttgtaccgcccttaatccattcaaccctgagtggacacagcacatgtttcagagagcacagggttgggggtaaggtcacagatcaacagaatcccaaggcagaagaatttttcttagtacagaagaaaatgaaaagtctcccatgtctacttctttctacacagacacggcaaccatccaatttctcaatcttttccccacctttcccccatttctattccacaaaaccgccattgtcatcatggcccgttctcaatgagctgtggggcacacctcccagacggggtggtggccgggcagaggggctcctcacttcccagtaggggcggccgggcagaggcgcccctcacctcccggacggggcggctggccgggcggggggctgacccccacctccatcccggacggggtggctgccgggcggagaagctcctcacttcccagacggggtggctgccgggcggagggtctcctcacttctcagatggggcggccaggcagagacgctcctcacctcccaaacggggtagcggccgggcagaggcgctcctcacatcccagacggggcggcggggcagaggcactccccacatctcagacaatgggcggccgggcagagacgctcctcacttcctagatgggatggcggcagggaagaggcgctcctcacttcctagatgggatggcggccgggcagagacgctcctcactttccagactgggcagccaggcagaggggctcctcacatcccagacgatgggtggccaggcagagacgctcctcacttcccagatggggtggcggctgggcagaggctgcaatctcagcactttgggaggccaaggcaggcggctgggaggtggaggttgtagcgggccgagatcacaccactgcactccatcctgggcaccattgagcactgagtgaacgagactccgtctgccatcccggcacctcgggaggccgaggctggcggatcactcgcggttaggagctggagaccagcctggccaacacagcaaaaccccgtctccaccaaaaaaatacgaaaaccagtcaggagtggcggcgcgcgcctacaatcgcaggcactcggcaggctgaggcaggagaatcaggcagggaggt

SEQ ID NO: 16646 - DNA, 1173 bp, Artificial sequence
  DNA replication origin
cagtggagaggccgggagggctcggaagaaaaacgcccggctcactggagtcggagacgcagccactcacccagcagcagcagcttaagctcacggcgcgcgtccttcttgtcccgacgaagctgtcgctcgatctccgcgctgatgcgctgcgactccttctcctccgcggacaggcagcagcagccggccatggtgcgctcagctcagtacccgacggggcgacgcggccccgggcacccgaatcctcggcccggccgctcacccggccagcatgcgacgggcacaggggtgtggaaagaaaagacgggggccgacttgagctttggagtaagacgcctggacctccgaggctcaatcccccttcgaaagtcggctctgaggcggggtgaatgccgagcgctgggaacgctcgagtgcaccccggatccgggctcagcccgccccactctcgctctggggaggaggagggcgagtcgagaagttgggagcgttgctggccccgggaagatgcgcgcgccccttggcacaggagccggacagcagtcgggggcgcagacgagttggaacgtcggtgctcgggggagagtaggatctcctgggcctaggggtgtccccaggcgggaggtaggcgcggagtgggttggaggcaaaggacctggctggcctttgcctggaaagttctgaaaacctcagcagtgaccgcagactaagactgagtggaaaggttcccgctagcgtttgtggctctaagtggcaggaggaggcggagcatcttgaacctgcagccctggcgtctgctggacttgcccttctgggcaccccaagccgaaggcgcctggaagtgaaaggggacgagcagggggcgcggagctgggggtgggagctggcacctctaggagcagctcccacacttgcctccctggctggggcgtcccggccaaggtttgctgtaatctgcgcgtctggccgccaggcaccgggttccgacaggtgagtgagtttcgccaactcactcgctcggagaaggcggcagcaggctggaagaggagcggcgccaagcgtctgttgcgggacacaaagccccggacctgaagtggaagcttgcccaccagcttcaccaccacgcacacccggatttcctagactggctccttccgcttcccggacgcc

SEQ ID NO: 16647 - DNA, 747 bp, Artificial sequence
  DNA replication origin
gcatcttgaacctgcagccctggcgtctgctggacttgcccttctgggcaccccaagccgaaggcgcctggaagtgaaaggggacgagcagggggcgcggagctgggggtgggagctggcacctctaggagcagctcccacacttgcctccctggctggggcgtcccggccaaggtttgctgtaatctgcgcgtctggccgccaggcaccgggttccgacaggtgagtgagtttcgccaactcactcgctcggagaaggcggcagcaggctggaagaggagcggcgccaagcgtctgttgcgggacacaaagccccggacctgaagtggaagcttgcccaccagcttcaccaccacgcacacccggatttcctagactggctccttccgcttcccggacgccccggcccagctcgggcttggccaaagcccttggtcagctcggcaatttgcctgtaaagtgtggctgggcctgagcctgctggctctgagctcggagaaggagccgccgctgggttcagttataagagaactgcaagagcccagggtaaatatcctctcggtctccggacgagggggctggggagaaagggaacggctgattgctttgcattttatgatgggaaagacacctgctttgtagaaagggctgatacgttcctagtagcacctggcaagtttcctgcccagccctgaagcctaacagccgccttgcgattgtgtccgcactgacaccttggcctgtatc

SEQ ID NO: 16648 - DNA, 1351 bp, Artificial sequence
  DNA replication origin
gaacaaaatggagtctcctatgtctacttctttctacacagacacaataacaatctgatctctctttcttttccccacatttcccccttttctattcgacaaaactgccattgtcatcatggcccgttctcagtgagcagctgggtacacctcccagacggggtggtggccgggcagagggcctcctcacttcccagtcggtgctgccgggcagaggggccccccacctcccagacggggtggcagccgggcagaggggttccccacttcccagaccgggcggcagggcagaggcgccccccacctcccagatggggcggcagccgggtggggactgccccccagctcccggacggggcggctggccgggcggggactgccccccagctcccggacggggcggctggccgggcgggggctgcccccaatctcccggacggggtggctgccgggcggagacgctcctcacttcccagacggggtggctgccgggcggaggggctcctcacttctcagatgggatggccagtcagagacgctcctcacctcccagacggggtggcggccaggcagagacactcctaagttcccagacggggtcacggccgggcagaggcactcttcacatctcagatggggtggcggggcagaggtgctccccacatcccagatgatgggcggccgggcagagacgctcctcacttcctagatgggatgacggccaggaagaggcgctcctcacttcccagactgggcggccaggcagaggggctcctcacatcccagacgatgggcagccaggcagagaccctcctcacttcctagactgggtggcggccgggaagaggcgctcctcacttcccggattgggcggccaggcagaggggctcctcacatcccagacgatgggcggccaggcagagacgctcctcacttcctatacggggtggtggcgggcagaggctgcaatctcagcactttcggaggccaaggcaggtggctgggaggtggaggttgtagcgatcggagatcacgacactgcactccagcctgggcaacattgagcactgagtgagcgagactccatctgcaatcccggcacctcgggaggccgaggctggcagaccactcgcggtcaggagctggagaccagcccggccaacaaggcgaaaccccgtctccaccaaaaaatcaaaagccagtcaggtgtggcggcgcccgcctgcaatcccaggcactccgcaggctgaggcaggagaatcaggcagggaggctgcagtgagccaagatggcggcagtacagtccagtctcggctaggcatcagagggagaccgtgcaaaggggagacga

SEQ ID NO: 16649 - DNA, 1399 bp, Artificial sequence
  DNA replication origin
acggggcggctggccgggcggggggctgacctccccacctccctcccggactgggcgactggccaggcggggggctgaccccccaacctccctcccggaaggggcggctggccgggcagaggggctcctcacttcccagtaggggcggccgggcagaggcgcccctcacctcccggacggggcggctggccgggcggggggctgaccccccacctccctcccggatggggcggctggccaggcggggggctgacccccccacctccctcccggacagggtggctggccgggcagaggggctcctcacttcccagtaggggcagctgggcagaggcgcccctcactggccgggcgggaggctgacccccccacctccctcccggacggggcggctggccgggcggggggctgaccccccacctccctcctggacagggcggctgccgggcagagacgctcctcacttcccagatggggtggctgccgggcggaggggctcctcacttctcagatggggcggctgccgggcggagggtctcctcacttctcagacggggcggttgccaggcggagggtctcctcccttctcagatggggcggctgggcagagatgctcctcacctcccagacggggtcgcgaccgggcagaggcactcctcacatcccagacggggcggtggcgcaaaggcactccccacatctcagacgatgggcggctgggcagagacgctcctcacttcctagatgggatggcggccgggaagaggcgctcctcacttcctagatgggatggcggccgggcagagacgctcctcactttccagactgggcagccaggcagaggggctcctaacatcccagatgatgggtggccaggcagagacgctcctcacttcctagacggggtggcggccgggcagaggctgcactctgggcactttgggaggccaaggcaggcggctgggaggtggaagttgtagcgagccgagatcacgccactgcactccatcttgggcaccattgagcactgagtgaaccagacactgtctgcaatcccggcacctccagaggccgaggctggcggatcactcgcggttaggagctggaggccagcccggccaacacagcgaaaccccgtctccaccaaaaaaatacgaaaaccagtcaggcgtggcggcgcgcgcctgcactcgcaggcactcagcaggctgaggcaggagaatcaggcagggaggttgcagtgagccgagatggcagcagtacagtccagcttcggctcggcatcagagggagaccgtggggagagggagagggaagtccaggattttcttttgtggtgatgaaaatgttttcgaactagatagaggtgggtataacattatgaattaactaaataccc

SEQ ID NO: 16650 - DNA, 886 bp, Artificial sequence
  DNA replication origin
gccccatccgggagggaggtggggggtcagccccctgcccggccagccgccccgtccgggaggtgaggggcgcctctgcccggccacccctactgggaagtgaggagcccctctgcccggccagccgccccttccgggagggaggttggggggtcagccccccgcctggccagccgccccgtccgggagggaggtgggggggtcagccccccgcccggccagccgccccacctgggaggtgaggggcgcctctgcccggccgcccctactgggaagtgaggagcccctctgcctggccagccaccccatccgggagggaggtgggggggtcagccccccgcctggccagccgccccatccgggagggaggtgggggggtcagccccccgcctggccagccgccccacctgggaggtgaggggcgcctctgcccggccgcccctactgggaagtgaggagcccctctgcccggccaccaccccatctgggaggtgtgaccaacagcccattgagaacgggccatgatgacaatggtggttttgtggaatagaaagcggggaaaggtggggaaaagattgagaaatcggatggttgccgtgtctgtgtggaaagaagtagacatgggagacttttcattttgttctgtactaagaaagattcttctgccttgggatcctgttgatctgtgaccttaacccccaaccctgtgctctctgaaacatgtgctgtgtccactcagggttaaatggattaagggcggtgcaagatgtgctttgttaaacagatgcttgaaggcagcatgctcgttaagagtcatcaccactccctaatctcaagtacccagggacacaaacactgcggaaggccgcagggtcctctgcctagg

SEQ ID NO: 16651 - DNA, 1323 bp, Artificial sequence
  DNA replication origin
cgctcccaccgcgcccccggcccacctggtggccccggccctggccgccgcccccgcggcggttcccggagctcgtcccggacgcgcgcccgggcggcgggggctcggcggccaccgctgcctcgggggagcgagggcgggagggtgtgtgtgcgcgctgtgagcagggggtgccggcggggctgcagcggaggcactttggaagaatgactctggagtccatcatggcgtgctgcctgagcgaggaggccaaggaagcccggcggatcaacgacgagatcgagcggcagctccgcagggacaagcgggacgcccgccgggagctcaagctgctgctgctcggtgagtaccgtccggggccccgccgggcctctgcgcccccagcccaccatccttggccctgcggggcagctgccttcggcgcccccgccccccggcgcccgcggttcgcccctaccctcccgggcgcgcccccggccactgccttcacccgcgcgggcgcgcgggcgcgttacacacagacacacacacacacacacacacacacacacacagcgacacacacacgcagcacaggggtcggggctgccctgcccggtgccttggcttgttccttttcgtgtccctgagggctgtaccttatctgctgtgcatctgctaaatggcagatcactccgaccagaggcgcgggggtggaaaggtgggcagaggggttgaacttccagtgtcgtggccgcggcaccccatggggtggtggcgtggggagccgtgtgtgtggcccagcgggtggcgagcggagccggggcacgttgggggatggcctgcggtggagtggccggtgtgcatccattatcagtgccctatggggtcaggagggaatgggggaacggtgggcagactcgcagctggattcccggagcactcatggtgaggaagccaagtggttggccctccaaggaaagggtctgtgtactgggggcgaggcgggagggcaagcccaaatgtgtcacacaagtgctgttctctagccaccagaccatcgaaaggagggagcctagaagagttggccagtggatggtgacaggcgttattctcgtctgcaccattccttctagataaagatgagggtaggggagcgttgtgctgtgtggttgttgacagcgaccggtatcttttgtttaatgaggcaacctagatgtaggcctcagttcacaatagttactaccgaaaaccagtgcagtctctcagttactctcttggcaacaaatagaaaccttttgtttaaaacagatagcattttaatgtctttggaatctgggcgag

SEQ ID NO: 16652 - DNA, 1019 bp, Artificial sequence
  DNA replication origin
ggcggaggggatgggcgcgggaggagggagccgggaggcggtgccgcccggcccctcctggaaggctttcctgggctcgcggccgccgcggcgcgcctcccagtgcggctctcgcctcgcccgcgcggctcccgggctgggccggcccccgcgggctctgcggacgcctactgctcccgcaccctcggcagagtccgcgggcgcagcagtcacggccgcccccggccgaagtcggggccagacccggccgccgacgcgcagcccgagccggcggccgccgttgcgtgccagggccgcagccgacctgcggctgccgtccggccgggcgtggtgagacaggaatatggcggcctctgcctgcctcagcccaccggcccgggagcgcggccgcggcccctgctgaagtcgcgggaggcggccccgcggagccccgcacgcgctccctgcggcgccggcgctggcgtccgccgctcccgggctgtgcctgtctgctccacggggtcgctcctcagccgtttctgtgtttcccgttcctatttctaaaacgccattcggttagaaactctcacgtcacctctgacaccggtgcagtcttagaaaataagctcctctatactgtgtggggctactggggaagggaagggaaggaattggcaccggtgcccagaggtgtagggggagattcacaggcgaagctgttcgcaaagtaacgtgagatagaaatctaaatcctgaacagagaaaggaagctgcccaagtttccaagagcctcccgataggttccaacttttcatgcctttgtttttttggtggttgttggttgtttttgtttttttaagttgtttttgtttttgttttacaagttctcttgtttctgagaaggcacacgatgtttagccgccgagtaatcgaatttactcttctagactgagattgaattatggatgacttatgggaaaatgtaaaataatgtggaataaaaggaaaggaaagaatgaaatagaagagaaactaaggag

SEQ ID NO: 16653 - DNA, 967 bp, Artificial sequence
  DNA replication origin
acaattgccattacaattatagtaataaattaataacgaaatacatagggaacaaacgttgggaacactccaaaacatggggggtgcaggaggaggctacaggaaacatctccacagctggagcagggaatctcgcctaaaatgaactgtaaccactgagaaaaaataagccctgtcctctcagctactgtgagcgctgcccctagaaaagtaagaagtcctttcccctttaaaattggattctctgttcttaccacaacacagaggaggctctgtcccagggagatttctactctgctcaacaattgataattgtaaaatacttggctatgcctcatgctgctccaacatattatcagctctatcctggttagaaaaataaaaatctaacggcggcggcagccgcctgacaatgggctcaaggcacatcggagactttgccttcttcactgcgggtggggctggggacggtgggtttggcgggggaggggaggagccgggctggggcctgggaaggcagagagtgagttccaccagcaagatctgattgtggcccgggagagaattcaatcactcggtttactccagaacgaaatgaacagggaattgggttaagcagcccaaagtctaccagagttagaatactcgaacgcctttaggggacaagcaggttaaaaaaaggaggggggtggggagaaaggctttaggaaagggtaggttctatgggggacaaggaggggaaagctggactgaaggttttcaaatttacatttctgaaaagcagtgttcctaagtgctggctaaagcaaacactggtgtaaggcgtaggggggcacgcacacgcggacctttaagtttgcaatccctttcagctaacgtgatccactgcatatgcaaaacctgtcatcggttcattcccgttcatcactcattcacactatgtccattcatgcatccgctccacact

SEQ ID NO: 16654 - DNA, 1564 bp, Artificial sequence
  DNA replication origin
gccacattagtttggcaggctgccttctgggagaggcccaggtttagtgcttggagttaaaggacctaggcgtggcggggggggattcaggagagtcccagaattccttctatgctttcttattttgttcctgatgcccttaatttttttcccagtggtatcaccgttctttctgtcctctaacatcatgtctacacatctcctgagaaatgtatagagctaaaagctaatagaaaaattggtctcccgtccactatacccaccaagtgcttttactcacattcaggttctcagcactttttagggagccagggaagatgatttattcttctcggtcttccaggagcctagaacaaggctagtgtacagagcaggtcctcaggagccattttatggatggatggacggttggatggatggacagatggatagatggatgggtgggtgggtggatgggtgggtgggagaatggatgagtggatggatggatggatggacaagtgggtagatagatgggcggataggtggaagggtgaatggacagatgagtgggtgggcgggtggatgaatgagtggatggatggatggatggatagatagatgggtagataggtggaagggtgaatgaatagatgggtgggtgatggatggatagatggatgggtgggtgtgtaggtagatggatagataggtgggtgtgtggatgggtgggtgaatggatggatgggtgggcagatggatggatggatggatggatagatggatggatggaagattgatggatgagtggatgggtaggtgagtggatggatgaatggatggatggatgaatgggtggacagatggatgtctggatgagtggatgggtgaatgaatgggcgggtggatagatgggtggatgggtgaatgggtagatgggtgaataggtgggtggaaggatgggtgggtaatggatggatagatggatgagtgagtgggtagatggatggataggtaggcaggtggtagatgaatagatggatgggtgggtcaatggtggatggatgagtggatgagtggatgaatgtatagatgaatgggtagacagatggatgaatgaatgaatgagtgaatgagtggatggatagatgggtaggtgggtggatgggtgggtgagtagatgaatgaatgaataaataggtggactaaacacgccctcacacacttccacggaccttcttcccaatcccagcataaaccatgcccttcaagcagcccatgttctgctccccaaacacactgtacactcttccctcagtgcctttgcggggatgattctaacctttctaaaagtacttctgccctcttctctgcctaattccactcatgaccagggctcataataagctcatgcaaaagccctctcttcactccaaccaaagagtatcccccttttccaggctcatgccacattctttagcccttggctatgaaatctttggatacctactgctgatcgtgcactttaaatggcttcagtgagcacaggcagggtatcctggcctccaaactcacacatcaaggt

SEQ ID NO: 16655 - DNA, 1171 bp, Artificial sequence
  DNA replication origin
gccccgaggtggagctgggcccagaacagtgctgcactccaccgagcccgtaggagccaggagcaggcaggagccccaccctcccaggtgcagctgcagccacccaagtcgcggctgtggacccaggcatctctgcactctcgaaggtctggaaagggcccccgtttcccccaacaggctcggagttgtctgctccccgtgcctggcccctccccactcctgctgcctgctccaatctcagagcaaggctgggcccaagactgggcactgttgcagcctgaccgggtgtgcacagtattggggcagcgctgacacgccagccccctgccatcttggccccctccatgggcagactttgggcaccaactagcatgggaggaaggcctagcaagggctgagggcagtttggtgtgggcctgtaggccccccttggcacgaacagcctgggcgccatgaacggtggcgggaggcaaatggctcctgagtggaacggggcgggtccccagggaagtcccacctttaggctggggagtgcctgaagcctggaggcctggctgctggtcccgcgggaacttgtggtgctttccccaggcacgcccatggcctcccatggaccaatcagcacacacttcctcccctctgaggcccatgaaaagccccagacgcagtcagaccagaagagacgttgggccaaccagctgcggagggaaggtatctaccccagggtcttctctctgttgagtgctgaagagatgacgggatgacctgcctgcagagaggagctaccgtctctgctgagagctgaatacttgtctggacaccctggctacagagaagaactacccactgcaggtctcctctgagctgctctatcattcaataaagctcctcttcgtcttgctcatcctcacttgtctttctgaggagaatacctcattcttcctggatgcaggacaagaacttgggacccgccgaaaggcagggatgcaagagctgtaacacaaacaaggctgaaatacaccccttgttcaccacattgagggtgacaaggagagaagagagaacgagagaagagctgcggcttttcgaggagcccagacccaggagcttcttgagccagggatgtgacactctctttaaggctctgcggttcctggagtcttcaagcttc

SEQ ID NO: 16656 - DNA, 913 bp, Artificial sequence
  DNA replication origin
gaactacaaagaaaaacatgtagtatattagagaataagaatttggagaaaaatcaaccagggaaaagagaggaggttcaatttggaatagaattgccaggtaaggcctgctgcaaaagtgacatttgggtagaagcctaagcgggtgaaggtatctgaggaaaagtgcctcagggagagagagaacagcgtgtataggggctctgagatgggagagggcctgtgtttgaggaagggtaaggagtgagaatgactggagtgagagtcattctcagagttgtgggggccatggtcagctgagctgtgggcatcagtcatgtgatgctctctagaccactgcagggctgtggctatgccttgaatgagatgggaccccttagagaagtttggagagggtgagtgatggagcagacctgtattttaaaaggctccatctgcttgctggagatggataagaatagactgggggtggggaaggaagggaagggaggagatccattagtaggttgctgccataatcgaggtgagaggtgatggcttggaccagggtggaggggagaagtgagaactaattgaatttgggcatattttgaaagtgcagcaggatgacatgacaaattacttacagttatgtgagaaagagtagaatcagggtgactctaggtttcggtttttaaccagtttgatggatggagttggcatttcctaagatggggaagaatgtgggaagaacaagtttggggcagggcatgggaagaggtcagtctcggacaagttaagtttgagatgtctgttagatgtgcgagggcaaatgttaagaatcagttgcatgtaggctgggtgcagtggctcacacctgtaatcacagcactttgggaggctgaggcgggcagatcacgaggtcaggagattg

SEQ ID NO: 16657 - DNA, 1024 bp, Artificial sequence
  DNA replication origin
gttgtgtcttttggccggaggggcgtggagagccgcccgaaatcggcgccccgcgccgggagcagcccgcccgccatcacccccaccccccggcgcggtggccctcggagggggtgcggagaggcaattgagttgtagccattttcttattgttgtctttgaagcccctggaagccgcgccgagccgtttgcggtccccgcgccgcgactcctcgagggggggtggcgagcgatgaaggaggcgcgactccgcgcccgggcggggagggcgccctcggcagcggcgctgctgggctggctgcggtttggaagtgcggggcgccggcccctcgcgccgcgggccgccggggcgagcgggcgaacgaacgagccgagagggtggcggccgcctccctcctcccccggcctgaccgcagcccgacgccatggcgcgggtccccccgacgggccagtttcgattccgggtgaggagggagtgggcgcggcgcgcgggtccctgggtgcctgtctttggccggggaggggagacgggactcgaaccctcggggtccggggcgcgggggcctgcgggcgggagtatgcggggccccaggaccacctcgaaaccagcctctgcctgggctgttgggcgcgaggagggttgcgggaggagagttttaatctctctttgcttgcgtgcgcgatgaccctcaccccccgctaacgccgcatagtaggttttctccgtctccctgcttcgcctgtgatgtgggctaattaaatattttattgttgttcttcaggcaccgcatcagcctgctcaaccctttaaatttacaatttccgaatcctgtgatcggattaaggaagagtttcagtttttacaggctcaataccacaggtaacgatattgactttagctgatccttctgtttgcttagctcttgtctccccgacaaatacacacaaacacttaccctcctccttttttgtgggggcgtcacaaaggtattatttttttttctcggtgggcagaaagggcaaa

SEQ ID NO: 16658 - DNA, 1295 bp, Artificial sequence
  DNA replication origin
atacacttcttccgtgagacagaggcagactggaagatgacagcttttcaataagggtggtatccacagcactgctgtcaatggtaggaatggatgatgatgctgcagaggttctgctccctaaactggaggtgtctggatgagccatgatgatcccatcatggctcagaataacaggggtactggggagacaggctttccactgctgcccattaggggcccccaatgtgagtggagccgtggctcccagatttacagtgtggttagaagttgtcattggtctcatgactggctgtgcaggcaaactggtggagatgtgggctgaggcaatgcccaagtcaggggtgggaggaggacctgggacctgggaagtgtaggtggccaggcacagggagtatgaagtctctgcaggtggggagacagcaggtgcaggctggggggtgctgcagtttgccttggccaaatcagggacccaaaatttgggctgaggggtggggctggggaatataaatgtagctgggtgatataggttgagtcttaccagggggcccctgctgtgcactgccatcaatttgggaaactagtagagagttcatcctggagcttgaggaagttctgaacatcacagccttaggtgggaaagtggtgtccctattgaggacctgaggatctgaaggaggctgcaaggtgtggtgggcagatgtgtttgctgtgatggtgaaaatgactgctttgaaatttatctgcttgctggtggtaacagagatcctggtggaaggtcctggaagaagggcgggagaggaaagaggaggaagggaatgcacatacacagctgtagggaactcccttctgaagggaggccggaaggagaaaggtgtggggctaggtgtcagggggtcagaagtgggagatgctgaagctactccagaatgagaagaacctccttcctcattaggtggaacccaaaatatgggaacaaggtcagtgggaagagacaatggagagttagggattttggatattcttggtgtgacagacaggcagcggggtctggtagccggctcagccaagtcaagggtggaaggaggagctgggacctgcaaagtgtaggtggccagggacagagagtctgaagtttccgcatgtggggagatagcaggggcaggctggatggtgctgcagtttgccttggcctctgttttgtgctccaaattgtccattttatcctccaagattttgctgttctgtttacaccccatgctgttctccaagttgcccaggtatccctcaataga

SEQ ID NO: 16659 - DNA, 1143 bp, Artificial sequence
  DNA replication origin
atgcctttagctccagccacctttttaagagtaaattgctgggcaggagggggagggctagtcacagaaggaatctgtaagccagaccaggtgtgaggaggggaggtgataaaaagattatagggtggaggagcagaggctgaggaagaattgggacctagctcggcctggcgaggagcagcctggggaggaagagagaggtcagatgggtctgtagaaaatgaagattagaaagactcagcgatgcttggggttggtactgaggggacaggcgggagggaaagaaggaagatttgggacgagttgcactgggcaaagggactgatgtgtaaaataatgcctcgacgtcaggcacctcagaccatttgcctattttacgacaagaattatttagatcttacaggatggaaaaattcaaagtgccattttctggctatttggaactactgtcgagtttgtattggggtcaagcggcattgcagaagaaaataagacatttaggttttaggtcaggtgtgagttgaagaggttttaagtttttgagaacacaggccaagggagtagaaggaggaatggagggtggaaggttgcccatagtgaaggaagcaagcctagagaaaagagagtagagaaatggagggaaggggttcaggggttcttaccttccagaaaagtgggaaaaggggttggggcacagagataagaggtcagggcatggaaataagggatggggcacagaaataaggggttggggcacagaaagaaggggtaggagcatggaaataaggggtcggggcatggaaataagagattggggcgcagagataagaggtcagggtgcggaaataagggattggagtgcagagatacaagaggttggggcacagaaataagggattggggtgcagagatatgaggttggggtacttgcccctcctctagaaaagcgggacttgccgctaagagtgaaggagaagaggttgagtggtacttgcccctcccccagaaaagcagagaaggggtagagacaaggagagaagaggtgggggtacttgcccctttcccagaaaagcgggacttgccgctaagggtgaaggaccaaggcaggcgtccctgcatggtctgacacctttgaaacgtggg

SEQ ID NO: 16660 - DNA, 899 bp, Artificial sequence
  DNA replication origin
ctcataatccccagtgggactagagtagaattgccaaccaatgcagtactgtcgccactgccaggcatgctagtggcaactttaaatacagaagacttggctgtagtaatgaggaaagcacttgagttgttaagcatacgtggctgcacattgacaggcaggccaaatgtggaatatggtgatgtcacaccagtgagatctgctgccatgatgctgccactcactgggtggctgggctgcaggagaccttaggcttatgactggtgctggggttgctgggtttcccagaatgagagaatcgtctgacttatcctgcccatgagaagccccagatatgagctgggaggtggctcctggacttacagcatgtggagaagttgccatcgatcccgtgactgactgcaggcaaactggtggagacatgggctgaagtaatgttgccactgggttggttgtgaatacccagaaccaaggagccccaggtaaggcacagtgcacttcttccatgagatagtggcagactgggagatgacagcttttgaataagggtagtatccacagcactgctatcaatggtaggaaaagatgatgatgttgcagaggtgctgctccctaaagtggaggtgtctggaggcatcataatgggatggctcagaataacaggggtattagggacacaggcttttcctgcttcctgctggggaccccgaatgtgagtggagcagtggctcccagatttatagtgtggttagaagttgccattggtctcgtgactggctgtgcaggcaaactggtggagatgtgggctgaggcaatgcccaagtcaggggtgggaggaggagctgggacctgggaagtgcaggtggccaggcacagggagtatgaagtctctgcaggtg

SEQ ID NO: 16661 - DNA, 946 bp, Artificial sequence
  DNA replication origin
aataagggtagtatccacagcactgctatcaatggtaggaaaagatgatgatgttgcagaggtgctgctccctaaagtggaggtgtctggaggcatcataatgggatggctcagaataacaggggtattagggacacaggcttttcctgcttcctgctggggaccccgaatgtgagtggagcagtggctcccagatttatagtgtggttagaagttgccattggtctcgtgactggctgtgcaggcaaactggtggagatgtgggctgaggcaatgcccaagtcaggggtgggaggaggagctgggacctgggaagtgcaggtggccaggcacagggagtatgaagtctctgcaggtggggaggtagcaggggcaggctggggggtgctgcagtttgggttggccaaatcaggggctccaaatttgggctgaggggtggggctggggaatataaatgtagctgggtggatgtagactgaatcttaccagggagcccctgctgtgcatggctatctacttgagaaattgggagagctctcatcctggaggttgaggaagttctgaaagtaacagccttaggaggggaagtggcgtccttgttgatggcctgatggtcttaaggaggctccaagatctggtgggcagatgtgtttgctgtgatggtggaaatgactgctgtggaattcatctgcttgctggtggtaacagagatctgtggaaggtcctggaagaagggtgggagaggaaagaggaggaggggaaagcacacagggctggctctcttctgaaaggaggctggaaggagacaggtgtggggctagaaagtgttgggggtcagaagtgagaagtgctgaagctactccagaatgagaagaacctcctttctcattaggtagaacctccaatatagggacaaagtcagtggaaaaaaaagacagtggggagt

SEQ ID NO: 16662 - DNA, 812 bp, Artificial sequence
  DNA replication origin
cagggagcccctgctgtgcatggctatctacttgagaaattgggagagctctcatcctggaggttgaggaagttctgaaagtaacagccttaggaggggaagtggcgtccttgttgatggcctgatggtcttaaggaggctccaagatctggtgggcagatgtgtttgctgtgatggtggaaatgactgctgtggaattcatctgcttgctggtggtaacagagatctgtggaaggtcctggaagaagggtgggagaggaaagaggaggaggggaaagcacacagggctggctctcttctgaaaggaggctggaaggagacaggtgtggggctagaaagtgttgggggtcagaagtgagaagtgctgaagctactccagaatgagaagaacctcctttctcattaggtagaacctccaatatagggacaaagtcagtggaaaaaaaagacagtggggagttagggattttggatatttttggtgaggggtcaggtggacagacaggcaggggggtctggcagccaactcggccaagtcaaggacgaacagaggagctgggacctgcgaagtgtaggtggccagggacagggagtctgaagtctctgcaggtgcggagacagcaagggcaggatgagtggtgctgcagtttaccttggcctccgttttatcctccaaagcctccattttctccttgaagaagttttctcttctgtttacaccccatgctcttctccaagttccccaggtatccctcaataggcaggtagagaagcttagcaagtggagagagctcacctctatcccacatcaa

SEQ ID NO: 16663 - DNA, 1567 bp, Artificial sequence
  DNA replication origin
ggcgctccagcccactgcaaagttctctcaccacccgagggacgacatccacgagatggtggggaaaacagcaggagtgcgctccgccaatcggccaccctccccggcgggcaaactctgcgggcgagtccagagtagtcacagcggtggggccagcgggggttttggtcgccgcgggacgacggaggtccgggctggtggcgcgggtcccgcccggccgtgcgagggtggggtggcgcagtcggctgcctccgggacgcggggcacagagtacccgccgctgtttctgctgctgctgcttctgcagccgccgctcccaccgccgccgccgcccgcgcctctcgcgccgcttacattaacacgcggtttcacactccggagctaaccagcgccggccccgcccagccccgttcgggcggggggcgcgagcgcggagccggcgggggacgtgagcccgggaggttggggggtggggggggggcagaaggcccgcatcagccaatcgcgtgcgctgcaaccaacgtggggcgctgacgcgctcctccccggagcgtatggcagcgcagcgccggacggggcgttctccctccccccctcctctcgcttccatctccgccgtctcctcggtctcccttcccatcccggcccctcctccgccagccgcgtcctcccgggcttggtgaggaactgttcctggaggagccgcgggacgccaaaaccagccaatgggaagcggcgattcgcggagattggcactgatgatgggaaggtcggtgggaaggagagcggcggggctgggctgtcaatcaaagtaacgtggggctggctagagagcgcgcgggcgcgcgctagcgggagggactggcgagcgtgcagccggggaagctgagggctcgagttagcaaaaatcctgccacttgctcacttttccctttaatgaaaatcctcagatctaagtgaaagtaactcaaagactagctgcggagtttcttattggaggcggaggggggcttttggtaattcgagcaaatgtgtttttcagtgctggaccccttgtttgatgctactctaaaagtgaggccacattcaaaaatttatctgaggtttgtttttccttgagctgcctttttacggatgtacgagagggagtggactgtgcacttagttggaaatgcgtaaatgagcaacgccacggttggcgtaggtacaccagcaaagacgactgtgatgtcctcccaccccacccaccccctttgcacccaaagtggtaggatttgatttttattgcaggatttcaagccacttttcaaaaagatcgtcctgtcccgtttggcgggaaggattcccagggtgctgccagaacaaggcacgcgtgtccgcagatgagacgttttgcccggggcgcgaaatcccaggtcttcgtcttaaaagtcctgacttcgctgtgttgggagaggtggggagcggctgaggtttttaggaacttctcagctacaagactacgagtctgtttccaattcctgggaacaaagagagacaatgtaataaaccagcactgagacctgaa

SEQ ID NO: 16664 - DNA, 1354 bp, Artificial sequence
  DNA replication origin
gccgggcggggggctgacccccccacctccctcccggacggggcggctggccgggcagaggggctcctcacttcccagtaggggcggccgggcagaggcgcccctcacctcccagacggggcggctggccgggcggggggctgacccccccacctccctcccggacggggcggctggccaggcggggggctgacccccccacctccctcccggacggggcggctggccgggtgggggggctgacccccccatctccctcccggacggggtggctggccgggctgaggggctcctcacttcccagtaggggcggccgggcagaggcgcccctcacctcccggacggggcggctggccgggaggggggctgacccccccacctccctcccggatggcacagctggccgggcggggggggctgaccccccacctccctcccggatggggcggctggccgggtggggggctgacccccccccccacctccctcccggacggggtggctgctgggcagagatgctcctcacttcccagatggggtggctgccgggcggaggggctcctcacttctcagacggggtggttgccaggcagagggtctcctcacttctcagacggggcggccgggcagagacgctcctcacctcccagacggggtctcggccgggcagaggcgctcctcacatcccagatggggcggcggggcagaggcgctccccacatctcagacgatgggcggccgggcagagacgctcctcacttcctagatgtgatggcggctgggaagaggtgctcctcacttcctagatgggatggcggccgggcggagacgctcctcactttccagactgggcagccaggcagaggggctcctcacatcccagacgatgggcagccaggcagagacactcctcacttcccagacggggtggcggccgggcagaggctgcaatctcggcactttgggaggccaaggcaggcggctgggaggtgtaggttgtagtgagccgagatcacgccactgcactccagcctgggcaccattgagcactgagtgaacgagactccgtctgcaatcccggcacctcgggaggccgaggttggcggatcactcgcggttaggggctggagaccggcccggccaacacagcgaaaccctgtctccaccaaaaccagtcaggcgtggcggcgcgtgcctgcaatcgcaggcactcggcagactgaggcaggagaatcaggcagggaggatgcagtgagccgagatggcagcagtacagtccagcttcggctccgcatgagagggagaccgtggggagagggagagcgagagggagacggagagcgagagggagacg

SEQ ID NO: 16665 - DNA, 929 bp, Artificial sequence
  DNA replication origin
ggggtcagccctccgcccggccagccgccccgtctgggaggtgaggggcgcctctgcccggccgcccctactgggaagtgaggagcccctctgcccggccagccgccccgtccgggagggaggtggggggggtcggccccccgcccgaccagccgccccatccgggagggaggtgggggggtcagccccccgcccggccagccgccctgtccgggagggaggtgggggtgtcagccccacgcccggccagccgccccgtccgggagggaggtggggggggtcagcccccctgcccggccagccgccccgtccgggaggtgaggggcgcctctgcccggccgcccctactgggaagtgaggagcccctctgcccggccagccgccccgtccgggagggaggtggggggggggtcagccccccccgcccggccagccgccccgtccgggaggtgaggggcgcctctgcccagccaccaccccgtctgggaggtgtgcccaacagctcattgagaacgggccaggatgacaatggcggccttgtggaatagaaaggcgggaaaggcggggaaaagattgagaaatcggatggttgccgtgtctgtgtagaaagaagtagacatgggagacttttcattttgttctgcactaagaaaaattcctctgtcttgggatcctgttgatctgtgaccttacccccaaccctgtgctctctgaaacatgtgctgtgtccactcagggttaaatggattaagggcggtgcaagatgtgctttgttaaacagatgcttgaaggcagcatgctcgttaagagtcatcaccaatccctaatctcaagtaatcagggacacaaacactgcggaaggccgcagggtcctctgcctaggaaaaccagagacctttgttcacttgtttatctgctgaccttccctc

SEQ ID NO: 16666 - DNA, 1389 bp, Artificial sequence
  DNA replication origin
tggtctcgatctcctgactttgtgatccgcccacctcggcctcccaaagtgctgggattacaggcgtgagccaccgcacccggcccaaatttaccaatcttttatagtttggtcttttgaagtcttagggaatcgtttcctaccctaaaggtctaatttgattgttttccatatgatggtcagttgtctcagcattattagttgaataatccagtatttacctacagcttggaaatttcccttctttggtaagccagattcccttctaaagggtctatttctggcttttatttttattcattggatatattcatatctccatataccagagactcattcatgtataccacagctttataataaacgttgattagagtgtttttctacctccgtgttcttcaaaattgcctagactattcttgacccttcttcactgtgagtttaggtttaggtgatcatatttaaccaaaaaaaatgcatttgggttttttattagaagtgtgttgaatttatggattaatttaggaggcttggtatcttgctgatacttaatctcactacccatttacatggtatatattgcttgcatacttgggtcttttgttttctatagtaaagttgctggaagaggagtgggggaggaaagaggaggagaggaatgcacacatatgggtgtaggaggcacccttctgaagggaggctggaaggagaaagatgtggggctaggacgtgtggggcatgggtcagaggtcagaggcactgaaactgcagctgaatgagagcagcctcctttttcattaggtggaacccccaaaatgggggcaaggtcagtgggaagagccagggaagagttaggaattatggatatcaaattttactcaattcttggtgtgggagaaggtggagggacaggcaaaatgaggggcccaacagcacgtgggccgagtcagagtaggacgaggagctgggatctgtgaagtgtaggtggccaggggcagggagtctcagcaggtgtggagacagcaggggcaggctgggtgccactgcagtttgccatgtcttacttttttttttttttttttttttgagatggagtcttgctctgtcaccaggctggagtgcagtggtgagatctcggctcactgcaaccaccacctcccgggttgaagccattctcctgcctcagcctcccgagtagctgggactacaggcacaagccaccatgcccgcctaatttttgtattttcagtagagacagagtttcaccatgttggccagaatgatctcgatctccttttttttaattaaaaagtaaactttaatgtcgaaaatgcaagcttgaggagggcagaaagatcacacacaaggctgtcacttcacacttggaag

SEQ ID NO: 16667 - DNA, 801 bp, Artificial sequence
  DNA replication origin
ttactttccagaaaagtgggaaaaggggttggggcacagataagaggtcagggcacagaaataagggattggggcacagagataagaggttgggacacagaaataagggattgggggttcttgccccgtagaaaagtgggacttgctgctaagggtgaaggagaaggggttgaggggtacttgcccctctcccagaaaagcagagaaggggtagagacaaggagagaaggggttggggtacttgccctgtccccggaaaagcagagaaggggtagagacaaggacagaaggggttggggtacttgccccttccccagaaaagcgggacttgccactaagggtgaaggaccaaggcaggtgtccctgcgtggtctgacacccttgaaacgtgggtgtataatcagacaggtctccctgcaatgattaaacacgaagggaaggctgccttcccagtctgtgaccggcgccggagttttgggtccacagataaaacgcgtctcttttgtctctaccagaaaatgaaaggaattgaaattaagagaagggagagattgaagtgtagcaccaagattgaaaggagaaagacattgagggatagtgagggaggctggagaagagagtaaaaagaggccacttaacagatttgaaattggtgagatgtttcttgggctggtcggtctgaggacctgaggttgtaggtggatctttctcatgaagcaaagaacaagaggacaggggattgatctcccaagggaggtcccccgatccgagtcacggcaccaaatttcatgtgcgtctgtg

SEQ ID NO: 16668 - DNA, 1285 bp, Artificial sequence
  DNA replication origin
attttcttagtacagaacaaaatggagtctcccatgtctacttctttctacacagacacagcaacaatctgatttctctatcttttccccacatttcccccttttctattcgacaaaaccaccatcgtcatcatggcccgttctcaatgagctgttgggtacacctcccagatggggtggcagccgggcagaggggctcctcacttcccagaaggggtggccgggcagaggcgcccccccccacctcccggacggggcagctggctgggtgggggctgccccccacctccctcccggacggggcggctgccgggcggagatgctcctcacttcccagacggggcggctgccgggcggaggggctcctcacttctcagacggggcggctgccgggcggaggggctcctcacttctcggacggggtggccgggcagagacgctcctcacctcccagatggggtcgtggccgggcagaggcgctcctcacatcccagacggggcggcggggcagaggcactccccacatctcagatgatgggcggccgggcagagacgctcctcacttcctagatgggatggcggccgggaagaggcgctcctcacttcccagactgggcagccgggcagaggcgctcctcacttaccagactgggcagccgggcagaggcgctcctcacttcccagactgggcggccgggcagaggggctcctgacatcccagacgatgggcggccaggcagagatgctcctcacttcccagagggggtggcggccgggcagaagctgcaatctcggcactttgggaggccaaggcaggcggctgggaggtggaggttgtagcgagcggggatcacgccactgcactccagcctgggcaacattgagcactgagtgaacgagactccgtctgcaatcccggcacctcgggaggccaaggctggcagatcacttggggttaggagctggagaccagcccggccaacacagcgaaaccccgtctccaccaaaaaaaaaaacgaaaaccagtcaggcgtggcggcgcccgcctgcaatcccaggcactgggcaggctgaggcaggagaatcaggcagggaggttgcagtgagccaagatggcggcagtacagtccagcttcagctaggcatcagagggagaccgtggagagagagggagacagaggagagagagggagacagagatggagggagagggggagggggagggagagggagagcaggagcagtgacttaacaagagcaactatcttgagtcacaatcatgctt

SEQ ID NO: 16669 - DNA, 933 bp, Artificial sequence
  DNA replication origin
ggcctctgagggtggggggccttatcctggcatggaggggcatggtgccctgcaagcgccaggcacgcgttatccgcgcccagtctccttcccctcgcgtgcaccctgcgcgcgcgtctcactgcgcccgggctaggggcgcggggcagctgcctccggagggactctggcccctctgggccctactccgccaggagatgggagctccgagggctgagaggggcacctgcatgtcgcccactggtatttcctcccttcttccacgtggagaaggcatgcatcagctgggttcactcatttctgtctcccgcgcccaggctccggagacgccctcagtcccggaacctgctttccgctccgtgtcggtccccctcaccctccgccggtggtctttagttctccgcgtggggcggtggcgaagtttccccagagtgagagaggccgggctgccctgggcgccagccttgagggatggagcgcgcgctgcgccggactggagctacctcgaaaggaatgtgtgaagtctgagtgtttcggagaaaggaaaagggattgtgaggccagcaagtggggagccctgcaggaacctgggtcctgggtaaaagagccccgtggaatcttggtggacattcactgtcgcccaagttggaggagaaggcgagttgtttgggagaaggcagctttgctggcagccctgtcctcgggtagtaagtgcctctgggctgtcaggagagctagtgtgaggtgcaaaggtgtgtgtgtgcatgtggttgcgcgtgcgtgtgcatatttgctgtgggtgaatatgtaggcaggtgggagcccctcttccaggaccccaaagatgccccactcggtgcgcacacaatcaggaaaggttgtgtcagggctcagcacaattaacttctgacttctaaatctatttaactgttt

SEQ ID NO: 16670 - DNA, 1128 bp, Artificial sequence
  DNA replication origin
acaaccgggagcccgagcgacagcggccaggggagggaggaggcggtgaggctgaggaaggcagtcgggcccagcttgacgcagcggcggctgcgactgagcaggccaccaccagggcacccgggccagccgcgccagccatccctccgcctcctccttcagctgctcggcgcgcgtgggagtgagtgcgtcgcgagcccgccgggggtctcaggctctgggcgtcctcggcgagcgagcccgggcagagggaggcgcacgagcgcgcgcgacagaaggaggcggggaaaggagggggcgaggcggaggcgagcgaacagagggagggacccgcccgccgcgccccggccgctgggcatgtgtgtccgcaggcgcccgacgctgccgatgtcccggggctgagccgcgcccaggtgtcccggacagtgcgtgcgagcgtgtgtgtccgcgcaggcgagcaccgcgccggccctgagcctcccgctcgctccccacggccgcggtgcatgttcgcctcctgccactgtgtgccgagaggcaggaggaccatgaaaatgatccactttcggagctccagcgtcaaatcgctcagccaggagatgagatgcaccatccggctgctggacgactcggagatctcctgccacatccaggtgcgcgtggaaccgggcgagggcgcggggcacacgccgggagcagggcggggggcctttgcggtgggcatgcgagaacaaggaacccactcccggaggggattgggggactgctagaaagccagatttcgattcctcaggcctctgagggtggggggccttatcctggcatggaggggcatggtgccctgcaagcgccaggcacgcgttatccgcgcccagtctccttcccctcgcgtgcaccctgcgcgcgcgtctcactgcgcccgggctaggggcgcggggcagctgcctccggagggactctggcccctctgggccctactccgccaggagatgggagctccgagggctgagaggggcacctgcatgtcgcccactggtatttcctcccttcttccacgtggagaaggcatgcatcagctgggttcactcatttctgtctcccgcgcccaggctccggagacgccctcag

SEQ ID NO: 16671 - DNA, 1122 bp, Artificial sequence
  DNA replication origin
gggagagggcggggggcgcccgggacaagtgttgcgggcgcggcggaggccggacgcgtcgccgtccctgccggtggactggggtcttggggaccccccacccttccctttgcagatgaagaaaccgaggcccgcggctgccgcgccctctccccgccctccagcctgctcgcggggcgcccatcctgggaccgcatccgagctccgggttcccgctctaagacggggaggctgcggcgaccgcaggctcagggaggaagccgctcctgaacaggcggctgcggggccgcgcaggtggaggcctagcgagcggcgcggggctaggtttcggggcgccttgtcggggccaggcgggagggcgcacggcctctagcgagaggacgcaaaccacggcccaggctctcacagacctttggccatctggacacacagcggcctcctcctatgaggccctggacttctccgattcaattttggaaagtgaatcgttttccccttcctttcatcagcttaacctggaaggagacagcgttaatatggagggtggctcctgagggtttggaaagaaagaagagaattgtggaaaccacagaggtagcccagtgtgctaacctggagactgaggagttaacatttggcttcctgtttaaaccaaagtctaactgtgccctttatcagaaaagacagctgctgtaccattcgaccacaggcagcaaaggacagaacttgatcagctaaaacatcataaccttcaagggcctataggacccttctagaattttctgaatcaggaacggcccatgttgtggcctgtgtagtcaggtgtatattaaagatttactccaggtagatgggttttgctttccaaaattattgtagggttctcagccacaaagataaaaagaaatcttgaactgcaattgaaataaaacatggagcccccaaatccctagctgccatatgatttgaatcagttggagaatgtaaaatcattgccatggtgtgatgtaacaggagtgaagagccctaggtcttggttctgttgctgtctggctgtgtgagcctgggcagttcatgtaccccctctgagtcttgaatcagatgagggaggcctaatcccta

SEQ ID NO: 16672 - DNA, 1232 bp, Artificial sequence
  DNA replication origin
tcccggacggggcgtctggctgggcggggggctgacccccccacctccctcccggacggggcggctggccgagcagaggggctcctcacttcccagtaggggtggccgggcagaggcgcccctcacctcccggacggggtggctggccgggcggggggctgaccccccccacctccctcccggacggggcggctggccgggcggggggctgacccccccacctccctcccggatggggcggctggccgggcggggtgctgacccccccacctccctcccagatggggcggctggccgggcggggggctgagccccccacctccctcccggacggggtggctggcccggcagaggggctcctcacttcccagtaggggcggctgggcagaggcgcccctcacctcccagacggggcggctggccgtgcggggggctgacccccctacctccctcccggacggggcggctgccgggcggagacgctcctcacttcccagacggggtggctgccgggcagaggggctccttacttctcagacggggcggatgctgggcggagggtctcctcacttctcagacggggcggctgggcagagacgctcctcacctcccagacggggtcgcggccgggcagaggcgctcctcacatcccagacggggcggcggggcagaggcgctccccacatctcagacgatgggcggccgggcagaaacgctcctcacttcccagatgggatggctgccgggaagaggcgctcctcacttcctagatgggatggcggccgggcagagacgctcctcactttccagactgggcagccaggcagaggggctcctcacgtcccagacgatgggctgccaggcagagacgctcctcacttcccagacggggtggcggccgggcagaggctgcaatcttggcactttgggaggccaaggcaggcggctgggagatggaggttgtagcgagctgagatcacgccactgcactccagcctgggcaccattgagcactgagtgaaccacactccgtctgcaatcccggcacctcgggaggccgaggctggtggatcactcgcggctaggagctggagaccagcccggccaacacagcgaaaccccgtctccaccaaaaaagtacgaaaaccagtcaggcgtggtggcacacgcctgcaatcgcaggcactcggcaggctgaggcaggagaatcaggcagggaggttgcagtgagc

SEQ ID NO: 16673 - DNA, 916 bp, Artificial sequence
  DNA replication origin
ctgctcggccagccgccccgtccgggagggaggtgggggggtcagccccccgcccagccagacgccccgtccgggagggaggtgggggggtcagcccccggcccggccagccgccccatccaggagggaggtggggggggtcagccccccgcctggccagccgccccgtccgggagggaggtgggggggtccagccccccgcccggccagccgccccgtacgggagggaggtggggtcagccccccgccgggccagccaccccgtccgggaggtgaggggcgcctctgcccggccgcccctactgggaagtgaggagcccctctgcctggtcagccgccccgtccgggagggaggtggggggtcagccccccgcccggccagccgccccgtccgggaggtgaggggcgcctctgcccggccgcccctactgggaagtgaggagcccctctgcccggccaccaccccatctgggaggtgtacccaacagctcattgagaacgggccgggatgacaatggcagttttgtggaatagaagggggggaaaggtggggaaaagattgagaaatcggatggttgccgtgtctgtgtagaaagaagtagacatgggagacttttcattttgttctgtactaagataaattcttctgccttgggatcctgttgatcggtgaccttacccccaaccctgtgctctctgaaacgtgctgtgtccactcagggttaaatggattaagggcggtgcaagatgtgctttgttaaacagatgcttgaaggcagcatgctcgttaagaatcatcaccactccctaatctcaagtacccagggacacaaacactgcggaaggccgcagggtcctctgcctaggaaaaccagaaacctttgttcacttgtttatctgccgaccttccctccac

SEQ ID NO: 16674 - DNA, 2522 bp, Artificial sequence
  DNA replication origin
ccggtcagtggggcccgtcgcctcaggccgagtccccgccacccgaggccggggcgccgaggggagcgctgtcgagccgctgcctacgcctccggggtgccggagcggacacccgcgaggcgggcccgcctccgcgtactcaccgggcctcccgtgccgccggctcggccctcctctccctcctccccccgccgccgcctctcccgcggctccccgggcggccgcactgggcgttgggactggtctgggtcaagtgtcggcagagctgggggcaggctcgcgccgggcgggggtcgcggtcggcccacaggctgggcactaacgggtcccggggcgccggggcggaccgcggaggtgagcgcggctgcaggctgcggtgaggggcggggagagcgcggctgagagcaggcgggcgggcggagggtggagggaagcccgggcggaggaggcggcgtgagagcctcggggcgggggcgggggcgggggcggggcctggcgcgtccgccgagcgcgggggtttgtttattttcgcggttggtagcggcgctggcgctggttagaggttcgccggtgacgtgagcgcccgagttgggggagaggaccagaaccacctgctggagaaggggagctacgggggccgggcagggtccaaacgcctcacgtaggcggcggcgccacggtcttcggggtcacagggaagagaagggctctcctcaagcgggtggaaggagggaggcctcccgagggagtgagactctaggccactcccccgcagcaaggcaggatcacctgcgacgcggagagcggttagagggccctggagtggaaaagggcagtgggacctggtagcttgggttccctgcaacttggggttcgacctccaggcaatgaagtagggatggtcctgcaagtcaagattccagtagcaagagtgcatcagatctctgtaaggaaaataactaacattgctcagttccctgtagagttgcagggcgctttaacgttatctcccttggttctccatcaggtcgtagtggactaattttacaggcgaagttaagtgacttacccaaaacctcacagctaataaacggcagagccggcacccagctgtactggcttccaattctgttagcttaccagcgcatcacattatctccataaatccccatgattcaactaatattagacgccccacaggtaagatgcttcagagttagaggggagttgaagatacctttgccttcaaagaagtaaggaataaaacaaagataaaacagacaataaaagacaaaccatgataggtgccacgtgaaaagtggcagagtactgccgggaatcaaagaaccgtgtatatctgtcttggggataaggaaagaaaggcagcatgaaggagtaggcatttgggattgaccttgaaggagacagggagagttttacagcaagcagggatagcatgagaatatatatgaaggcgaatcagtgaaagttgtgttggggaaagagcaaagactccagggtatgttgagaggtagaaaagacaaaggagtatggggcctaagataccaaatggatgaatttatatttaattcagtattttgagtttttatggttcagaagtttgggggaagaaaaggaaggtttttttttttctttgtgctagtgatttatctgtgaggggaagcagaaatcagaggtggaaaaacggacagatctactgtaggccaggtaaaaatgatgagtctgacctaaagggacagctaggggaatttaaaagagcatagttgagagatgatgtgcatgcagtatctatagaatttggcaactgattgattaattgtgggtaggaagagagaaatcaaagaaagtggaggttttgagtttgtagataattgcaagagagaaaagagacaattacaaaggagagggagctacttcttgagagatcagtttagatttggacattttaagaattcaaagggttgtcaagacagccagagagacatggacactaataagttagaaataaaggttttgtaatatgggaaagaggactgaactagaaaatagactcataaataatcagcctaggagtgatattgctgtgagataaaagaagaaaacaaaggtcagaatcttggaaaacaccctctttagagtctcgctactcaaaacgtggtcagtggcccagcagcactgacatgaggatgttagttagaaactcagaatctcaggctccaccccagacctgctgaaccagcatcttcaacttaacaagaacccgaagagatttgtgtcacatcaaaaagtttgagaagctctgatctaggtgagccaagccagcaaagaaaggggatggagcagaaaatgggaggagaatagggtaacgcagaatcatcaagacaaggtaaattggagtttcacaaaaacagggctggaaggagtgttgctcaacaatatccaaaaccacagaggttgaaaagcacaaggaaagaaggtatgtttgcactttgtgattaggt

SEQ ID NO: 16675 - DNA, 1215 bp, Artificial sequence
  DNA replication origin
ggtcccagcgcgttggtgggacacaactcggatttgcaggcaagcccaggggccggccctttgcggacttcctggggacgcaggactcctgcgcggcgggcttggaggcgtggccaggatgggggcggggccaggacgcggcatccaggagaggacgcggcgggaggcgggcttcgccggttgccaggagaactcgcgacaacaaaagacgcggacggcggctgcgcggtgtggcagagcgaagctgaggagtccagcgctcgccgacaggggcctgggctgtcccgagccggtcagtgctcggcgggcctggcgggcggtgcggggaagtggggcgccctcccttcgcggtgcccgccctccagcccgccgcgcccgccgctcccgcgcccccagccggccgttgggactagtaggctccggcttggggtcggggccgccgcgggtgggtagcggagggtgggcggttggggcgccagctaggcctatgggggcgtccgaggggtctggggtcggggctgggagccggcgagcgactagaggcagagcgccccttccggaggaagttgggtcagccctgaggagcgggtcccggggaacaccgatcgaccggaacgcgggacccggcctttcagagcgcaccctgtgttcgtctcgtgtcgctgcacggcgtgaggtgcgacgcgagggccaccaccaccgagcgctttgttttatcgcaggcgtctttttcccaccgtagaggttgaaacttgggcgcatttcccaccgtagaggttgaaacttgggcgcatttcccaccgtagaggttgaaacttgggcgcatttcctaccgtagaggttgaaccttgggcacattcaagcccgagagctccctccctcggaggcaggtgactataaagagcaaagcgcccagattctttctttgaaacaccttttaagtaacaccttttaagtctccagtgttgaaaatccttgttgtttgcccttctttactcttttgtcgtctttacgcatttggggccttttctgagctccgtatgcgatttactgtccatctactggcaagttttttatgaaaataattaacaaaccacacatttaagacaaccactgctttctgggaaatcaagggtacgggatggcaacggtttttggagacactcattcctgaccagtgacatgacatgagggattcaatatttctcttgcctt

SEQ ID NO: 16676 - DNA, 958 bp, Artificial sequence
  DNA replication origin
ggctcctcacttcccagacggggcggccaggcagaggcgccccccccctcccggacagggcggtggccgggcggaggcgccccccacctccctccccgacggggcggctggccgggcgggggggctgccccccacctccctcccggacggggcggctgccgggctgggggctgacccccacctccctcctggacggggcggctgccgggcggagaccctcctcacttcccagacggggcggctgccgggcggaggggctcctcacttcccaggcggggcggctgctgggcggaggggctcctcacttctcagacggggcggccggccagaaacgctcctcacctcccagacggggtggcggtcgggcagagacactcctcagttcccagacggggtcgcggccggacagaggcgctcctcacatcccagacggggcggcggggcagaggcgctccccacatctcagacgatgggcagccgggcagagacgctcctcacttcttagatgggatggcagccgggaagaggcgctcctcacttcccagactgggcggccgggcagaggggctcctcacatcccagacgatgggcggccaggcagagacgctcctcacttcccatacggggtggcggccgggcagaggctgcaatctcagcactttgagaggccaaggcaggcggctgggaggtggaggttgtagtgagtcgagatcacgctactgcactctagcctgggcaacattgagcactgagtgagcgagcctctgtctgcaatcccggcacctcgggaggcccaggcgggcagatcactcgcggtcaggagctggagaccagcccggccaacacggcgaaaccccatctccaccaaaaaatacaaaaaccagtcaggcgtggcggcgagcgcctgcaatcccaggcacttggcagtctgaggcaggagaatcaggcagggaggttg

SEQ ID NO: 16677 - DNA, 1478 bp, Artificial sequence
  DNA replication origin
gtctcgcgcggtgaggagccgggttgggggagcggctcgtggaggtgagggtcggagcccagtttttccgcttgagggaggcgtcctgggagccgctttggtgtttggccgcttctccgagtgggaacgttgcccggtgtcccctcccccacctccgccatttccctgagcgtgtatccgcagtccgcgttgtggtcctagagacttggggattcgtgaggcatgtgcctctaggatgagctggagctatgtggcactgggaactagggacctcgtggaggaaaggaggccggtgcggggagaaggtcgcgccgccgctctctttgtgtgagccccgcctcaccttgggtctcccggcccggggtcggagctggagcggcggggatggaacggtcagggctgcctcgatggctttgtctcgggcagtggggggaggatgcgggggatgagacctcgggaccgcgtggtgggtgggggagggggtcggcgctcggctccgcctagtagcacgtagtcgccattacgcgggccgccatttcctgtcggatccgggtgaggagaggtgcggtgcttctgctgtcgactttcgctttttcccgtcctgttacccggctgtttttgatctcggtgccgggaggcggggaggggagggcgcgttggcgctcggccagtggagcacatacttagcggatttttgaggcctggggactagtgactgcaggacccgaagggtgaacggcaagcggcaacgttattcttacagataagccctgctgtttttgcttaaactttcttatccaactcttctcccaccacacctcagaaattgcgtgctgggccggaaggatgtcgtttcagttgtcgttaggagagcaataagtcgaccaacggtatgggagaatgggaggcataaatgtgcctcgcttgttggctctttgctgtctagccaaccttctagtagaggccgcttgtcaactcctagtcccgacaagagggaagcttaaaaaggctgtttgtagtcctatcgaccgttttggcacgtagacactttagttttcgtgttacaggcatgattgttgtgttgtactcccttaagcctaatttaaaataatccgctagtgactgttagttttcaagggctccatttgtttcgctgattaataatagactggtattgtggtagtttgggtctggtcctatattagatttttggatttatccctccggtagattgttctggttgttggatgtgttcgcaattgccgttgtatttgtaaactttagagatgtcacataagatcgcttcaagcatgagtcgaaagaaataggaaagcaattggaagttttaatataaaattagttttcccagtgaataagatgcattgtaacttttcataaatgtatgctttgtggatgacatttatcttttcagggttttgggaatgtgccgtataaaacaattcattgctgtggtggga

SEQ ID NO: 16678 - DNA, 1257 bp, Artificial sequence
  DNA replication origin
taacaactgcctagttcacgcgcacagggagggggcggggaaggggcgttttccagccccgaaggagtcctttggggttggaggaggggcgcgagcgcgcggcaaatcgggcgggaagaggtaaaaaaggaactgggagcgcgccgcggcggttcctgtccttacagttgcgctgcccagggaccgatgttgcgcgaggaaaatgcgggacgcccaggtcggtgctcggcccagacttatgcccgtgttttcacagcccacactcgtgcccgaagccccttaccccgccccgggctgtggtctgtgggctgtgggacgagctgcggcgcggtaagtgcgggccgtctgcgtccgctgggccgggcccacgcttcggaaacccgttgtttgtaatggtccggggcgcccgtcagtcaaggccgggcccgggggcgcagctggcggttctcggcctgccttgcgccggggcgggagccggggaaacgcggggcgagcctgggagtactggagaacttctcgccgagagggcacaggcggtttcacagggctctcggttctgagactttcctcttgggtaatgggacctgagatggaagtattttgtagtgtcgtcgctgtagtttattccgataaaatttttaggcaatatgtattgcccttgtctcctaaaatgaatgcgtatcgctgaatacgttgcagacctccacgttccattcaaagcgcctgccttgtggcagtgatgaaaacagacaaaaacccttgccctcaaacgtgctcctgttctagcgggttcagcgcacacttgcattgtattcggttccttacttttaaggctcctgtgccaagctttcatgacttcctttgttaaggcacataaggtcactttcaatcggtgacagccctgggaaatctccagccctggtagtacccgctttccacatccttactcgtcaaccttccagcctccgcccacaatcccaaactcattttgaagcataaaggtgtcataatctgcacataaagcgaaatccaccattggccgaatacatgcatatattttagtgttgatgaatttgtgctgattcattcctgttataatgtttccttcttgggtaatttgcaaaacatatataccagcattcttttaaatggccatgattgcatccacccagcatcttttacttgactgattagaggaaaactcttgttagggcgcactgaggatttcatgacaaacaccagtatttacattctggg

SEQ ID NO: 16679 - DNA, 988 bp, Artificial sequence
  DNA replication origin
caggaacagtgggcaattgcagtagcagtggtgagacaactctttgggaccgaagcagtttgcactggtgttggtagtgagtgtggcagcttcggctgactggtccccatacctgcaggtggcatatgcaggtgggtgccagctgtggtggtagcagcagattgaatggaccggacctcagaccccaggtggagtgctcaggtgccaccagtggtggactgggctgggtgatcccaggcccctagacagtgtggatgggtgatccccaggcccctggatggtatacttgattactgggaggagggaatcgaactcaaaccagactgggtgaacctgccctcagtcccccaggtgatgactgcagggtgctggctgtggtaggcaggggcagggtgatccccaggctgttggaatgctcagttaggggatggcagtggtggtgctgtgggggagggcggggttgtttaccctggaagcagcctatatgctggcagctggggtgggggggtgcaggtgtggactttgctggtactttggccccatagcagcctgtagcagtggttgcaggcagtggaatttgtcttcagggcacatgaaaatgtgtaactgcccctctgctgggggtgggggtggagtcgctgcctgtggctactgccttgacccctggtagcagggcaggacacagtctgctgggtcctgggctctcaaaatggcagggtgttgcagctgctgaggactcaggggtttatggaactcagcgtgagctctctttctggagccatgcctttgcaagggctccaggcagctccctatgttagtctcaggacccattagagccaagaggatctcctgtggctgggattataagcatctgtggcgcgaatgcagacttctgggggtctctcatttactctttccccacattgggagcctctccagactctcagccaatcctggccaaagaagctgcctcactttgtccttcctt

SEQ ID NO: 16680 - DNA, 844 bp, Artificial sequence
  DNA replication origin
gccgccccgtctgggaagtggggggcgcctctgcctggccgctcttcatcttggaggtggggagcgcctctgcccggccgccccgtctgggaggtggggagcgcctctgcccagctgccccgtctgggaggtggggagcacctctgccctgccgctcttcgtctgggaggtggggagtgcctctgccctgccgctcttcgtctgggaggtggggagtgcctctgccctgccgctcttcgtctgggaggtggggagcgcctctgcccggctgccccgtctgggaggtggggagcgcctctgcccagccgccccgtctgggaggtggggagcgcctctgcccggccgcccattgtctgggaagtgaggagcgcctctgcccggccgccccatctgggaagtgaggagcgcctctgcccggccgccccatctgagaagtgaggagcgcctctgccaggccgccctgtctgggaagtgtacccaacagctccgaagagacagcaaccatcgagaatgggccatcatgacgatggcggttttgttgaaaagaaaagggggaaatgtggggaaaagaaagagagatcagattgttactgtgtctgtgtagaaagaagtagacataggagactccattttgttctgtactaagaaaaattcttctgccttgggacgctgttaaactataaccttacccccaaccccctgctctctgaaacatgtgctgtgtcaactcaaggttaaatggattaagggcggtgcaagatgtgctttgttgaacagatgcttgaagacagcatgctcattaagagtcatcaccactccctaatctcaagtacccagggacaca

SEQ ID NO: 16681 - DNA, 1461 bp, Artificial sequence
  DNA replication origin
tgagtgcccagctccggcccaggaatcaacttgccccgcgatggcactgacgccgctggagccaccagtgtgcccactctctcttcgagcctgaggccaagggaggggaggtagggaaagggtccccaagacaggattccatggtacaggccgggcgaaggaccctttaaaggggaatgcggagactgccggcggctttggctccgcgacggggcccccgaatgatgctgcagaatccgccacggccgctgggtgccggtggcgcgggcaggtggcgcggcacgtcccacctggggagtagccgaggccgccccagggggagacagtgagggccgaggcgaccgagggcactatctgcgctgctcacccgggctccggcgcctcacgcccgccggcggcgcctgggtccaggctcctgctaccgccggggactgagcgcgtagagcgcgagcgaagcagccagcgaggctcctgctccaacccaattccgggagccgccgccgccgcctctgctactgctggcgaagtgacgtgagggctgacgcagagcaggggcagaaactccagaaaattagtctgaaatccaaaaacacacacacgctcatacacacacaaacccataacaccctccagacaaaagcaccagggaggggaggggaatctgggggcgagcagggaggagggaggcatcggtgccactggccagaagcagacagcagcagcatgtgggagttcacacacgcgcgcacacacgcacacatcctggccgtgtagacatgcacgcgcgtgcgtgtgtgtgtctgtgtgtgtgtgtgcatttacatccaggtacctctaagatgaaccgttcctccgttcgacgcctcccggtccctaattcacaccacagtctcttctacaatcgcggtagaggctgtctccctttttgaaatggaaaccgtgcttggttcagctctgaaaaatgcgctgattcttattataggaatcctccctcccttctccctccccgcgttctcctttcccaccctgcctaaaagggagggcaagctatcctaaaaataaataaatgttgtaaacaccaaaacgtgttctgcattggtaaccaaggatcaccgcccccattccgggccacctatttggggatcggtggttttggaggggcttcctgttggtgcttttgcagagggaagggagtctccaaacacaattctagctctctaagtgggtctttttcctgccgttttctgccatcacacgcccgggaaatagagacatgtgaggggaagggagcgcgcctgatgcgtattctaaatgctcggtggccaccctggcctgtccgatgtgtggcgccgcgtcattttctctcatcctttaacctgacgggatgtagccattcccagatcgtggattcactccccgcgatgcccacccccacgtagggcatcccaagcccttgctccc

SEQ ID NO: 16682 - DNA, 927 bp, Artificial sequence
  DNA replication origin
cccatcctgagccggtgagcgccctgctgcagtcctcatgtcccggccggccgtccctctgctctccccgggccgcgggagatgcgagcgacggcgcccgggggtaggaggggcgaccccggatccctgcgccccttacctgacgggttgtgtaacgcatgttacacatgtgacgcgtgaggggaacgcactcggtcttgagggaaagccctgacggggtggggctttgactgggtctggaaaacgccttccccagtccccggaccctcggtggatccccgtcccagaccttgcggagggtatcgggcgcggtctctgggcggaggccgccctttctgctcagccctttctctcgggcccgagctcgcggcgccgcggggagtccagccgaggggctgcagggccgggggcgggcgcgcccagccccgctctcccccgccccagtggtagcgggccgctgaatcgcgggcccctgtgcttcgagaattctagcgttcccgactgagcgccagcaaggtgggatttgctgtgacatcggcgatgggcacgtttgcttcctctcgctgggtggtttgagctgaagtgtgtcttctgtttacaacttgtcgccttgagcgtttggtttgaacctgaatcagatcaccctggatgacagtgcagagtttccttagtgtcttccttcctgaattgcgggttctcaattgcaagtgttcaaggactgttgtaacccaaaggcttgctcgactctaccgttgttttaccccttgtgcggtataaacctcttacgagcaccagggcaattggagttggttgggttcctttcttgggcgtttactcattgtagaatggagttttcatgcatcatagtgtaatcgatgtgaatgttgataatttaaagcccatttcccgttttaacatagcttactc

SEQ ID NO: 16683 - DNA, 2588 bp, Artificial sequence
  DNA replication origin
gccctctgcccagcggctccggccagtggggcccgtcgcctcaggccgagtccccgccaccctaggagccgaggggagcgctgtcgagccgctgcttacgcctccggggttccggagcggacacccgcgaggcgggcccgcctccgcgtactcaccgggcctcccgggccgccggctcggccctcctctccctcctccccccgccgccgcctctcccgcggctccccaggcggccgcactgggcgttgggactggtctgggtcaagtgtcggcagagctgggggcaggctcgcgccgggcgggggtcgcggtcggcccacaggctgggcactaacgggtcccggggcgccggggcggactgcggcggtgagcgcggctgcaggccgcggtgaggggcgggaagagcgcagctgcgagcaggcgggcggagggtagcgggaagcccgggcggagggggcggcgtgagagcctcggggcgggggcggggcctggcgcgtccgccgagcgcgggggtttgtttattttcccggttggtagcggcgctggcgctggttagaggttcgccggtgacgtgagcgcccgagttgggggagaggaccagaaccacctgctggagaaagggagctacgggggccgggcagggtccaaacgcctcacgtgggcggcggcgccacggtcttcggggtcacagggaagagaagggctctcctcaagcgggtggaaggagggaggcctcccgagggaatgagactccaggccactcccccgcagcaaggcaggatcacctgcgtcgcggagagcagttagaggtccctggagtggaaaagggcagtgggacctggtagcttgggttccctgcaacttggggttcgacctccaggcaatgaagtagggatggtcctgcaagtcaagattccagtagcaagagtgcatcagatctctgtaaggaaaataactaacattgctcagttccctgtagagttgcagggcgctttgacgttatctcccttggttctccatcaggtcgtagtggactaattttacaggcgaagttaagtgacttacccaaaacctcacagctaataaacggcagagccggcacccagctgtactggcttccagcgcatcccattatctccataaatccccctgattcaactaatattagacgccccacaggtaagatgcttcagagttagaggggagttgaagatacctttgccttcaaagaagtaaggaatgaaacaaagataaaacagacaataaaagacaaaccatgataggtgccacgtgaaaagtggcagagtactgccgggaatcaaagaaccgtgtatatctgtcttggggataaggaaagaaacgcagcatgaaggagtaggcatttgggattgaccttgaaggagacagggagagttttacagcaagaagggatagcatgagaatatatatgaaggcgaatcagtgaaagttgtgttggggaaagagcaaagactccaggtatgttgagaggtagaaaagacaaaggagtatggggcctaagataccaaatggatgaatttatatttaattcagtattttgagtttttatggttcagaagtttgggggaagaaaaggaaggttttttttttctttatgctagtgatttatctgtgaagggaagcagaaatcagaggtggaaaaactgacagatctactgtaggccaggtaaaaggtaatgatgagtctgacctaaagggacagccaggggaatttaaagagcatagttgagagatgatgtgcatgcagaatctatagaatttgctaactgattgattaattgtgggtaggaagagagaaatcaaagaaagtggaggttttgagtttctagataattgcaagagagaaaagagacaattacaaaggaaaggagaaggagctacttcttgagagaagatcagtttagatttagacattttaagaattcaaagggttgtcaagacagccagacggacatggacactaataagttagaaataaaggttttgtaatatgggaaagaggactgagctagaaaatagactcatagataatcagcctaggagtgatattgctgtgagataaaagaagaaaacaaagtcagaatcttggaaaacaccctcttcagagtctcgctgctcaaaacgtggtcagtggcccagcagcactgacatgaggaccttagttggaaactcagaatctcaggctccaccccagacctgctgaaccagcatcttcaacttaacaagaacccgaagagatttgtgccacatcaaaaagtttgagaagctctgatctaggtgagccaagccagcaaagaaagggggtggagcagaaaatgggaggagaatagggtaatgcagaatcatcaagacaaggtaaattggactttcacaaaaacggggctggaaggagtgttgctcaacaatatccaaaaccacagaggttgaaaagcacaaggaaagaaggtatgtttgcactttgtgattaggtagtagggtctttaagaccacattgttctcattgaaagcctgggaagaaagatcccctttctggtcaaggttagtctagg

SEQ ID NO: 16684 - DNA, 1271 bp, Artificial sequence
  DNA replication origin
tgccccctttactcagacacctcctgttaggccccatctctcaacactgttgtactggcaattaaacttcaacttgaattttggtggggacgaaaacacatccaaaccatagcaatgaccaaaggaaggtaaagggaggtctttagcattatcattgtttattattggtaagaagattaacagctacctttctgaaggaatagaactttagagatattaataaagttgtagatacaaaattaataaaagacttctcaattatcagaaggaaaatacagcaaagaatgaatgatcttaaagataacaaagggaaccatgtatttccaatttagtgataacaaaactcagttctgattcttgctcttctttccttctcttcttgaaaaaattcactcctaatgccatgagatgggcctgagcacaatgggcatgtgcgctagagcgagactttggagcctgccttagggatgatgatggtgtccacatgggagataggagtagcctgacataaggtgttgtaaccatgtgggtaggtggagtgtacttgtagcagggtgaggcctagcatgggccatcagagtctgtgtggagtaaggaagtgtccatgtagaatggtagtggaatggggagggcatctgcaaagagataaacctagagcaggagtttggaatagttcaagataccttgagagcatcactgtgaatcggtagcctaactggattcactgcttctaaagtgagtggagaagggtatttccacaggagtgtagctgagcttggggtgcctgagcctaagcaggattgagaaggggaccatgtgggaacaacctggcactgtatgtcaggagcctaagtaggatgaggagggtgtgtctatgggaaggcagtctagtacagggttttggagtataaaggcagggagtagagagaggcatggggtgtgggagtccaggcagggtaggctcatgttaatggagcctggcagagtagggtggtgaaacctgaggtaaattcatggaggtggttgtgtgcagggctgtcagagaccaagccaggtaatgagggcatctgtgcatgtgggtgaccaagtacagggtttcagagcctaagcatgttgaaaaaggtgtcattgtggaaggtttcccaggtatggggtgtcagatcataagtggggggaagaggctgtccaggaggactggatggcatgagatgtcaaagcctaagcaggaagagaaaagtagaaaggtggctccatgtgggaagttgtagcct

SEQ ID NO: 16685 - DNA, 1574 bp, Artificial sequence
  DNA replication origin
gcgcagtggctcacgcctgtaatcccagcactttgggaggccaaggcggccgaatcacttgaggtcagaagtttgagaccagcctggccaacatggtgaaaccccatctctactcccagctacttgggaggctgaggcaggagaactgcttgaacccaggaggtggaggttgcagtgaaccggagatcgcgccattgcaccccagcctgggcaacagagcaaaactctgtctcaaaaaaaaaaaaaaaaagtcaatgagtgagtagatgtggggtgcttagaagagctcctggcataaagtgacttgtcagggcatactggccagttgttacattgagcttgacactcattcttcctacttttcactttgtcgttgttatctggattctgtgtggcttctgtcctcctctactgttgactttcccagcatggtgagactgtgtgtgaaaccctccagttcctaagcttatagactctgtggacaggagaaggaggccagaagttaaagtgcatcgagaggtcttgttagtggaatggccactgcattcccttttcttttttagtcagcctggaatttggagtttgagctctgaggcagggagacctgggctggtgtggagtggagtggtgcagagttgtgcagttgtgagctggtgtggtgtagagtggtgtggtgtggtgtggtttggtttggtgtgtgatgtgtggtgtatggtgttgtgtggagcggtatgtgatgtgtatggtttggtgtggtgtgtgcagtagtgtgtggtgtgtgtggagtggagcagtctgtgatgcggtggggtatgtgatgtgtgtggtgtgtgtggagtggtgtgccgtgtgtggagtggtgtagcatggtgtggtgtgtgttttgtagtgatgtttggtgtggtgtgtgatgtgtgtgtggagtggtgtggtgtgtggtgtgtgtgatgtgtgtgtgtgtagtgtgtgtttggtgtggtttggtgtggagtggtgtgttgtgtggagcagtgtgtagtgtggtatgtgatgtgtgtggtatggagtggtgtggtgtgatgtggtttggtatggaatggtgtgtggtgtggtgtggtttggtgtgaagtgtgtggtgtggactgatgtgtggtttggtgtgtgtggtgtggagtggtacgtggtgtggagttgtggcgtggtgtagtgtggtgtgtggcctgctgtggtttggtgtggtgtgtggtgtggaatggtgtgtggtgtggtctggcgttgtggtgtggagtcatatggcgtggtatgtgtggtgtggagtggtgtgatgtgtgtggtttggtgtggagtggtgggtgtggtgtgtggtttggtgtgaatgtgtggtgtggagtggtgtgtggtttggtgtggtgtgtggtgtggtgtgtgtggtgtggagttgtggcatggtgtagtgtcgtgtagagtggtgtgtggtgtggtctggtggtgtgtggagtcatatggcgtggtgttgtgtggagtggtgtgtgtggtgtggtttggtgtgtcgtggtgtggtttggtgtggagtgctgtgtggtgtggtgcggtgt

SEQ ID NO: 16686 - DNA, 1103 bp, Artificial sequence
  DNA replication origin
ggggacccagatgggcagaaaggcgggtctggacctgcagctatgggacagtgtgcacaagtcaccaagtttaaatggaagggcgtcgggagattaagtgtaactttctacaaagcttcagaaaacaccatctatccaggaaaacacgtaggacacacagacacagttgctacacgcccagaatagctcctgccaacacatccctgtgttgtcacagggaaggtaacatcctcccaccccatccaccttgcagcttggcgggtgtgggaaagcacctcgctgggagagtgcaggatgctcccaggacccgccctggggtcacccgggtgcccagcttggcagaacaaggtccatgaggtgtggtggccatcacagacataagcacagggttgatggcgagggggcctgaacccaagactggctcacaccctcccccagcatctcctgcacagggcacactgcaggtgctttggggagggaggagagaggatggggaggaggggaaggggaggaaggagagagcaaaggatggtgaggagagggagagaaaggaggacagagggaagggaggacgggggaggagggaggaagaggaggagggagaatggagggagaggaggagggaagaaaagaggacagagtaggatggaggaaagggatggaaggaagaggagagagacagggtctggaggggaggagggcaagaggaggatggagggaggaaaaggacaaaggaagggagaggggtggagggacagaaaggaagaggaaggatggagggaggggaggcaggaggaaggaaaaaggaggagaagcaaacggggggggctgcccttgcctctgagaacctgctacactgtctcctttggtagcagcctgcccctgtgcctctaacctacacgtgacttgggtcaaataaaacttccaggaggatccaaacctgaaggacagtgggaaccccagaatgcactttgaggcttctctagcagtggacgagcgcctgtcttcttagtccctgaccctggatctttctgaaggtctcctcatcacccagctgccagggaacctggctgcccctgaagcagctcacactggtctgtccc

SEQ ID NO: 16687 - DNA, 1393 bp, Artificial sequence
  DNA replication origin
ggaccgacgcgaggtctcggcgcgcggggtacgggccctgggcaaaggagggaggaagcgatggaccgcggttcgggcagcctggggccgcgcgccgcccactcacctcttttcgaggctccggccgccactcggggatccggggccccgctacgaggccgcccgggtcgctctcccgccgccgccggcctcgagctccggccggctccgcgccgtgcgcccagcgcctccgcgtccagcgccgccgcgtctccggcctccgcagcggcaaggccccgcccccgagcagcgccggcggcgcgaagggaggaggcggcgccgcgagcgcggagaagcgaggcaggggctgccggggccgcgcggactcccggccccacggtgcgcgcgccccggccggtggccgcccctcggcgggagcaggaacgccagcgtgcgcccagttctcgccgctgggcgttgccccttcccccgggccaccccatcgccccttccgacgcgggagctggcgcctgagcagcgacgcggagcggggaagcggctgtggggaaagggtacctggggggagcccccatcccacgttccgccccgagggaatgttcccgaacagccaaccgcacccagcgccacactcacgttaccttctttataaaagtcgtcgggtcaaaactgcccagagaaggaagcgaacgaaaaacaggtttttagggggcttatactcacaaaattgtcttttttctcccacgaggcattccctgttgaccatcatctcgcctcggttgtcaccgctcaggccttagtgtttggtctgtgacccttccactgctagcaacggaaaaagtgaagattcccggacgccttcgggtgtgatcttatagcccgggcagctgcatttgaaacagcgcctcagatgacgctcaggcgcactgatgtttgagaagccctatgaggccgtacctcccggagagaatgccacaaaactagtgacctacagggaaaccatgctagaaaattctaaagcaatggttcttaactctggcagcacctgccatccattagaattatttggggagcttttagagcatttaggaaccagggtcccacttccagagttcaaagtgaacttgatattttttgtttgttttgagcttcccagataatcctaatacagtatacggccaagattgagaacagttttcctagaatcatgtcttcatgtcttcctagctctggtgtctgggaaaggaaactccttcctctgcgcctctctcaaatcacaataaaaaaacaagtaaatacatgaacacctaaaggaatgctcacagctgaaattgattttaaccagaacaaagagtcaccttaaaaaaggtgatcaagataccctattgctacctga

SEQ ID NO: 16688 - DNA, 1396 bp, Artificial sequence
  DNA replication origin
cggcgggtcggagcgacgccgaggtctgacgtgtccgcgtccctgcggccccactcccggccgccgtgacctccccttgcacggggcggacacgagcaatgtcacgggccccgccgcgcgccgcgagcactcaccagggtgagggctgcccgggtgggctgcagcttcctcttgctcacagcccggacagttgcccggactaaggaagccgacatcttcgccgtcccggcgccccggtgcctcgggccgaaggtcggccgcctcagcttctctccatggacacggcgggcgcattgacgccacaagcttcggcgcacggcgccctcagtcctagccccgccccccgccgccaccattgggtgagttgcatgagtgacgagccgggggcggggcaagccgctcggggcggggttttgccgctcaacgccgggggtctagcagctgggttgcgcacggtctccggcagtggggttaccacgctgcagggcgcagggcccgggaggaatgtcttcaccgccgaggacggagtcggcgtgacgtcggggagcgggcgggagggggcgaggaatgacctcagacctgctgactccggatgcacgtagcttcaccacctgcccccggggcaaggtgcagcgtcaccccctgctttaatactcaccgtgacaaacaccatcataggcggtgacacttaaggacgcataagtcaaccctgcactgggagcttatgctctcaaatgcagagtgatcgttccgatgcccagacatctacatccattttcattcttcttttgtggtccaattaggctgttcttaagagcatggcgttaccgcagagttgtataatcgccaccctccacccttctccccagcgtgctgtactgctggggatgctgaagggtggtgactaatgcagttttcattctggtgctgaactgggaaccaaccctacttgaaaatgtgactgggcagcagtgtgaatagtcacatttatagcgagcaacaattactcgatttaaaacgtgttgtcagaccttgtcctggctgctcaggggcttaattctgccttttgatgcagtattcctgagcaccagacactgcacaggcgcggtacccaggcatacacaggaagccaggtaaagaggggccagggaagaatgagatactggcaggacagggctagcagatgaagagaggaggacatcaagacaggtggcatttgtcattgaagtgctagaagtgaaggaaaaagggcaggaggggtctatgaagcagtcctggggaggacagattcgcagtgtttgaatgtgggaagaactaatcagtgaaacattttttaaagccaagtttatcttcgatctcctgcagtttctgaaaggatagttcaaaattccatcaa

SEQ ID NO: 16689 - DNA, 1282 bp, Artificial sequence
  DNA replication origin
cgagcatgctgccttcaagcatctgtttaacaaagcacatcttgcaccgcccttaatccattcaaccctgagtggatacagcaggtttcagagagcacagggttgggggtaaggtcacagatcaacaggatcccaaggcagaagaatttttcttagtacagaacaaaatgaaaagtctcccatgtctacctctttctacacagacacggcaaccatccgatttctcaatcttttccccacctttccccgctttctattccacaaaaccgccattgtcatcatggcctgttctcaatgagctgttgggtacacctcccagatgggatggtggccgggcagaggggctcctcacttcccagtaggggcggccgggcagaggcgcccctcacctcccagacggggcagctggccgggcgggggactgacccccccacctccctcccggatggggtggctgccgggtggagacgctcctcacttcccagacggggtggctgccgggcggaggggctcctcacttctcagacggggcggctgctgggctgaggggctcctcacttctcagactgggcggttgccaggcagagggtctcctcacttctcagatggggcggccgggcagagacgctcctcacatcccggacggggcggcagagcagaggcgctccccacatctcagacgatgggtggccgggcagagacgctcctcacttcctagatgggatggcggccgggaagaggcgctcctcacttcctagatgggatggtggccgggcagagacgctcctcactttccagactgggcagccaggcagaggggctcctcacatcccagacgatgggcggccaggcacagatgctcctcacttcccagacggggtggcggccgggcagaggctgcaatctcagcactttgggaggccaaggcaggcggctgggaggtggaggttgtagcgggccgagatcacgccactgcactccagcctgggcaccattgagcactgagtgaacgagactccgtctgcaatcccggcacctccggaggccaaggctggcggatcactcgtggttaggagctggagaccagcccggccaacacagcgaaaccccgtctccaccaaaaaaatacgaaaaccagtcaggcgtggcggcgcgcacctgcaatcgcaggcactcggcaggctgaggcaggagaatcaggcagggaggttgcagtgagccgagatggcagcggtacagtccagcttcggctcggcatcagagggagaccggcatcagaggg

SEQ ID NO: 16690 - DNA, 876 bp, Artificial sequence
  DNA replication origin
catctaggaagtgaggagcgcctcttcccggccgccatcccatctaggaagtgaggagcgtctctgcccggccacccatcgtctgagatgtggggagcgcctctgctctgccgccccgtccgggatgtgaggagcgtctctgcccggccgccccatctgagaagtgaggagaccctctgcctggcaaccgcccagtctgagaagtgaggagcccctcagcccagcagccgccccgtctgagaagtgaggagcccctccgcccggcagccaccccgtctgggaagtgaggagcgtctccacccggcagccaccccatccgggagggaggtgggggggtcagtcccccgcccggccagctgccccgtctgggaggtgaggggcgcctctgcccggccgcccctactgggaagtgaggagcccctctgcccggccaccatcccatctgggaggtgtacccaacagctcattgagaacaggccatgatgacaatggcggttttgtggaatagaaagcggggaaaggtggggaaaagattgagaaatcggatggttgccgtgtctgtgtagaaagaggtagacatgggagacttttcattttgttctgtactaagaaaaattcttctgccttgggatcctgttgatctgtgaccttacccccaaccctgtgctctctgaaacctgctgtatccactcagggttgaatggattaagggcggtgcaagatgtgctttgttaaacagatgcttgaaggcagcatgctcgttaagagtcatcaccactccctaatctcaagtacccagggacacaaacactgcagaaggccgcagggtcctctgcctaggaaaaccagagacctttgttcacttgtttatctgct

SEQ ID NO: 16691 - DNA, 1413 bp, Artificial sequence
  DNA replication origin
aacaccaagagcgctacgaggcctcggagcctttactccccctggaagtaaccggggagcacccaggggcaaagccgaggccccaagcgcggggaatgcggctttgcccgaccgctggctccgcgtccctctccgggtgcataagtcttggctcccgcgcctctcccgagcacttagcctcccgagcagagaggggaaccagaggagcgtcgaagccgggagagaaaaggggcgggcgccgctctggtaagaagttcgggcctggcccccaagcgccggcgaaccggctatccggcgagccagtaattagcccgctccgacggttgcgcccggtggccagacccggcgcccgacacctggagcgagtgcgctggggcgccggacaggagaggccaggctggcaaaggcgcgggaggcggggtcggagcgtgggcggggcaccgcggggcggggcgcgtcgctcgtttccggtgtgcgcggcggagcgctagggcgggggcacagtcggctcccaatcgcgcacaatgagacagcgctgagcgccggaagtggggccgaaggaaaacacggagagggagcccggccgggacaggaagaggctggggaccgcggcgaaggtggtgagtgctcttgggcgccttctcccaacgtccctgccagactcgcctccgggctgattctccagttggtttcctggactccagagtagctgtccggcctggccccggaggtacgttggttccatcccccgccggcctcctcgcaccagtttgggtgaccgaggaacccccaggccggcagaggctgagccctcgggttcgagtccgtgttttcactttttgtcagactgcgggcgcagaagacgggatttgggtcaagacattcggctctggccccctggccggccgggggaaccctggaaccccatggagacagcaggtcacttcctgcttcctggtccccacggtggcttcttggccaggagtgcagggacgcctcctctttctccacgtcgggctcaaaagggtggaaactaaggcagatcggtggtggagcggtcagatggggattgaagaggagtgtcattcctcagggaattgctgttcctgacaaaaccaaacttgtttggggttggagaacggggattgaggaggttagatggagttgtcccttgatcggaaacccagcctctttaattacagctgcaccttggtcggaagcccagcccctccgtaacctaagcgctcaaagccggtctgtccagaataggggtggtgaagggacggaaaattggagttgagaaatgtagtactcctttcacgtaaagtttcggtgtataacacttacaagtaattgccaacttaaaaaacaaaagactgtttcggtagtttagtaataatattggcttgggat

SEQ ID NO: 16692 - DNA, 1021 bp, Artificial sequence
  DNA replication origin
gaagaaaataaggcatttaggttttaggtcaggtgtgagttgaagaggttttaagtttttgagaacacaggctaagggagaagaaggaggaatggaaggtggaagcttacccatagtgaaggaggcaagccctgagaaaagagtagagacacggagaaggggtggggggttcttgccctccagaaaagcagagaaggggttggggcacggaaataagaggtcagggtgcagaaataagggattggggcacagagatgaggttggggtgcggaaataagcgattggggggttcttgccccctaggaaagcgggacttgccgctgagggtgaaggagaagggtttgaggggtacttgcccctgccccaggaaaatgggacttgccgctaagggtgaacgagaaggggttgaggggtacttgcccctgccccaggaaagcgggacttgccgctgaggatgaaggagaaggggttgaggggtacttgcccctgccccaggaaagcgggacttgccgctgagggtgaaggagaaggggttgaggggtacttgcccctgccccaggaaagcgggacttgccgctgagggtgaaggagaaggggttgaggggtacttgcccctgccccaggaaagcgggacttgccactgagggtgaaggagaaggggttgaggggtacttgcccctgccccaggaaagcaggacttgccgctgagggtgaaggagaaggggttgagggatagtgaggaaggttggagaagagagtaaaaagaggccgcttaccggatttgaaattggtgagatgtttcctgggctggtcggtctgaggacctgaggtcgtaggtggatcttcctcacggagcaaagagcaggaggacgggggattgatctcccaagggaggtcccccgatccgagtcacggcaccaaatttcatacgcgtccatgtgaagagaccaccaaacaggctttgtgtgagcaacatggctgtttatttcacctgggtgcaggcaggctgagtctgaaaaga

SEQ ID NO: 16693 - DNA, 1605 bp, Artificial sequence
  DNA replication origin
aaggttggagaagagagtaaaaagaggccgcttaccggatttgaaattggtgagatgtttcctgggctggtcggtctgaggacctgaggtcgtaggtggatcttcctcacggagcaaagagcaggaggacgggggattgatctcccaagggaggtcccccgatccgagtcacggcaccaaatttcatacgcgtccatgtgaagagaccaccaaacaggctttgtgtgagcaacatggctgtttatttcacctgggtgcaggcaggctgagtctgaaaagagggtcaacgaagggaaataggggtggggccgttttataggatttgggaaggtaatggaaaattacagtcaaagggggttgttctctggtgggcaggggtggatctcacaaagtacattctcaagggtggggagaattacaaagaaccttcttaagggtgggggagactacaaagtaccttcttaagggtgggggagattacaaagtacattgatcagttagggtggggcaggaacaaatcacaatggtggaatgtcatcagttaaggctgtttttacttcttttgtggatcttcagttacttcaggctatctggatgtatacgtgaaagtcacaggggatgcgatggcctggcctgggctcagaggcctgacagcgatcacctgccagaggataacaccagaaatagaccctgagtgtctggacctcagaggccacaaggctcttgtcccagcactatctgagggtccttgatttcaagtaggctctagcagtctagtggtcagtgatttctagtctttgttcttctccaatccatagttttatgctgatttaaatgaaaagtgattcctttttttctgaccttttttcttcaactcccgtttgttctgccattcttggtaaaacctctctggagacctactacctactggaacatttcatgtgttttcttcagacatttatctcttatgacttgtgaaatagatctcaagggtttaaaaaatatatgtctgacattcatgggaaatccatccgtaactcaaatccaagggcttacttcctggcctaaccacttggggtcgctcgccttcctgagacatgctcctcatccaaatccaccactggcatcctccaggaccctttacaggtccgagaacaaggaacagctcagagggccagctcttcagggccaactgaatgacatttttcattattaggagaacggggtggtagtttcagatatcagggaccctcaaaataggaagggtgcctagagatcatttggttcaatccctttgggaaaaggtggcccagaaaaaagaaatgacctgcccggtcacgttgtgtatcactgacaaggtggggatgggggtactctggggaataattggatgaattatttcagcttaaggttccactcttggagtaaatggagaaatttataactgcgcgataacaccgccctgaccttctctactcagcgtgagaattaattacctgaggccagtcctatggaacattgtgaaggcacgattcaaagacgccagccaaccatctggcacttgaaagaggctaagtatatgcaactcccctcttatcctctctc

SEQ ID NO: 16694 - DNA, 922 bp, Artificial sequence
  DNA replication origin
aaatggatctgcgcacatgccaggatcacttgcagatgtagggttgaaaacatttgtttcacaggactgacactataaataggattctcgatgtggatcagcaggaaggcagcagtttccatgggtggccttgtctctatggcagagatatttcccagaagctcgcaccagtggggctggctctggatccaatgaagctgccgcgtcatcactgtgacatggctcacaactgctggggtgccaagccctttccctcactgctcaaagacacatctggaatcatctccagaaacttctgtgacaggctgggggccctcatccgttggcggcacaccatgagtgtgactgcgcgaatgtgtatagtgtgtgagtatgtgtgtgtatatgtgagtgtgtgtatatgtgggtgtgtatatgtgtatgagtgagtgtgcgtctgtgtatatgcgtgtctgtgtgagagcgtatgactgtaaatgagtgtgtttgtgtgtgtgagtgcctgagtgtaggtctgtgtgtgtgtgactgagtgtgcaggtacatctgtgtatgcgagtgtgtatatgtgtgtgaatgtgtctgtgtgagagaatgtgtgtctgtttatatgggtgtctgtgtgagagagtgtatgactataaatgagtgtacttgtgtgtgtgagtgcctgaacgtatgtctgtgtgtgtgtgactgagtgtgcaggtacatctgtgtatgtgtgtgagcatgtatgtgtgtgtgtctgtgtgagacagtgtgtgactgtgcggaatgtgtttgtgtacatgagtgtgtgtatgggggggagtatgtgagtgtgaatacctgagtgtgtggatgtgtctgggtctgtgtggggagaatatgggtgtgagagtgtgtgactgcgtgactgcatatgtatgtgtgttagcgt

SEQ ID NO: 16695 - DNA, 989 bp, Artificial sequence
  DNA replication origin
gccgaggggagatcgctggagaggctgggaggagggaggagaggggaggggcggggacgaggttgaagggggagagaataagcgcggatggagaggagtaggggtgggaaggaatagagaaaaaaagaggaggggtgggggaggggagagaaaagaaaggggaaaacccccttgctgacacggggcataacttaattttcacggtgccgggacagctgtatcgtgtaatctgccatggcatgccgttaaagcttcaatgactttactgacccagaagggagactcagaccgtggagaggcttttgaaaagaagtggtgatctttcacgatttatgagcttgtcttaaagaaacagactccactcactttaaattaatcaccctttccagggtgcatagaaatgggggtcttggtgccgcgcgctgggaaggccctgtgagatggggcagctttgaccccgggctcggcggcggtggaggtgagggtggcggtggaggtgagggtgctggaggggacggtttttccatttcgtccctttcccagcccgcgcgcccccgcagaggccgggggaagaggaaagagggcccgggctgcaggactgccacttgcggaggaaggggcatcgtccccttagggaggcccggggaggtcagagcagggatagctggcagggggtgggagagagcctgtgtgtggtggggaagggccgcattcacgttcctgcacttgcattcattgtgcaagaggaaaaaagaaaccaggagaaatataaggcatttcacaccctgatgaaatgcgagacctcccgtgtgattaaaccgctgaaaggaaaagtggggtgttaccagacccgtgtgatcctccctcattttccatatttctgagaacaaaaaggtgaaaacctcaccctaatgtgcagatactgattgcttaaatttcgacagatgcacatttcccccaaaaggaacgtttcctagaacagacaaacc

SEQ ID NO: 16696 - DNA, 891 bp, Artificial sequence
  DNA replication origin
tcaccttcccctcccgcaaagagaaaagagcagcagccacagctacactagtgattaactttggaaggaaattaaggcttgaccgctgctgctgacctgacgggagagtcacctccaagcagactgggctggcccaacaacagggagtgagcagcagcaggtggaagcactcagacagggcgctgctggcatcaggtcgggaggggttcgactcagggctaggacacgaggaggaaggaggaggagaaggggataagcagaagagaaggaggcaaaagatgtgtgtgtgtgtgtgttggggggtgggtggagaacaaaagacaccattttgccagctcttctctgaaaggcaatcatctccacttactgtctcaatagcccaggctcaaagcacagcagcctgtgggccaacttctgcctgttctgggatgtgcacttcccggcaggaaggtgaaagggccgaggggagatcgctggagaggctgggaggagggaggagaggggaggggcggggacgaggttgaagggggagagaataagcgcggatggagaggagtaggggtgggaaggaatagagaaaaaaagaggaggggtgggggaggggagagaaaagaaaggggaaaacccccttgctgacacggggcataacttaattttcacggtgccgggacagctgtatcgtgtaatctgccatggcatgccgttaaagcttcaatgactttactgacccagaagggagactcagaccgtggagaggcttttgaaaagaagtggtgatctttcacgatttatgagcttgtcttaaagaaacagactccactcactttaaattaatcaccctttccagggtgcatagaaatgggggtcttggtgccgcgcgctgggaaggcc

SEQ ID NO: 16697 - DNA, 1041 bp, Artificial sequence
  DNA replication origin
acgaatgccgcaccgtcattgaggacatgctggctatgcccaaggcggcgctgctcaacgactgcgtgtgcgacggcctcgagcggcccatctgcgagtcggtcaaggagaacatggcccgcctgtgcttcggcgccgagctgggcaacggccccggcagcagcggctcggacgggggcctggacgactactacgatgaggactacgatgacgagcagcgcaccgggggcgcgggtggtgagcagccgctggacgacgacgacggcgtcccgcacccaccgcgcccgggcagcggcgctgctgcatcgggcggccgcggggacctgccctatgggcctgggcgcaggagcagcggcggcggcggccgcttggcgccccggggcgcctggaccccactcgcctccatcttgctgctgctgcttgggccgctcttttagccctcgcgccccccgccgttggctgcgggagagcccgcgtcccactcccgtgctcgcctcgaccccgcgccgggcacctgtggcttgggacagatagaagggatggttggggatacttcccaaaactttttccaagtcaacttggtgtagccggttccccggccacgactctgggcacttcccctgaagctcctctccggagcttgacttcttggacctcctcccccgccccaattccaagctccagaaactcccaactcgtctgccgtccagaaagctagctgcagtgttcaggacgtccgggaggaagcaagcatgtgggggacagaacagtagtcctggactcgaaagggaaggtgctgaccagtggggccttagcaatttgaagggttgggaaggaggaattatatttgcaaaggggctgtctattagcatatttcctttgagggggcaaaaaaaagtgccagtatcgacttttacagattgtggccagtgaggatattataatcctatgtaaacagaaaagtcccacttaccgattcattctttcactgtttgtatctgcgcccagaattctcagtgacgtgggggtgagggtgggtgg

SEQ ID NO: 16698 - DNA, 1264 bp, Artificial sequence
  DNA replication origin
ggtcccgctctcccacccgagagccctccgctcggcccccggtggtggcgggagaggctcactgtcgccccgggggggtgcgggccgcggggccgtggcggggctgcaggaccgcgcggcgcggcgggtgcattttgctccgcgcctgcagatccgttgtgcggccggctgtccccgtgccggctgctcgcgctgcggccgcggcggctccttcctcctgggctcagtgcctcgccgccgccaccgccgccgcggtctctcgcatcgcgccgcttcctggcccggcgtccgcgcgctgcccgccttcccgcggcccggccgccccgcgtcccctccccctccgcccgcggcaaccccggcctccgcagagctccggggagctctttccgggaagcgcggggagaacaagaaagtcggcgctgccggagagcggctccctggcttcactcggcggcagcttctcgggtgaccaagagcccggggagcggatccgctgagcccggctgcagactcgttagcagcgaggctttaaatacaaaagtgggccgggagcccccgcgtggtgccgcggtgccccctcattatgcatgcatggaaaagcaaacaaacaaaaacattagcaacgctcctccggctcgccgagccccggccccgcgcgctccgagcctgcccgctttctcctttctccactctctttcgccctttgctcggccccctttcccggcttttcgagatgctattggtcctgcctgttgttgttgaaagtttttttttttttttttacgagccgctggagtggggttgcggagtgggggagggcgggagggtggtgggcagctcacattcaggcattcagggcttgaaaggaacggcttagggagcctgacggaggcccggagctcctcctactcttaaggaggctcggatatgcagccccagctcgcgcacagaaccagcgggcagggcttaggggcagctgtttgcatccggctcagccacgggccttttttgtttgttttttttttctttttttttttttttgtagttttattaattctcgctggcccccatctgtgctttcgactggattcagaactcagtttatcttccaggctccctgtctttgggtcttgatcaccacagaggggaaggggagaatccagagataaaatgtgagactgaaactgttttaaagaagcatacaagaaagaagcacacactttattagggagatgttgatgagatgcttacaacccgcccgcca

SEQ ID NO: 16699 - DNA, 1058 bp, Artificial sequence
  DNA replication origin
accttgactatgcctttagccccagccacctttttaagagtaaattgctgggcaggagggggagggctagtcacggaacgaaactgtaagctggaccaggtgtgaggaggggaggtgataaaaagattatagggtggaggagcagaggctgaggaagtattgggacctagctcggcctggcgaggagcagcctggggaggaagggagaggtcagatgggtctatagaaaaggaagattagaaagactcagtgacgcttggggttggtactgaggggacaggcgggagggaaagaaggaagatttggggcgagttgcactgggcacagagactaggaagggactgatgtgtaaaagaatgactggacgtcaggcacctcagaccgtttgtctattttatgacaaggattatttagatcttgcaggatggaaaaattcaaagtgccattttctggctatttggaactactgtcgagtttgcattggggtcaagcggcattgcagaagaaaataaggcatttaggttttaggtcaggtgtgagttgaagaggttttaagtttttgagaacacaggccaagggagtaggaggaggaatggagggtggaaagttcccatagtgaaggaagcaagcctagagaagagagagtggagaaactgagggaaggggtttgggggtttttactttccagaaaagtgggaaaaggttggggcgcagagaagaggtcggggcgtggaaataagggatggggcgcagaaataagaggccggggcacggaaataagggattggggcgcagagatacgaggttggggcatggaaataagggattggggcgcagagatatgaggttggggtacttgcccctctagaaaagtgggacttgctgctaagagtgaaggagaaggggttgaggggtacttgcccctctcccagaaaagcagagaaggggtagagacaaggaaagaaggggttggggtacttgccctgtccccggaaaagcagagaaggggtagagacaaggagagaagggcttggggtacttgccctgtccccggaaaa

SEQ ID NO: 16700 - DNA, 810 bp, Artificial sequence
  DNA replication origin
cggcaactcgcagcggcagggtctggggccggcgcctgggagggatctgcgccccccactcactccctagctgtgttcccgccgccgccccggctagtctccggcgctggcgcctatggtcggcctccgacagcgctccggagggaccgggggagctcccaggcgcccgggtgagtagccaggcgcggctccccggtccccccgacccccggcgccagcttttgctttcccagccagggcgcggtggggtttgtccgggcagtgcctcgagcaactgggaaggccaaggcggagggaaacttggcttcggggagaagtgcgatcgcagccgggaggcttccccagccccgcgggccgggtgagaacaggtggcgccggcccgaccaggcgctttgtgtcggggcgcgaggatctggagcgaactgctgcgcctcggtgggccgctcccttccctcccttgctcccccgggcggccgcacgccgggtcggccgggtaacggagagggagtcgccaggaatgtggctctggggactgcctcgctcggggaaggggagagggtggccacggtgttaggagaggcgcgggagccgagaggtggcgcgggggtgccaccgttgccgcaggctggagagagattgctcccagtgaggcgcgtaccgtctgggcgagggcttcattcttccgcggcgtccctggaggtgggaaagctgggtgggcatgtgtgcagagaaaggggaggcggggaggccagtcacttccggagccggttctgatcccaacagaccgcccagcgtttggggacgccgacc

SEQ ID NO: 16701 - DNA, 1045 bp, Artificial sequence
  DNA replication origin
cccccgggcggccgcacgccgggtcggccgggtaacggagagggagtcgccaggaatgtggctctggggactgcctcgctcggggaaggggagagggtggccacggtgttaggagaggcgcgggagccgagaggtggcgcgggggtgccaccgttgccgcaggctggagagagattgctcccagtgaggcgcgtaccgtctgggcgagggcttcattcttccgcggcgtccctggaggtgggaaagctgggtgggcatgtgtgcagagaaaggggaggcggggaggccagtcacttccggagccggttctgatcccaacagaccgcccagcgtttggggacgccgacctcggggtgccgtggtgcccggccccacgcgcgcgcggggctgaggggtcgggggcgtccctggccgcccagctttaacaaagggtgctcctctccaccccgcgaggaggggcagctccggagacccggtcttcagcgagcggggtcttagcgccggggaggtctacttccttttggggttgccattttactattattattgccttttttttttcttcaaaaggactggagactgatgcatgagggggctacggaggcgcaggagcggtggtgatggtctgggaagcggagctgaagtgccctgggctttggtgaggcgtgacagtttatcatgaccgtgttcaggcaggaaaacgtggatgattactacgacaccggcgaggaacttggcaggtaaagggggtaccagaagcgtaccctcctggattgtggaaatgcataacgatggggccattgggtggtaaacaaatgcagtttgaatcaggcgtctccctcgccctttctggagatgcgcaaatcatagagaaaagagttactaacccagcggtaaaccgcctgatccaagggcctgggggtggaggagaggcagcagttcagggctagattatgatgcacagtatattgatccagtcccctggacaaaatcagatttaattgtccgtgctaactcttgtcagcccttgcccttctgtgacaac

SEQ ID NO: 16702 - DNA, 1220 bp, Artificial sequence
  DNA replication origin
atatttttagttgtcacaacatgggggaagagtgctactggaatctagtaggtagaagccagagatgctgctaaacattctacaatgtttaggacagcctgaaggaagagtgattcagcccaaaatgtcacttgtgccaagattgagaactgctgatttggaaggggggagaaagggaggaaggaaggagagaggaagggagggaaggagaaaaaggagggagggagggagggaggaaggaaggaaagaaggaaggaaggagagagggagggagggagagagagagggaggaaggaaggaaggaaggagagagggagggacagggagagagagggaggaaggaaggaaggagagatggagggagggagaaaaggagggagagagagagggagggagggagggaggaaggaaggaaggaaggaaggggagacggagggagggagagagggagagagggagggaggggggaaggaaggaaggaaggaaggagagagggagggagggagagacagagggaggaaggaagggaaagagagagaggaaggaagggagggagggagcatattaatgtcatctaccaaccagcacagtgttaggtatttaaaaattcttatctcatttatctccccataaaccatctgagatattattaaccccattttatggttaagaaatttgtagctgagacccataaagaaatgtgcccaaatcccagtgatgagacaagatgctgtggggaccgcaggcacctgggattgcaaagtggaggtacctgcagggtggcgcctgggagctggcctggcagctctgccaaccttctcctctggtcttgaaaatctcttcttacccctaaggtatctgcaaagaaggaggccgttggatcgcaaagaaggggactgttggatgggcaaaagggcaaatctgaattcaagaggctgaattcaatggatggagcctgtcatcactacgagccactgaggattggtttgtcctcaaatcttctttggttccatccgcccctcctccctcaaggcactcacatctcgcctccatcccaaaagcccggagacagagcagatgtgcgccccaagctggcttcctgtcctctctcgccagcatgtgctgatggactcagccacagggagtggggccccactcagcacagcaggcaggaagctggggactggaggggtgggagagggagatgagaaacgccacag

SEQ ID NO: 16703 - DNA, 2651 bp, Artificial sequence
  DNA replication origin
gcttcgcaaaggaacagatggggtttcaactggggcaagcattgacagggaaacctatttgtgtatccccagtgaaaagatgatctgaaagaatgtgcacagtcatttaaacatctttagatagtgttggggaaaatatggattttttgttaacctacagaattataagggctcatctacttagcactcggtcaacaaacactccatgtcctgcctggactatggtgccattcattttttccttccttccttcatactttcatctagcaggtatttactgagtgcgtattatgcacagggctatggatacagcagtgaataaaaccaacaaaagtccctattttcatgggatccagaatctagtggggagagccaacaagaaacaaataggtgagtaaaatacagtaggtcaggtggtgataggtgctatgaagaaaaatggggcaggggagatgaggggcagtcctgggggtgggggagggataggatttaaaatagggtggtccagaaaggcctccctgagaaggtgaagctcgagtcaaaacctgcagaaggtgagagaccaaatcacatggatacctggggaagagccactcaggcccaagaatagcaagtgcaaaggcccccgggcggtggatggccagcacttttgaagaacatcaaggaagctcatggggctgatgtggagggagacgggaggaggcggaacaggagatgggggtcagggaggcaatgtcaggggcagatccttggggaagcccccatttgaagggctctgattcccatgagaagttgctagagcatctgagcaaggaggatgagatctcacttacgtctgaccaggcggctgcgtggggaccaggctgtggacaggtaagggtggaagcagggagcccacttaggaggcagcaatgaattcccagtgattcctgcccaagggctcactcctgctaggagaaatccggatacgattccaatagagcaaggaaggcgaagggactaccagcccacaggggcaaatcacacacaccggagaggctggaacagaggaggtttcctgggctggaggtgaatgttgatggatgaggaggagtgggtgccacggagtcttccccgaatgttatgggctgtgtgcccacatgcccgtagcgggcattccaagtctctctctgaaggcagagcgccatcaggtaccctcagggcagaagtgggcagagagatgtgtgcctgtgtgtgctgatgctgtgggcacactatgcgcagggggtgaagggggaaaggggagctccagggtgaaagaacagcaggtgacaactccatgatgggggagccggcaggggcttcccaggacccagccacaactgaaggggagaagaggggaaggggaggctgggcagaggctgcagagttcacatcctgaaggcagaggagccccaggtggaggtgaaagtggagcccactgagtggctggcatttctagaaagataaacgtggggctgggatggactggtcccaaggggcaggaggctacagtgcaggggtgggtgaagagtccgactggtctggaggagactaaggttaagggtgacgcccttaaccaggtgggggctggagaggcgggtgcttcgtggtcatggagaagtgggaggagacttagtaggctgccggctagatgcaaataggtgaggagagagtaagaagggtttccatgatcctgggcagagtgacagacagatgcggaagccctttgcagaggctgaacactggggaggaggaagcacagaactggagggagggaccctggtgtgggggggccgagggcctctgaaggtgctgtgtgaggctggcactcaggggcaagcagggaccagagacctgagcatgggcctcagtgttggacagctgcaagtctgggggccagagagggccagggggatggagagggagaagatggaccagcaggaagcagaggcctagggagaagcaggacgcggggactttctcagcccaggcaggattgtcagggcgtgccaagggtgcccagtcctggggatatccagtgaaagaggcttaggggcagcagctggggcttgggtggaaagataacaaggaagcaaaaggaagagctggcttcaaatcagggaggggctcacagtgggcgggagcggaggcaacagctgggccaggttcatggggcctttggggtggctgggaaagttctattcttgacctgcgtggaattcaaaggtgtttgtcttatggaaacccactaagctttatattggtttatgtgcttttttctatctatgctttcttttatagtaagacagtttagaaggaaagctgtcaggaggtgagtggggactctgctgagggttacgtggaacggaaggcaagacagtggagggtgcaggagtaggggaggcaaggacaaagtggggacaggacgtgcagacttgttcaggtccccctggctgaggactcagcggagagggaaggtggcagcagggggcgctggtggtcaagggtggttctgaaggagaggaggatggaattgcttctggagggtaggaggaaggcgtaggtgctgggccttccaggaagaccagaggcccctccctaggccttgactcagcttgaaacctggggag

SEQ ID NO: 16704 - DNA, 1014 bp, Artificial sequence
  DNA replication origin
cctctgcccggccagccgccctgtccgggagggaggtgggggggtcagcccccctcccggccagccaccccgtctgggaggtgaggggtgcctctgcccagccgcccctactgggaagtgaggagcccctctgcccggacagccgccctgtctgggagggaggtgggggggtcagccccccgcccggccagccgccccgtccgggaggtgaggggtgcctctgcccagccgcccctactgggaagtgaggagcccctctgcccggccagcctccccgtccgggagggaggtgggggggtcagccccccgcccggccagccgccccgtccgggaggtgaggggtgcctctgcccagccgcccctactgggaagtgaggagcccctctgcccggccagccgccccgtccgggagggaggtgggggggtcagtcccccgcccggccagccgccccgtccgggaggtgaggggcgcctctgcccggccacccctactgggaggtgaggagcccctctgccgggccaccaccccgtctgggaggtgtgcccagcagctcattgagaacgggccatgatgacaatggcggttttgtggaatagaaggcggggaaaggtggggaaaagattgagaaatcggatggttgccgtgtctgtgtagaaagaagtagacatgggagacttttcattttgttctgtactaagaaaaattcttctgccttgggatcctgttcatctgtgaccttacccccaaccctgtgctctctgaaacatgtgctgtgtccactcagggttaaatggattaagggcggtgcaagatgtgctttgttaaacagatgcttgaaggcagcatgctccttaagagtcatcaccactccctaatctcaagtacccagggacacaaacactgcggaaggccgcagggtcctctgcctaggaaaaccagagacctttgttcacttgtttatctgctgaccttccctccactattgtcctatgaccctgccaaatccccctgtg

SEQ ID NO: 16705 - DNA, 1257 bp, Artificial sequence
  DNA replication origin
gggcagaggcacccctcacctcccggacggggcgactggccaggcggggggctgaccccccccacctccctcccggacggggaggctggccggacagaggggctcctcacttcccagtaggggcggctgggcagaggcgcccctcacctcccggacggggcggctggccgggcggggggctgacccccccacctccctcccagacagggcggctgtccgggcagaggggctcctcacttcccagtaggggcggccgggcagaggggctcctcacttcccagtaggggcggccgggcagaggcacccctcacctcccagacggggtggctggccgggcggggggctgaccccccacctccctcccggacaggcggctggcagggcggggggctggcccccccacctccctcccggacggggcagctggcctggcgggggctgacccccacctccctcccggacggggtggctgccgggcggagacgctcctcacttcccagacggggtggctgccgggtggagggtctcctcacttcccagatggggcggccgggcagagacgctcctcacctcccagacggggtcgcagctgggcagaggcgctcctcacatcccagacggggcggcggggcagaggtgctccccacatctcagacgatgggcggccgggcagagacgctcctcacttcctagatgggatggcggccgggaagaggcgctcctcacttcctagatgggatggcggccgggcagagacgctcctcactttccagactgggcagccaggcagaggggctcctcacgtcccagacgatgggtggccaggcagagacgctcctcacttcccagacggggtggtggccgggcagaggctgcactcccggcactttgggaggccaaggcaggcggctgggaggtggaggttgtagcgagccgagatcacgccaccgcactccagcctggacaccattgagcactgagtgaaccagactccgtctgcaatcccggcacctcgggaggccgaggctggcggatcactcgcggttaggagctggagaccagcccggccaacacagcaaaaccccaccaaaaaaatacgaaaaccagtcaggcgtggcggcgcgcgcctgcactcgcaggcactcggcaggctgaggcaggagaatcaggcagggaggttgcagtgagccgagatggcagcagtacagtccagcttcggctcggcatcagagagagaccgtggaaagagagggagag

SEQ ID NO: 16706 - DNA, 1325 bp, Artificial sequence
  DNA replication origin
ctgcctgtctgcccccatggggccagccaggctctacccctccaggcgctgccttgaccagcctggcacacaggcagcccctggctgggcactggcctgaggcttggctcaccacaggaggtgaagagaagagtcctgtgccttctgcatgtgggtcctgtcctcaccagaacaacctcaggcctgcaatgatgtctgtcggagcaaagtggagcctccttcctcccaggctccagtggtcagtggctgagctgggccatcatgggagggatggtgaggctcacctgccaagatgcagctggccacgtcatcccatccacccacaaacatctctagagtccctggtgatggctgtgctgggcacagccccagctcacatagaccactctcctgacacagcttcctcctgatgctgcctcctgagcagggctcagcccatgcaccagcacagccccaccttcctcccagccccagggtccaggctgctgggggtgccgaaagggtggtgctgcaaatggagatgagaagggatgggcacgagggccacactctcagaagcatcttaggggcctctccattcccctcaaacgcagagcctcagatcgggtccatgtctgctgcagttacctcaggcgatgacagctatggggtgtgtgtgtctctgtgtgtatgtctctctgagtgtgtgtctgtgtgtatgtgtgtgtctttgtaagaccggagaagaagcagagaagggagaaagacagagaggagggagacagagatctggaaagagggagaaccagaggaagggatcagaaggggaaggaggaggagagagggaagaaaggagagggatggggagaggaggagggggtggacacagttagggagagaggcagaaagaagagaaacagagagggagtgggagaaacagaggtgagagagagaaagggatcagaaggagaaggagacggaacctccctgtagctttctccaccgtctctcagaaatgttcctggggctgcctctgctgaagagggtgctgtgagctggtggaaggagtgagggtgatgggtggcaggggcgaggtggggggaggtgagacagaaggagctgagaatcagaatgttctagaatagcagcttcagcagtgtgcctagaatagggcccagagcatggcaggcactctgtgaagatctgttggtcatcaatgaatgaatgagtgaaggatggatgaatgaatttggtagggagcagaatgcttccatctacatagaccttggtgaaaattcactcctggcagctgggcatggacatggtgctgcctgcttccaacgcct

SEQ ID NO: 16707 - DNA, 1299 bp, Artificial sequence
  DNA replication origin
gctcctactcctgccatatgaaatatctcattgtcgcttggtcttctggtatagttaggagggccctgatcagtgtgggcctcgtcagtggacctagtcagttgggacttggtcagtgaggcctatttattgggggcgtggtcagcaggggtctgcttagagagggtctcattagggggatctagtagtggggtcttggtgagtggggacctagtggcagccacttgtttggtgtctggtcagtgtaaaactaggctgcaggactttgtcagtggagacctggtcagctggggcttagtggtggccttgtcagcatgagctgggtcactggtgaccaggtcaaggggtgctattcagtggaggcctggtcacatgggacctagtcagcagggcctggtggccatgtcctcatcagtgaggcccttgtcagtggggccctgatcagggcagcctggtcagtggaacctaatcagtgggggcctgttcagagagagcgtggtcagtggtggcttttgtagcactggtctgtgggtgacctggtcagcagggatctgagcagtgggtgcccattcagtggggcctactcactagggtcatagtcagaagtatctggtcaccttgggcctgcttaataggggcctggtcagtggcagtctgttccccggaggcttagtcagtaggacctcatctgtggggccaggcaatggggtcatgatcggtggaacctgatcaatgaggccttgtcagtaaggacctggtcagtgaggccctggtgtgtaaggtcgtggtcagtcagtagggtcctggtcactgtgggcctggcagcagggcctggttagtggggcatggtcatggggttctaatcagtgagggtgtggtcagggaggacctgatgtgcgggatctggtcagcagggacctggtgcgggggctgctgagcactgctgggagatgccaggtgcaatgcacgttatcacaggccctatggacagctcagatgggccagtggtgcccaaaagcccagtcaaaagtggacaaagcaggtgtttggatggacctgggagatcttgctcagagattttgacaggacaaaggcaaaggaagggccagagtagccggtgagatggtcacagtctatgggctgcacgggatggaggaagccagggaacaggcagggtgggcagctggggtgcagggagaggcaggtacatgctgggaggtcagatcctgtcagtgctgtgggggcgtcaggtggggtggtctccagttgcaccctcagtgcactgggcaggtctcagcc

SEQ ID NO: 16708 - DNA, 1636 bp, Artificial sequence
  DNA replication origin
acatttgtataaatgctggaatgatataagatttggaggggctgtagagaaggcatcattgtattttgcaatgtgagaaggacatgagatttgggagccagggacagaataataaagttaaaggtggggcctggtggagggtgatttaattatggtggagagtgggggttggaaggtgggggtagggagaatgaggggattatggtgggggtgaggggtgaaaagtggtggtcgggggtggatccttcacaaatgattaaacaccacctccttattgctgtgcttatgatagtgagttttcttcatgattttggagctgtgagattgaatggatactggcctcctgggttttggacttgcattgggcctgtggtcctatttgtgtttttttcctgggaaatttcttccctttcgattgagaaagcttatccagtgcctttaccatcattgtaccctgaaagaaaagaacatccttttaaattcagggactcataggcaaaagggactgtagacttgtctcagatgagatgttgaactttttacttttgagttaatgctggaatgagttaagacatttggaaggaaacttttgaaaaggcatgaatgtattttgctctgtgagaaggacatgagattctggggtatcagggtcagaataatatggtttggctgtgtttatttacaaaactcatgtgaattgtacttcttaatgttggaggtgggacctggtgggaggtgatttaatcatggcaagagggggttggggttggaaggaaaaggggtgggtagggtggagagtaggttggcagtagggtggtgggagggtggggggtagtaggaagagggagtagtctgctgtagaggcagaggtttgtggaaaacctctactaggacagtgaacctgtggctttgcaggcttcagcccccatggctgctcccatgggctgggctggtgtggagtgcctgtagcctttccatactgagggtgcgagctgttggtgggcttatgaatctggggtctggaggatggtggcctcctgtgtgggggctccaagcccatattttccttctgcactgccatagtggaagtttcccaagaggctctgcctctgcaggaggcttctgcctggcaacagtgggtggtggtatgggcggtggttccttcaccaatggttaatcttcttgatgctgatctcctgatagtgggttctcttgagatctggttgtataacaggatgtagcacctccttcctctctctgtcttgctcctactcctgccatatgaaatatctcattgtcgcttggtcttctggtatagttaggagggccctgatcagtgtgggcctcgtcagtggacctagtcagttgggacttggtcagtgaggcctatttattgggggcgtggtcagcaggggtctgcttagagagggtctcattagggggatctagtagtggggtcttggtgagtggggacctagtggcagccacttgtttggtgtctggtcagtgtaaaactaggctgcaggactttgtcagtggagacctggtcagctggggcttagtggtggccttgtcagcatgagctgggtcactggtgaccaggtcaaggggtgctattcagtggaggcctggtcac

SEQ ID NO: 16709 - DNA, 1049 bp, Artificial sequence
  DNA replication origin
ggggtgctacgggggctacactgccagcggtgttggcgagctgaggaggtggcaaaggcagcgacagcaatggcctccttctgccttctggtggcttccaagtaagggatcgttctcctcttggcagactccagactctagaaggagatcttctcctgcttgagctagattgcaccgcagggcccccacacccactgtggtttcctgtctcgccctcatgctctgtgttgcagagaccacctgggactactgggcagggagtaggcaccacgggggaagtgggggacagggcactgtgggtggaggcgtcaggaatgggaaccagcccttgggtggggagggctggctgggtctgagtttctcctactcaggctccccgaggaaggcagccctggcgggcccagtaattcctggccgggtggacctggccaggggctggtttcagtgaaggcactcactcccaccccaggccccagttcctggccagctcttgacagaaggagaggctggactttggaaggtgggtgtgagtgccttcaatgaaactgatccctgctacccagtcaccagtgtgacaaggtgaggctctaacggttccactccctgaatcctgttttgggcttttcgggcttgcctgcccagctgctccaagccaggctgaaggaggagaaggaggagttgcctgtggtatggtttagcctgcagatgacgtggttctgcagcttgcctcatgtggttggtggtggcgatggagactgcagctcgatcagagcggtaggaggacacccacgggggccaggtggtaggagcctggtagggtgggctggtacattgagggcgacggtggttgtattggcatcggcgctagtggtggtagcagtaggaagtctgggggccgggaagggggagtaggagcactgcaggacccatcccgttctggggtggggaggaacctgtgggtgctgtaacgaaggcctcggtggcagtggtggtggtacacctagggtcttactctacttgattgtagtttgtctgtggttcacatcact

SEQ ID NO: 16710 - DNA, 1520 bp, Artificial sequence
  DNA replication origin
caaccaaccacagcatgaaaataaagtccaatcaaagtaggcctagaggttttttctctcatccaatcagaacgtgtagtccaggaaccgcttttgcataacttcagtagataaagcatgctgaggtcatgtcaggtcatttcaagctcttctgtgtcgagctaaggagctgctctgtgcccggcttacagaactggaaggggtagccaccttccgcctgatggaggctggagaacggatggaacctggatccctggagcctgggacactacctcgctgcggttggtggtggccacagaccagtaggagggcggctggcagcgggagcttcttctgccgggctggaggattaggagaaggaagagggaacgccacatgctggaggctggagcctgtgccaccgtggctcacctcgctgtggttggtggcagctcgccttgctgtggttggtggtgacgtcggagactgcagctcggccacagtggtagaaatgtgttggggtaggtgagtgttccggggctgccctgtacgtctctgggggtaagggttgggtgtcctattggggctcactgctagaggctacactgcctgtggtagtggtctggttgggggcactctccggggttgcattgctggtggtggggcaggttgactggctatctggggctatgctgcccgcggtggcaggagtggtggcgggaggcaggttgtgtacactaacgtgtactgctggtggctggggaagggttaggggcgctatcttctgctgcacttcccgcagcagggggtgggttgggtggagttacccagggctacaatgctggcagtggggggtggtttaggggcgttgttgggtgctgtactgcctgtgactggggggtgcgccatcaggagctgaactgctgtggtggagtggggggaggcgggtttgggacgctatccagtgcagcaacacctgtggctgggtcagattgtgggcactatcggatggtacactccctgcggtgtggggggagtgctttgggggggagtattggggttacattgcctgaaactgtagggtgtgttggatgtgctatctgggggctacactgctagtagcagggggcagattaggggtgctacgggggctacactgccagcggtgttggcgagctgaggaggtggcaaaggcagcgacagcaatggcctccttctgccttctggtggcttccaagtaagggatcgttctcctcttggcagactccagactctagaaggagatcttctcctgcttgagctagattgcaccgcagggcccccacacccactgtggtttcctgtctcgccctcatgctctgtgttgcagagaccacctgggactactgggcagggagtaggcaccacgggggaagtgggggacagggcactgtgggtggaggcgtcaggaatgggaaccagcccttgggtggggagggctggctgggtctgagtttctcctactcaggctccccgaggaaggcagccctggcgggcccagt

SEQ ID NO: 16711 - DNA, 1365 bp, Artificial sequence
  DNA replication origin
attttcatgctgtggttggttgttaagacttgctctcatccaatcagaacatgatcatgaagtccaatcagagtaagcctggaggtttttttctcatccaatcaatacatgcagtccaggatcctccgtgggcataacggcagtatataaatgatgctgaaaagaaatctggtcttttcaggttcccgtactgacgtgtcgaggtggtcgcatcccggcgtagaggactaggaatcgggagtcactggccatatgctggaggctggagacgcgggagcgtggcttgcgtcgctgcggttgttggcagcgatggagatggcgcggctggagaggtagaagaaggaaaacagttttgggatagttgtaggggggtaaagagggtagttaatgccaaagggaaaaaaaggatagcttagcaggagaaggggttgcaaaaagatggcggcgaaaagatggtggggaaaaaagtttttgggtacatggaggcggaaaaacagggtggggagcgggagggagggaaggttttgcagaaagccggtgggtaaaaagtgtttcgatagatggaggggggagagagtgacgaggaggaggaaagagggtggggagagggagcagggattagagggttgggaaaacgacgggaaaatagtttggggtagatacaggacaaaaaagaggatggcaagcaggattggggaaagaagagcacgagtggtaaaggggggagactttgaaaagatggtggggaaagttttggggggtggatggaggggggaaagaggaagatgagcagcagtggggagaaggctttgtgaaaagatgggggaaatgtttttgggtagatggagaagggaaagagaaatggcaaggaggaacggggggaaagacgatgaagaacacagtttttgggtggatgaagggggaaaagacggtggtgagcagcaggagtggggagaaggttttgggaaaaggcgggggaaaatgtttttgcttagatgaaggagcaaaagagtgtgatgcgggaggggtaaaaagagggtggccagggataagaggaaaagacggtgggaagaaacagtggggaaagggtttgggtcggtggatggggaaaagggtgttgagcaggagagtagagaaggctttgtgaaatgatggtggagaaaaatggtgaagaagtttgggggcagatggaggaagaaaaagggtggccagagggagggggtcaaaggtggtcgggaaaagaaggtgtagggaaataatggtgggggacaaaggttttgggtagatttttttaataagatcgtttgtattttttcttttgagtagtttgaattctttatatattttgtggatgaatccgttgtc

SEQ ID NO: 16712 - DNA, 840 bp, Artificial sequence
  DNA replication origin
ggggctgcagccctcagcttcgggagggcccagatcaggccactgtgacctttggctttgccagcaacaacaggtcccagcatcccagcccttccctcccctggcgcctcccaaaagcacaagaatgcaaaccgagactggcccaccactgaggcaggggtggactcccgcctgagtgtgccaacagggcaggtggaccgtcctggtgacttcctggtgggcctggccaaccaagaggccaggtggcctcaccgggcctgacctggctgcctggcagcccggagaggaaggaggaaggacgctcatggtgcaatagctctggccacgctggcaggagctacgtgatgatcctggagatggcttgcagggaggggaagtcgtcgtcccgggcagcatgcagcgcctggtggctgctggcgtcgccatgcgtgagcacctgctggcaggtggggcacacacggcagtccaggcccgcctgctgggtggtggcctgccacgcactcttcttgttgttcttggacttggtgctgagagtcttctcgcggttgccgaagtccgtgtgtgcagacaggatctcctgctgcttggccgtgtcgggcagcaggaccagcagctcattaaagaccttctggaaattctcccccagcagaccccggcaactcttgtaatactgggctgcggagatcaggccctgtctgaactcccctgagtggctcttgaactcgctgaagcgggcctcgtcgctctgcaggaagtccctgatggactggatgagctgaagtttcctctcccagaagttctcggggactaggtaggcccgtggggcaggcggcggcctgg

SEQ ID NO: 16713 - DNA, 1303 bp, Artificial sequence
  DNA replication origin
cgcggttgccgaagtccgtgtgtgcagacaggatctcctgctgcttggccgtgtcgggcagcaggaccagcagctcattaaagaccttctggaaattctcccccagcagaccccggcaactcttgtaatactgggctgcggagatcaggccctgtctgaactcccctgagtggctcttgaactcgctgaagcgggcctcgtcgctctgcaggaagtccctgatggactggatgagctgaagtttcctctcccagaagttctcggggactaggtaggcccgtggggcaggcggcggcctgggtgcttttgtggtggtggtggtggtggtggtggtggtggtggtggtggtggtggtggtggcggcggcggggttgggggctaggcagaaggccagcgaagccggggggcggcttgctgattgggggcaccaggcctggtgggggagggggaggcgtgcccttcaggagcaccacagcgctgaagcctgggggcgcggcatccggggtgggcgggggccgccgagcgctgggaagtcctcctgtggcgtgggaagaagagcattttttcactaaatacgatgttagttgcaggtttttggtcagtatactttatcaggttgaggaagtttcttcaattcatagtttccagagagtttttaatcaggaattaatattggattttgtaaaatgctttttctgcatctgcggacatggtcatagaatttttcatctttattctgttaatatggcacattatattaattgattttcaaaattaaagcaaccttgtatttctgggataaaccccatttagtcatcatgtatgaactgttttatatattgtgtgattcatttagctacatttttattaactggataattcttgtgtctgtgtgcatggtggggattatcatctgcagttttattttcctgtaatatctattttcctgtaatatctgctctgaaaccaaaaaaggtttcagagtaatgctggctgctgtggtctgaatgtttgtgtttcccccaaaattcactgcattgaaacctaaccaccaatgcaatagtattaagaggtgggaactttaggagatgattatttcgttagggtggagacctcataaatgggattagcgctctcataaaagaggcacaagggagttcattcacctcttccaccttgtgaggacacatagcaggtgccatcgatgaggaattgacagatgctgaatctgctggcacattgatcttggtctatccttactccaaaagtgtgagcaataactttcttgtgtttatagattact

SEQ ID NO: 16714 - DNA, 911 bp, Artificial sequence
  DNA replication origin
gagggaaagttatggactaaactgtgtcctcacaaaatttgtatgttgaagctctaacccctagtgtgactgcatttggaggcagaacctataaggaggtaataaaggttaagtgaggtcatagggtgggctctgatccaatagaactgtgtccttataggaacaggaagaagcgctagggatatctcccctcccccgctccctctgtctccctctctccctcccctctcccctctcccatgagaggacacagccagaaggagaccgtctgcaagccaaggagagaagcctcaccagccatggaatctataggcaccttgatgttggacttccagcctccagagctgtgagaaatgcgtttctgttgtttaagttgccccgtctggattctgttacggcaccctgagctaagacagggactaactggtgcaaaggccctgggggggacctggaggcaggtttgaagggtggggggaggggaggccatgatcaccgggtggagggtgggagtaggtggacatgggttagaaaggtcgtgggccaggcggcctcctaggcagcttcctgatgttggccttttcatagatggaagccaaccgtcgggagcacacacaccacattacaaggatcccagccaggcccaggaggggaagcaaggacaccctagaggcagagagaactggcaggtagcaccgtgggggatgagagcgggttggaatctagatccttcttgagaaaggaggacgctggagggtgggatgtgaaaactgggggagagaagactcagaggtcactggaggtctgaacaagtgcaaggatagaggtgccccgagctgacacgggtggcctgggcaggggccggtgtgttgggggagatcctggggtctggaggccaggggtcgggccatgag

SEQ ID NO: 16715 - DNA, 1645 bp, Artificial sequence
  DNA replication origin
agtgtcccaggctccagggatccaggttccatccgttctccagcctccatcaggcggaaggtggctcccccttccagttctgtaagccgggcacagagcagctcctcagctcgacacagaagagcttgaaatgatctgacatgacctcagcatgctttatctactgaggttatgcaaaagcggttcctggactacatgttctgattggacgagagaaaaacctctaggcctactttgattggactttattttcatgctgtggttggttgttaagacttgctctcatccaatcagaacatgatcatgaagtccaatcagagtaagcctggaggtttttttctcatccaatcaaaacatgcagtccaggatcctccgtgggcataacggcagtatataaatgatgctgaaaagaaatctggtcttttcaggttcccgtactgacgtgtcgaggtggtcgcatcccggcgtagaggactaggaatcgggagtcactggccgtatgctggaggctggagacgcgggagcgtggcttgcctcgctgcggttgttggcagcgatggagatggcgcggctggagaggtagaagaaggaaaacagttttgggatagttggaggggggtaaagagggtagttaatgccaaggggaaaaaaaggatagcaggagaaggggttgcaaaaagatggcggcgaaaagatggtggggaaaaaagtttttgggtacatggaggcagaaaaacagggtggggagcgggagggagggaaggttttgcagaaagccggtgggtaaaaagtgtttcgatagatggaggggggagagagtgacgaggaggaggaaagagggtggggagagggagcagggattagagggttgggaaaacgacgggaaaatagtttggggtagatacaggacaaaaaagaggatggcaagcaggattggggaaagaagagcacgagtggtaaaggggggagactttgaaaagatggtggggaaagttttggggggtggatggaggggggaaagaggaagatgagcagcagtggggagaaggctttgtgaaaagatgggggaaatgtttttgggtagatggagaagggaaagagaaatggcaaggaggaacggggggaaagacgatgaagaacacagtttttgggtggatgaagggggaaaagacggtggtgagcagcaggagtggggagaaggttttgggaaaaggcgggggaaaatgtttttgcttagatgaaggagcaaaagagtgtgatgcgggaagggtaaaaagagggtggccagggataagaggaaaagacggtgggaagaaacagtggggaaagggtttgggtcggtggatggggaaaagggtgttgagcaggagagtagagaaggctttgcgaaatgatggtggagaaaaatggtgaagaagtttgggggcagatggaggaagaaaaagggtggccagagggagggggtcaaaggtggtcgggaaaagaaggtgtagggaaatgatggtgggggacaaaggttttgggtagatttttttaataagatcgtttgtattttttcttttgagtagtttgaattctttatatattttgtggatgaacccattgtctgatgcatagtttgcaaatacttgcttccattctctgg

SEQ ID NO: 16716 - DNA, 1481 bp, Artificial sequence
  DNA replication origin
aggtttttctctcgtccaatcagaacatgtagtccaggaaccgcttttgcataacctcagtagataaagcatgctgaggtcatgtcagatcatttcaagctcttctgtgtcgagctgaggagctgctctgtgcccggcttacagaactggaagggggagccaccttccgcctgatggaggctggagaacggatggaacctggatccctggagcctgggacactacctcgctgcggttggtggtggccacagaccagtaggagggcggctggcagcgggagcttcttctgccgggctggaggactaggagaagggagagggaacgccacatgctggaggctggagcctgtgccaccgtggctcacctcgatgtggttggtggcagctcgccttgctgtggttggtggtgacgtcggagactgcagctcggccacagtggtagaaatgtgttggggtaggtgagtgttccggggctgccctgtacgtctctgggggcaagggttgggtgtcctattggggctcactgctagaggctacactgcctgtggtagtggtctggttgggggcactctccggggttgcattgctggtggtggggcaggttgactggctatctggggctatgctgcccgcggtggcaggagtggtggcgggaggcaggttgtgtacactaacgtgtactgctggtggctggggaagggttaggggtgctatcttctgctgcacttcccgcagcagggggtgggttgggtggcgttacccagggctacaatgctggcagtggggggtggtttaggggcgttgttgggtgctgtactgcctgtgactggggggtgcgccatcaggagctgaactgctggggtggagtggggggaggcgggtttgggatgctatccagtgcagcaacacctgtggctgggtcagattgtgggcactatcggatggtacactccctgcggtgtggggggagtgctttgggggggagtattggggttacattgcctgaaactgtagggtgtgttggatgtgctatctgggggctacactgctagtggcagggggcagattaggggtgctacgggggctacactgccagcggtgctggcgagctgaggaggtggcaaaggcagcaacagtaatggcctccttcttccttctggtggcttccaagtaagggatcgttctcttcttgccggactccagactctagaaggagatcttctcctgcttgagctagattgcaccgcagggcccccacacccactgtgatttcccgtcccgccctcatgctctgtgttgcagagaccacctgggactactgggcagggagtagtaggcaccacgggggaagtgggggacagggcactgtgggtggaggcgtcaggaatgggaaccagcccttgggtggggagggctggctgggtctgagtttctcctactcaggctccccgaggaaggcagccctggtgggcccagtaattc

SEQ ID NO: 16717 - DNA, 987 bp, Artificial sequence
  DNA replication origin
gtcttgctcctactcctgccatatgaaatatctcattgtcgcttggtcttctggtatagttaggagggccctgatcagtgtgggcctcgtcagtggacctagtcagttgggacttggtcagtgaggcctgtttattgggggcatggtcagcaggggtctgcttagagagggtctcattagggggatctagtagtgggcgtctcggtgagtggggacctagtggcagccacttgtttggtgtctggtcagtgtaaaactaggctgcaggactttgtcagtggagacctggtcagctggggcttagtggtggccttgtcagcatgagctgggtcactggtgaccaggtcaatgggtgctattcagtggaggcctggtcacatgggacctagtcagcaggacctggtggccatgtcctcatcagtgaggcccttgtcagtggggccctgatcagggcagcctggtcagtggaacctaatcagtgggggcctgttcagagagagcgtggtcagtggtggcttttgtagcactggtctgtgggtgacctggtcagcagggatctgagcagtgggtgcccattgagtggggcctactcactagggtcatagtcagaagtatctggtcaccttgggcctgcttaataggggcctggtcagtggcagcctgttccccggaggcttagtcagtagaacctcatctgtggggccaggcaatggggtcatgatcggtggaacctgatcaatgaggccttgtcagtgaggacctggtcagtgaggccctggtgtgtaaggtcgtggtcagtcagtagggtcctggtcactgtgggcctggcagcagggcctggttagtggggcatggtcatggggttctaatcagtgagggtgtggtcagggaggacctgatgtgcgggatctggtcagcagggacctggtgcgggggctgctgagcactgctgggagatgccaggtgcaatgcacgttatcacaggcc

SEQ ID NO: 16718 - DNA, 1215 bp, Artificial sequence
  DNA replication origin
tagtagagacagggtttcaccgtgttagccaggatggtctcgatctcctgacctcctgatctgcctgcctcatcctcccaaagtgctgggattacaggtgtgagccaccgcgcccagcccggatgtttctttaataagggggtggaatgctcattaggtattctggaaaaggaggggatttcagggactcctccccgctcctgttattgcctcctttctcccttatttgggtttacctggaagagtcatggacatgtcaccctgaccagggttttggtcattttctctgccttattttgggctttctctaccctgtggattatttgcctagcccctgcttcaggggttctttgggtttgtccatactcctgcaactacccgtgctattcctatctccttagaggaggagagattgacgatatcgaagagaaattactctgctctgtggatctcattggcacaggttcctgctgaagtctgaggggaaaaggggattctggaaggcggagaaatggatggatcctgtggagaggccagacagcttccgagcagctgagaaagaaggaagtcagccaaggtctgaaagaagagagatagatgctggagagcatttaaatgaaaagaatttaaccagaagtatcggcagaagtaaaagaaaagccatgttgggggaacctaaagattagccacaaaggttaagggaaaggagggaggagaggagacgttactgcagcctgtgaaggccagagcaagaggcgtggccgtggaaagtgcaggaagtatggctatggagagtgctggggtgtggctgtggtgggtgcaggaagcgtggctgtggagcgggtgtggttatggacggagtgtggctgtggagggggtgtgactgtggagggtgctgagtgtggctgtggtgggtgctgggggtgtggctgtggtaggggaggtgtggctattggatagtcacagctgtggtgggtgcagggggcaaggctgtggtgtaggaagtgtagtgtggctattgaatggggtgtatagcagtggtgaatacaggaggcatggccttggtgggtacaggaggcatggctataacacaggaggcatggccttggtgggtgcaggaagcatagctgtgatgcaagaagcatggccttggtgagtgctggagtatgttctctaaagacactgtgaacactattagcccatactgaaccactg

SEQ ID NO: 16719 - DNA, 970 bp, Artificial sequence
  DNA replication origin
ccggaagggaggtgggggggtcatccctctgcccggccagctgcccgtccgggagggaggtgggggggtcagccccccgcccggccagccgccccgtccgggaggtgaggggcgcctctgcccggccgcccctactgggaagtgaggagcccctctgcccggccagccgccccgtccgggaagtatgtggggggggtcagccccgggcccggccagccgccccatccgggaggtgaggggcgcctctgcccggccgcccctactgggaagagaggagcccctctgcccggccagccgccccgtccgggagggaggcggggaggtcagccccccgcccggccagccgccccgtccgggagggaggcgggggggtcagccccccgcccggccagccgccccgtccgggaggtgaggggcgcctctgcccggccgcccctactgggaagtgaggagcccctctgcccggccaccaccccgtctgggaggtgtactcaacagctcattgagaacgggccatgatgacaatggcggttttgtggaatagaaaggggggaaaggtggggaaaagattgagaaatcggatggttgccatgtctgtgtagaaagaggtagacatgggagacttttcattttgttctgtactaagaaaaattcttctgccttgggatcctgttgatctgtgaccttacccccaaccctgtgctctctgaaacatgtgctatgtccactcagggttgaatggattaagggtggtgcaagatgtgctttgttaaacggatgcttgaaggcagcatgctcgttaagagtcatcaccactccctaatctcaagtacccagggacacaaacactgcggaaggctgcagggtcctctgcctaggaaaaccagagacctttgttcacttatctgctgaccttccctccactattgtcctgtgaccctgccaaatccccctctgcgagaaacaccca

SEQ ID NO: 16720 - DNA, 1309 bp, Artificial sequence
  DNA replication origin
tcccggacggggcggctggccgggcggggggctgacccccccgcctccctcccggacggggcggctggccgggcggggggctgacctccccgcctccctcccggacggggcggctggccgggcagaggggctcctctcttcccagtaggggcggccgggcagaggcgcccctcacctcccggatggggcggctggccgggcccggggctgaccccccccacatacttcccggacggggcggctggccgggcagaggggctcctcacttcccagtaggggcggccgggcagaggcgcccctcacctcccggacggggcggctggccgggcggggggctgacccccccacctccctcccggacgggcagctggccgggcagagggatgacccccccacctcccttccggatggggcggctggccgggcggggggctgacccccacctccctcccagacggggtggctgccaggcggagaggctcctcacttcccagacggagtggctgccgggcggaggggctcctcacttctcagagggtgtggctgccgggcagaggggctcctcacttctcagacggggcggttgccaggcagagggtctcctcacttctcagacggggcggccgggcagagacgctcctcacatcccagacggggcggcagggcagaggcgctccccacatctcagacgatgggtggcctggcagagacgctcctcacttcctagatgggatggcggccgggcagagacgctcctcactttccagactgggcagccaggcagagaggctcctcacatcccagacgatgggcggccaggcagagacgctcctcacttcccagacggggtggcggccgggcagaggctgcaatctcggcactttgcggggccaaggcaggcagctgggaagtggaggttgtagcgagccgagatcacgccactgcactccagcctgggcaccattgagcactgagtgaacgcgactccgtctgccatcccggcaccttgggaggccgaggctggcggatcactcgcggttaggagctggagaccagcccggccaacacagcgaaaccccgtctccaccaaaaaaatacgaaaaccagtcaggcgtggcggcgcgcgcctgcaatcgcaggcactcggcaggctgaggcaggagaatcaggcagggaggttgcagtgagccgagatggcagcagtacagtccagctttggctcggcatcagggggagaccgtggaaagagagggagagggagaccgtggggagagggagaccgtggggagagggagagggagagggagag

SEQ ID NO: 16721 - DNA, 1411 bp, Artificial sequence
  DNA replication origin
ggcagggggcgctatgcgggcgccgcccgctggacaatgctccgccgggccccgcgcgggccgcgctcacctgcgcccccgggcagaccgccgcaccgctggcccgcccgcagcccgcactccctcacgacccacgcccgccctgcgcgggcctcacctgctgaccgccgaggctgcagtccacaggcccacgggttccgccgtcgctcgttcgcgctcccgccggccccagcctgagccagacggcgcctccccgcccccgctccctcgccgcggacgccgcccgccccccaacagtcagggcgcacgcgcactgcgcccgccgaactgcgacggccgcgccgccccggcgcctggcgccgacggccgactgcgcaggcgcagtggggcggggcggggccggcgagggcggggcctggcccctctcacctggctggcggcagggcggggctcgagcccgggactgccaggtgcgcgccgggaatgggcggcggcaggcgcgcggggcacaggttcctgagggggcgcagcttttcctggaaggcaggcagcctgagaagggcttcgtttttgcgcagtaggacgttgaagaaaggacaagccccctttgtcctggacgtaagccgcaagtcgtcctgagtggtgcacaccgcgaagactgaggaaactggatcacagggctgggccgtgagccttgaacctcggagaacgtcgcattactgctccagcgcgccggttcagggccgcgggacgcgagccctttaaaaggatggatttgcttcctgtgactccctggaagagacgtcttcaccaccgcactgcgtagaggccggcgtcgtcgccggctcaccccgcttgctgcctccccgcacaaagcccagcccaggtagctcaggttagctggagccccggagcctcacctacaagtacctggcctgtcctaggttgtgtggggacgggatgtggcttctgcaagcccagaaacctgtttccactcccccaccacaaatggaactcacccagctctactcgcaaggttaggagccaaaaattcccatgatcgcacgcgaattcatttgacttccgtttcagttaagatgccttttcagcattttgttgcttgtttgcagaagggagagaggtaggatcaagaatagtttttactcctgcagagtcgagtgcgagacttggaggctgagtccaggcgctctcccctccccgccagtcccgtgtcctggagcaggtcactgacctggttcctcgagtgcgacagcgcagcctcatcgtaataaaccgcctcccaaagcgttgtcagatcaaattccagaacatgttactggaaagcaccttgaacactctaaactgcagcacagttattagttagcaatactctttggggtttcactggcac

SEQ ID NO: 16722 - DNA, 900 bp, Artificial sequence
  DNA replication origin
tttgttcgccggcccctactcctccgtgcccccatccccgccgccccccgccaacatggccgccaccctctcgtccccagttccccggccgccgccggccccttagcgcgcgctttgtttggagccgggcggggaggccggcgggcagggggcggcggcgctgcgcagtcgggcgcggggagggggcgctgcgccagaatgcaggcggggagggggaacgttgcataatcccgggccggcgacgggggcggggcggggggaggggcgggaccccggcgcgacgggtcgggtcaccccggggacgcgggcctgccctggggccacccctcccaggcccgggggatggccgcggaccttgtaagttgcaggctccgcggttcgcggcgccggaacgcccaccggccagtcctcgcgcccgcgcagcccctttcctgatgcgccgtctcttcgccgccctccgtgggggcgcggcgaacgggttgcgtgctctggagagagacaggcacttttcctctccatcgtgagtgaccttgggtgtattcgtcaaggaatgtgttgaaacgaattgtgcgatgcgggaactgcgcagcgcctcgggtttggctttctcgagcattttattgcattgattgtgcgttctcgattttacagaggttcgttttgagtaatggcttcagtaatgtcatcgtatacgcatttcaaagtttgtttatggaattgtttttacatttattctctttttacttataatttttgaatcagattttgtgttttggagagattttccgtacgtggtggaagtgttttcactcatggtaaatatggattgtttggcaattttatcacgttaatcacaaaacaataccaggaacatttaaatgtcttaaaggatttcactct

SEQ ID NO: 16723 - DNA, 2122 bp, Artificial sequence
  DNA replication origin
catttattaatctttaatatcacctgcatgggggcattgcaggaaactaggtgaaaaccccccaaaccagtgagctttgagagcttctaaaattggggaactggaagctggtgtaggccacttaggggagagtaactgatttttaggaaagatgcataagtctttatgagtttgtgacaaagtttgtctaggtgtggtgtggacttctgctgtgataagagtccatcctcccgggagggaatttacgacaatcagtttcttttggaggttccgtctttagacaggtaaggggagaacgtctctctgcatttgctatttttcaagtgcctctcgctcaaaataatcaatataccaaagcggcatattttaggatggcatattttggtttcattcactgtctttaagtttttgatattttgttcattataaactttttttgcattcattttgactttttaagatattgtattaaaacattatttaccttgactactgagtttttttgtcgcgcccttaaattttgcccctatgcgagtgcctcgctcgcttgcctccttctagcccgggtctggcagggagttgaaattatttttctcactgctgaattcccagggcctacaacagtgctcgccaaaaaattaatactcttggttcttcaaataaaacattctgtaaggactgctcccaatttcttcctgaacttcacgaaccctcccagccaggccacaggatgtcaggggcaaacaccctgaaccaacggagctcaggttccctaccaccccgcccaagcccgctccaagcccaattacccttccccttcctcgtcgtcccatcctccctgatgcctcttccagggtgctgggccgcgcggcaagagctccaaggcaagattcaaatgccctggggagacggctgcgggacacctgcggcggggcccggcagggagcgcgagactggaagagaggccaggagggaaggagagcgacgcggggttttgggggaggggctgcgtggggcgctgaaggggagcgcgaggagtgggaggaagtgaaggaggaggaagagcacggtgtgggggaagcgcaggaggcaataggtggggcgggacggagggcagggcgctgcgtcgggagaaagtgtagaagcgctggggagagtgcccacgacgggagagcccaggggcgcgagggcgcgggagtgtgggcggggcgcagtggggatgggggcgggggcgcgggatgtggtagggggcgtagtggggagagagtgcaggagtgtgggcagggcgcagtgtggggagggtgcgggagtgtgagcggggcgcagtggagggagtgcaggatgtgggctggacaaccagtgggagagggcgcgggaggtgggcggggcgcagtcgggatgggggcgggggcgcgggatgtcggcgggccgcagtgagggggagggcgcgggagtgtgggcggggcgcagtgggggagggagcgggagtgtgcgcggggcgcagtgaggggaaactgtggaatgtgggcgaggcgcagttggagaagagtgcggggatgtgggcggggcgcagtgaggggaaactgtggaatgtgggcgaggcgcagttggaggagagtgcggggatgtgggcggggtgcggtgggggagggtgcggagatgtgggcggggcgcagtgggtggagagtgtagggatgtgggcccagcgcagtgggggacagtgtggggatgcgggcgaggcgcagtgggggcgggggcggggatgtgggcggggcgcagtgggtggagagtgcgggatgtgggcggggcgcagtgggtggagagtgcggaatgtgggcggggcgcagttggggagcttgcggggaatgtgggcggggcgcagtggtgggagggcgcaggagtgtgggcggggcgcagttgggggagggtgcagagacctgagggcttgaggttgcctggctggccccgctcccagaggcgggtgccgcgctgtcgcccaggtatctggggtctctggtgtctgagtgtctcattgtcggcgcgaacacaattgctccagccacaggcgaggcctggccaaggtgtgggcgcatctggggcaggtcttgagaggtccagcgcc

SEQ ID NO: 16724 - DNA, 1334 bp, Artificial sequence
  DNA replication origin
catgctgccttcaagcatctgtttaacaaagcacatcttgcaccgcccttaatccatttaaccctgagtggacacagcacatgtttcagagagcacagggttgggggtaaggtcacagatcaacaggatcccaaggcagaggaatttttcttagtgcagaacaaaatgaaaagtctcccatgtctacttctttctacacagacacggcaaccatccgatttctcaatcttttccccacctttcctgcctttctattccacaaagccgccattgtcatcctggcccgttctcaatgagctgttgggcacacctcccagacggggtggtggccgggcagaggggctcctcacttcccagtaggggcggccgggcagaggcgcccctcacctcccggacggggcggctggccgggcgggggggctgaccccccacctccctcccagatggggcggctggccgggcggggggttgaccccccccccacctccctcccggacggggtggctgccgggcggagatgctcctcacttcccagatggggtggctgccgggcggagaggctcctcacttctcagacggggtggttgccaggcagagggtctcctcacttctcagacggggcggccaggcagagacgctcctcacctcccagacggggtctcggccaggcagaggcgctcctcacatcccagatggggcggcggggcagaggcgctccccacatctcagacgatgggcggccaggcagagacgctcctcacttcctagatgtgatggcggctgggaagaggcgctcctcacttcctagatgggatggcggccgggcggagacgctcctcactttccagactgggcagccaggcagaggggctcctcacatcccagacgatgggcggccaggcagagacactcctcacttcccagacggggtggcggccgggcagaggctgcaatctcggcactttgggaggccaaggcaggcggctgggaggtgtaggttgtagtgagccgagatcacgccactgcactccagcctgggcaccattgagcactgagtgaacgagactccgtctgcaatcccggcacctcgggaggctgaggttggcgggatcactcacggttaggggctggagaccggcccggccaacacagcgaaaccccgtctccaccaaaaccagtcaggcgtggcggcgcgtgcctgcaatggcaggcactcggcaggctgaggcaggagaatcaggcagggaggttgcagtgagccgaaatggcagcagtacagtccagcttcggctccgcatgagagggagaccgtggggagagggagacagagggag

SEQ ID NO: 16725 - DNA, 896 bp, Artificial sequence
  DNA replication origin
ccagccgccatcacatctaggaagtgaggagcgtctctgcctggccgcccatcgtctgagatgtggggagcgcctctgccccgccgccccatctgggatgtgaggagcgcctctgcctggccgagaccccgtctgggaggtgaggagcgtctctgcctggccgccccgtctgagaagtgaggagaccctctgcctggcaaccaccccgtctgagaagtgaggagcctctccgcccggcagccaccccatctgggaagtgaggagcatctccgcccggcagccaccccgtccgggagggaggtggggggggggtcaaccccccgcccggccagccgccccatctgggagggaggtggggggtcagcccccccgcccggccagccgccccgtccgggaggtgaggggcgcctctgcccggccgcccctactgggaagtgaggagcccctctgcccggccaccaccccgtctgggaggtgtgcccaacagctcattgagaacgggccaggatgacaatggcggctttgtggaatagaaaggcaggaaaggtggggaaaagattgagaaatcggatggttgccgtgtctgtgtagaaagaagtagacatgggagacttttcattttgttctgcactaagaaaaattcctctgccttgggatcctgttgatctgtgaccttacccccaaccctgtgctctctgaaacatgtgctgtgtccactcagggttaaatggattaagggcggtgcaagatgtgctttgttaaacagatgcttgaaggcagcatgctcgttaagagtcatcaccaatccctaatctcaagtaatcagggacacaaacactgcggaaggccgcagggtcctctgcctaggaaaaccagagacctttgttcacttgttt

SEQ ID NO: 16726 - DNA, 1954 bp, Artificial sequence
  DNA replication origin
ctttgcatttcttctacgaattgtctgttagctctttgaatgattttggtcaaaaaatatcgactttctcagcatgtcctttcctagtttaagattgttcatgggcatgcagtgggacttactgtttagtgctgagttgtgtggctgttttctgaggttaacatttattgagcacatactatgggccaggcactagacagcaccatccctgccttgtctcatttaactctcatcataattcttgggaggtgaactacggtgagacactgagacttagagagagcgcctcactcttcaacagctaatcaccagcaggattacctacgtgctttattagtgttaactaaaggtgactacattgcatatggagcaagttggcagtgagaaaaaatgactcttgagcatggtgggatagtggattaacaaatggtgtttgctttgggctcacagttatgctattccatcctcaaggccttgctgcagggcccttatcaagacttaagtgagttgcaaatctgctctgtctttatggtgtatgtggtgtgtgtgtgtacagtgtgtgtagtgtgtgtgggtgtatggtgtatgtgtgtatgaatgtgtgtgttgtgtgtgtgtatggtgcgtgtgtggtgtgtgtagtgtgtgtgatatttgtgtgagatcatgtgttgggtgtgtgttgtggattgtgtgtttatgttgtggacatgtttgtattgtgtgtggtgttaggatgtatggaatgtatgtatggtgtatgtggtgtggtgtgtctatagtttgtgtgcatggtgtgtgtatgtgtgtagtgtgtgcattgtatgtgttgtggatatgtgctgtgtttattgtgtgtggtgtatagggtgtgtaggctatatctatggtgtgtatgtgtggtgtgtattagtgtgtggtccctgtattgtgtgtggtgtatggagtgtgtagggggtgtgtttcgtgtgtgtagtgtgtttgtgttgtggatatgtgttgtgtttattgtgtgtgctgtatgggatgcgtgggggtatgcatgttgtgtctgtggtgtggtgtgtgtgtagtgtgtggtctgtatgtgatgtgtggggtgtgtggtgggtatgtatggtgtgtatgtgtgtgagtggtgtagtgtgtgtagtgtgtggtctgtatgtggtgtgtggggtgtgtttagtgtgtttgtgttgtggatatgggttgtgtgtattgtgaatggggtgtgtggggatatgtatggtgtgtgtggtgtggtgtgtgtagtgtattatctgtgtgtattgtgtggtgtgtgggggtatgtatggtgtgtatgtgtgcagtgtgtgtagtgtgtggtctgtctgtggtgtgtggggtgtgtttagtgtgtttgtgttgtggatatgggttgtgtgtattgtgaatggggtgtgtggggatatgtatcgtgtgtgtggtgtggtgtgtgtagtgtattatctgtgtgtattgtttggtgtgtgtggggtatgtatggtgtgtatttgtgcggtgtgtgtactgtgtggtctgtatgtggtgtgtggggtgtgtgggggtatgtatggtgtttatgtgtgtggtgtatgtagtgtgtagtctgtgcttatcgtgtgtggtgtatgaggtgtgtgggggttatgtatagtgtatgtgtgtgtcgtctggtgtgtgtggtgtgtggggtacatatggtgtgtatgtgtgtggtgtatgcagtgtgtggtctgtgtatattgtgtgtggtgtatggggtgtgtggggtatttatattgtatgtgtgtggtgtggtgtgtgtattgtgtgtgggatgtgtatgatgtgtgtgtggtgtggtgtgtgcagcgtttggtttgtgtattgtgtgtggtgtatgggtgtgtgtgggatatgtatagtgtatgtgtgtggtgtggtgagtgtagtgtgtgtggtgtgtggg

SEQ ID NO: 16727 - DNA, 870 bp, Artificial sequence
  DNA replication origin
aacacatagtttgagactcccatcttttttttcggtaactctgtctcacttgccttcccagtcatttaaaaagtcaacttcagactgggcagccaggcagaggagctccggggggtcagccccccgcccggctagccgacccgtccgggaggtgaggggcgcctctgctcggccgcccctactgggaagtgaggagcccctctgcccagccagccgcctcgtccgggaaggaggtgggggggtcagccccccacccggccagccgcccagtccgggagggaggtgggggggggtcagccccccgcccggccagccgccccgtccgggagggaggtgggggggtcagccccccgcccggccagccgccccacccgggaggtgaggggcgcctctgcccagccgcccctactgggaagtgaggagcccgtctgcccggccaccaccccgcctgggaggtgtacccagcagctcattgagaacgggccatgatgacaatggcggttttgtggagtagaaaggggggaaaggtggggaaaagattgagaaatcggatggttgccgtgtctgtgtagagagaggtagacatgggagacttttcattttgctctgtactaagaaaaattcttatcctgttgatctgtgaccttacccccaaccccgtgctctctgaaacatgtgctgtgtccactcagggttaaatggattaagggcggtgcaagatgtgctttgttaaacagatgcttgaaggcagcatgctcgttaagagtcatcaccactccctaatctcaagtacccagggacacaaacactgcggaaggctgcagggtcctctgcctaggaaaaccagagacctttgttcacttgtttatc

SEQ ID NO: 16728 - DNA, 1482 bp, Artificial sequence
  DNA replication origin
tataatctaggagagagggaagaacagaagatagaagtggtgacaagtatgacagctgctctcatggaggggcagcaagactggaagcatgcagggtggggcaaaggcctcctgacagaggaggggcttgccctccagcttgcaggacacacacacacacacacacacacgcgcgcgcacatgcatgcacatgtgtggcacagaccccagcccccagctcaggggcgctgggaaatggagctagcctggagtgttccagctctctgagcattgccatctgtgtgtgtgtgtgtgtgagagagtgcatacacgtgtgtgtctgtctctgtatttacacgtgcatgtttgtgcatgtgtgattgtgtgggaatgtaagaatgtgtgtagaatgtgtgtaaaatgtatgttttgtgtagtgcgtagtgtgtgtgtggtatgtgtgtgtggtgtgtaatgtgtgtgcctgtgcgtgtggtgcatgtatgaatataagtatgtgttgtgtagtatgtgtgttgtgtgtagtgtagtgtgtgtgtttctatgttgtgtgtggtgtgtggtttttgttgtgtagtgtgtgcttgtgtggtgtgtgtgtgtgtttgtgtgtggtgtgcattgtgcagtttgtgtggtgtgtgtgtggtgttgtgtaggttgttgggtggttgtgaggtgtggtgtgtgcatgcgtttgtgtgtggcatatgtgagtgggttgtgtgttgtgtagtctgtgtatgtgtggtgtgaggtgtgtgttttgtgtagtctgcatgtgtttgtatggtgtgtgtgttgtgtaatctgcatgtgttggtttgttgtgtatggtgtgttgtgtggatgtgtttgcatgtggtgtatgtatgtgtgtgggtgttgtgtagcctgcatgtatttgtgtgtggcatgtgttgtgtcatctgtttgtgtgtagtgtgtgtgcgttgtgtagtttgtgtggtgtgtgtgtgttgtgtaggttgttgggtggttgtggggtgtggtgtgtgcatgtgtttatgtgtggtgcatgtatgcgttgtgtgttgtgtagtctgcatatgtgtgatgtgtgttttgtgtgtgttgtgtagtctgcatgtgtttgttgtgtgcgtgctgtgtagtctgtgtgtttgtgtgtgtggtgtgcattgtgtagttagtatagtgtgtgttgtgtggtgtgtgcctgtgtttgtgtgtggtatatgtgaatgtgggttctgtgttgtgtagtctgtgtgtgggggggtgtggtgcgcattgcgtagtttgtgtgtgtgtgttgtgtgcatgtgtttgtgtgtagtgtatgtctttgttgtgtgttgtgtagtctgtgtgtggggggtgtggtgtacatcgtgtagtttgtgtgttgtgtgcatgtgtttgtgtgtggtgtatgtgagtgtgtgttgtgtagtctgcatgtgttcgtgtggtgtgtgtgactgtgtgtatggcacg

SEQ ID NO: 16729 - DNA, 956 bp, Artificial sequence
  DNA replication origin
ggggagaggggggcggggagaggggcgggagtcgggggcggcgaggggaggggcggagcgcgggtcccgccccggcgggccgctggaaaagtttagtctctgactcgctcgggcagaggccgaggaagccggttccggggacgggcaacagggactcagggaccagaaggcggctgcaggacgcgaccgagcaggaccccaggcccgggaacgacgtcgcgagcgctgagactgccgggcctcccagcccatctggcattcgagcgcaggaccgggcgccccggcaccgccgcgcgccacccgctaggatgccggtggccccagcgccctcagccgacggaggtgagaggcgggcccgggcggggcgcggaaccagggtggggggctgggggccgaaggacccacctttccaacaaaatccccaccgatcccgggcgcgacggggacttgggcgcgccacggcggccggagcgctccacatcagcacccctcccccagagccgctgcaggaacagggaggaggccttttccaccgcacccggagcgtttacaacgggctggagctgaatacctggatgaaagtggagaggctgttcgtggagaagttccatcagtcgttttccttggacaattaacaagttaggcttccacagtgccagggcctggggatgctggacgtgggagagggttgtggtcgttagcctgggaaaatcattcttttaaacaatattcgccggaaaattagttttttcctaacatttctcaaacaaggcaattagggccgtcagaatcggtgctggaagacgaagtccccacagtgcaataatgaggttcccacggaaaatcagtacgttgtgttcgtaactgagataacagctagagaaggggctttgggctttttgagtctcccaatagtcagtctctctctctctctctctctctctcttcctctgact

SEQ ID NO: 16730 - DNA, 1364 bp, Artificial sequence
  DNA replication origin
gaactgtagaatcttaatgcttgaagccaccttcaatgctagatcacctaattcagtcccgccagtgcctttatttttaaaaatgtgaaaacagcttgagaaatgtgaagccactttttcaagatgcaaagcacagtggtggctctccaagcttttgctggagttgttatagtacctccaaactgcagtttaatagttccatgtctggttagaccatttttactgtttaatatagtcaatttaccaatgactcctggacacggaccctaaggaaagttagattggctggtgtttgggatgaaaaaatgagaaccagagctacccttttcccaccagttaatttctcctcctgctttcaaaacctaaggaggggaaacaggatgtgaaaagagccttagaaaggctggtgcctattgaaaagtatggaactaaataaagccagcactctgtgttctttattttgaaccagtagatctaaatatagcggtgctgatgtgatgatggtggtgatgatggtgctgctgctgatggtaattttgatggtggtggtggtggtgatggtggtggtgatgatgatgatggtgatgatgctgctgatggtggtggtgttgatagtgatgatgatggtgatgatgatggtggtgatgctgctgctgatggtgctggtggtggtgatgatggtggtgatgatgctgatgatggtgctggtggcaaaggtggtggtggtgatggtgataatggtggtgagatggtggtgatgccgatggtggtggtggtggtggtggcaatggtgatggtgatagtgctgatggtgctgatggtggtgatgctactgctgctgctgttactgctgccgctcctgttgctgctggtgacagtgatggtgatgatgatggttatgctggtgacaatgatggtgatgatgatgatgatgacaatggggatgatggtgataatggtgatgatcctgatgatgctgatggtaatggtggtggtgataatggtgaggggatagtgatgatagtgttgatggtggtgatgctattgctgctgctgctgttgctggtagtgacagtgatggtggtgacaatgatggtgatgatgatggttatgatggtaacaatggggatgatggtgataatggtgatgacgatggcgacgatggcggtgatgctgatggtggtggtggtgccaataaaagtgaatgtggggatggtggcgatgttggggatgatgctgacgatgttgatgatgtagatgatagcaaaggtggtaatgatgtagaaacagtataaaacaaatgacaattccaggtaatcaggaaaaaagtcagatgaaaaagaacttccacagacataattttt

SEQ ID NO: 16731 - DNA, 3323 bp, Artificial sequence
  DNA replication origin
ctttatttagcagacattttttgagcatctactgtgcacaaggccctgccctaggatctagggagagtttcagtggacactgaaaataaataaataaaaatatacctctgtagtggattgaagggtgccctcctccccgcaaaagtcatgccccctgaccatctggaacctgtggaaaagagtttttacaggtgtggttaagttaaggatctcgagatgagattatcctggattagggagggctctaaatccaaggacaagtgtccttataatagatgagaagaggggcccaaacatataggaaggggaggcagagagaggactgatgctgccacaagccaaagaatggctgggccacaagaagctggaaggagtctcccctagagcatggctctgctgttgcctgacttcagactcctggcttccagaatggtgaaagaatcaatttctgttgtttcaggccacctagtttgtgacattttattataacagccctaggaaatgaacacagcaaggaagacaatgtaaaacaaagaagatggaggatggtggtggaggacatggtggaggatggtggtagaggatagtggcataggacgtggtggaagatggtggtggaggacggtggtggaggatgcagtggaggatggtggtggaggacatggtggaggacggtggtagaggatggtggcgtaggacgtggtggaggatggtggcataggatgtggtggaggacagtggtggaggatgtggtataggatgtggtggaggatggtggtggaggatgatggtggaggatggtggtggaggatgatgatggaggacagtggtggaggatgtagtggaggatgcggtggaggacaatgatggaggatttacatggtggaggtgtacatggtggaggatgctggtggaggatgtggtggaggatggtggtgttaggacgtggtggaggacgtggtggaggacatggtggaggacagtagcagaagatgtggtggaggatggtggtgtaggatgtgatggagggcggtggtggaggacgtggaggaggacagtggtgtaggacatggtgaagggcggtggtggaggatggtggtggaggatgtgatataggatgtggtggaggatggtggtggaggacattgtagaagacatggtggaggacagtggtggaggatggtggtgttaggacgtggtggaggacgtggtggaagacatggtggaggacagtagtgaaggacgtggtggaggatggtggtgttaggacgtggtagaggacgtggtggaagacatggtggaggacagtagtgaaggacatggtggaggacggtggtgtaggacatgatggagggcggtggtggagaacgtggtggaggatgtggtggagggcggtggtggaggacgtggtaaaggacgtgatggaggatggtggtggaggatggtggtggaggatgtggtggaggacggtggtggaggatgtggtggaggatggtggtggaggaccgtggtgtaggacatggtggaggacagtggtggaggacggtggtggaggatggtggtggaggatgtgatataggatgtggtggaggatggtggtggaggacattgtagaagatgtggtggaggacatggtggaggacggtggtggaggacgttgtggaggatggtggtggaggacggtggtggaggatgtagtggaggatgcggtggaggacgtagtggaggatgcagtagaggatgatggtggaggatttagtggtggacatggtggaggacagtggtgttaggacgtgggggaggacatggtggggggcggtagcagaggatgatagtgttaggacgtggtggaggatgtggtggaggacagtggtgtaggatgtggtggagggtggtggtggaggacgtggtggaggatgtggtggaggacatggtgtaggacgtggtgcagggcggtggtggaggacgtggtggaggacgtgatggaggatggtggtggaggacgtggtggaggatggtggtggaggatggtggtggaggacatggtggaggatggtggtgcaggacggtggtggaggacgtggtggaggatggtggtggaggatggtggtggaggatggtggtggaggacgttgtggaggatggtggtgtaggacagtggtggaggatgtcatataggatgtggtggaggatggtggtggaggatggtggtggaggacgttgcagaggatggtggtgtaggacagtggtggaggatgtcatataggatgtggtggaggacatagtgaaggacgcagtggaggacgatggtggaggatttagtggtggacatggtggaggatggtggtggaggatgtggtggaagatggtggtgttaggacgtggtggaggacatggtagatgacagtagcagaggatgatggtgttaggaggtggtggaggatgtggtggaggacaatggtgtaggacgtggtggagggcggtggtggagggcggtggtggaggatgtggtggaggacatggtgtaggacgtggtggagggtggtggtggaggatgtggtggaggacggtgatggaggacaaggtagaggatgtggtggaggacatggtggaggacagtggcagaggacagtggtgtagtacgtggtagaggacgtggtgtaggacagtcgtggaggacatggtagaggacgtggtggaggatggtggtggaagatatgctggaagatgcttggtgtaggatggtacacaggatgatcaggggaggtggccctagaggcggcactggagaagatacctgaagcgagtcagggagagaagtccaggaaggccggtggtagaaggcaggcacagggcccaggaggcaagagcttgcttggcacggtcagggtcaaggaagacccagaagccagtgtagctggagtggcagggagaggggatcataggaagtgagacgggatggagtgggagtgagctcacagaaggtcctgtgggtgttgggggaatgggacattttatttggagtgagcagagaaggaacaagattgcatcattttaaaaggatccttctgtctgccatgtggacaaaaaactttagagtggaagagcgggcacagagtgactgatgattaattatggagcctgtcagggggcagcagggcagtggcaagaactggtaagatggaaggctttgccggcaggtgcaggtgaaggaaagaaggcagagaactggggaagtcgggaaggggttgcggttgatagaaaccagcaggtgctcttcaggaggaaagtgctggacctatctgtgtctgcctatgtttgag

SEQ ID NO: 16732 - DNA, 2284 bp, Artificial sequence
  DNA replication origin
cattgtaaactaaactctggtactgaatttactaatttttgtgagatatatatcaattaagaatgtttaacacaatagttgatacaccaccatactgttggcaataattcattatcattctaaatggtagggctttgaaatgtgtttatttttgccttaattctgctccaaatttctaccccaataagactttcctctcagtagctccatctgctaattgaaattttgttttaagaaaccatggtaacacatgttttgccataacacagagtggaggaattaattccacgttctttggccaaagccaagccttctgcaaaacacaaaggcaataaaaatatcagaagcagtatttcttaagaaaaccaaacacggatttttgtaattgatgaactgcccccaaacagtggctagcatacctttataaaacgcatgctttgagcctccagtagagcgagttgagtcaattgcactcctcagtctgtggaatgtaattagcatccgtgtgtgcaaggagtgtctccagtttcatgtcgctgcccccttcagacctctccatccctctcctactcccttttccacccggcaccttccaagttgctgtgtcttaggcttagatgtgcttgccccgttgtagtgtggggtgtgtgtgtgtgtgtgtctggtgtgtgtgagaatgtgtgtgtttatgtcggttgtgtggtctatgtgagtgtgagtgcatggtgtctgtgaggggtgtgtgcagtgtggggcgtgtttgtgtgtgtgatatgtgtgtacagtatgtatgtatgtggtgtgtgtaaatgtgtgaatgtatgtggcatatgtgagtgatgtgtgtggtgcagggtgtgtttatgagtgtgtggtgtgtttatgtggtgtgtgtatggtatgtgtgagtgtgtggtgtatgtggtgtgtatgagatgtgtgagtgtgtgtttatatgatgtgtgtgtttatatgatgtgtgatgtggtatgagtgtgtgtggtgtgtggaatgtgtaagtaaagtgtgtgtgagtgtgtgttgtttacgtggtgtgtgtgattgtgagtgtgtgatatgtgtattgtgcattagtgtgtatgtgtgtttatgcggtgtgtggtatgagtgtatgtggtgtgtgtgtagtgtgtgctgtgtgtttatgtggtgtgtggtgtgtgtggtgttcctggtgtgtgtagtgtgcgtgagtgtggtatgtgtttatgtggtgtgtgtggtgtgtagcatgtgtgagtgtggtgtgtgtggcatgtgtgctttgtgcttatatgctgtgtgtgagtgtaagtgtaaggtatgtgtggcatgtgtgtgtggtatatgtatgaggtgtgtgtggtgtacgtgatgtatgtggtgagtgtggcatgtgtggtgtgtggtgtgtttatgtggtgtatgtgagtgtgagtgtgtgctatgtgttgtgtgtgtgatatgtgtggtacgtgtaatgcatatgatgtgtgtactgtgtgtttatgtggtgtgtgtcagtgtatgatatacatggcgtgttcgagtgtggtgtgtgtgtgctgtttgtgatgtatgtggtgagtgtggtgtgtgtgctgtgtgtgatgtatgtggtgagtgtagcgtgtgtgagtgtgtggtgtgtgtggtgtgtgtgatgtgtgtatgtggtgagtgtggcatgtgtgagtgtgtggtgtgtgtgctgtgtgtgatgtgtgtatgtgacgagtatggcatgtatgagtgtggtgtgtgtggtgtgtgtggtgtatgtggtgagtgtgacgtgtgtgtggtgtgagtgtgtgctgtgtgtggtgtatgtggtgagtgtggcgtgagtgtgcgtggtgtatgtgatgagtgtggtgtgtgtggtgtgtgctgtgtgatgtatgtggtgagtgtggtgtgtgagtgtgtgctgtgtgctgtgtgtatgtggtcagtgtgtggtgttgagtgtggcatgagtgtgtggcatgagtgtggcgtgtgagtgtgtggtgtgagtgtggcgtgtgtgtgtggtgtgagtgtggagtgtgtgtggtgtgagtgtggcatgtgtggggggtgtgtggtgtgagtgtggcgtgtgtgagtgtgtggtatgagtgtggcgtgagtgtgtggtgtgagtgtggcgtgtgtgagtgtgtggtgtgagtgcacgaaagtggttctggactttcttccctggctgcactatgtttttagtgccctcatgtatttcaaaacatgccgccacctattttaattttccatcctcccc

SEQ ID NO: 16733 - DNA, 874 bp, Artificial sequence
  DNA replication origin
actttgcgaggcggcggcgacgataggctggcagccggccgacttccgcagaaggtgattggtcggcgctgctgtccaatcggcggcgggctgtcggattcaaatccggatcgttgggactgcggtcgttagtctccggcgagttgttgcctgggctggacgtggttttgtctgctgcgcccgctcttcgcgctctcgtttcattttctgcagcgcgccagcaggatggcccacaagcagatctactactcggacaagtacttcgacgaacactacgagtaccggtgggcgcctttcttagaccccgagccggctccctcagccggggcccccgcgggcggggcgacccaggcatagtagggtcgggggtgggggccggggcctggggggcggagcccggggccggagggcgagggccggggtttggggtcgcggccacctggcgccccgcgcagtcggacatggttgggtgcctggccgcgccgggccggttgggcctttgttcggtgtgcgcggagggtgagggaagagtgcccaccgggccgcatttagtacctgggtaggaaccggcgcaacttgggggtcatggggtcctcggcgacgcggagtgaccatcccgtcacttttttctcggccgtggccgaagtaattaggccgttcagtagctggtctcagttccagttctttgaaccagtccaggaaaacccacctggtgccgtcctttttcctttagcaaccgtgacacactttccctgtcgctgacggggtgatgcagcttttactagtttgtggtttagaatggtcaaatggtcattttcatctgttaacacagaggaacacttttctttttcttgtttttgaagtgagtggtata

SEQ ID NO: 16734 - DNA, 3260 bp, Artificial sequence
  DNA replication origin
ccctcaaagaggaccaagggcgccttctgctgctgccctctgatcccagtggttccaagggctctgatttctaacactgtagttaaaacataaaaggccatcccaaatccaaatatctaaatgctgcctaaagtatgggggaaccattattagctttgaaaatgacacgggtctaaacttgacatggaagatagtcctggcagaggtgaaggcagggccctgacagggtaaagactgcactttggttaaaaaattatatcgatctgtttctgtgtgtgcacactaatgtacaagtgcatgatttgtatctgcatgtagacacaacccatcgccattcatcgctattgatccttacgtttgtatgccagatgcgctatgtgctggcacacgggtggtggggttattttttcacccatctgtattctgagtgatccatgaggaacttgggttcatcagttcagacgagcagagctcggctgcatgctaactttacttcaccagctccagacggctttcctccccttgtcaatacacatgctgctccacttgccacggggctgcatcccaataaacccactgtgagttgaaacgatcctaagtcaacaatgtgtgtgtgtgtgtgtatggttgtgtatgtgtggatgtgattggtgtggtgtgggtagcgtgcatgtgtctatgtggtgtgtatgtgctttggtgtgtgcagtatgtgtggtggtgtgtgtgtaacagtggtatgattggtgtgtgtgtgatgtgtgttgtatgctgtgctgtgtgtggtgcatgtgtgagtggttgtgtttggtatggtgtgtatgggggtggttttaggtgtgtgtacagtgtgtgtgtgtggtgtgtgttggtatgtgtgcacatgtgcagtgagtatgcatggtctgtgtgtatggtgtttgatgtgtgtgtggtgtgtgtgatttggtgtatgtgatgttttgtgctgtgcatttattgtgtgcatgcacatggtgtgtgtgttgtgtggtggacatgattgtgtttgtgatgtgtgtgcgtgttatgtcgtgtgtgtgtgttgtggtacatgtgtcgtgtggtgtatattgtggtgtatctgtacgtatgtggtgtatctgatatatgcgtggcgtgtggtgtgtgtggtgtgtttgtggtgtgtggctggtgtgtggtgtgtggtatgtaggtgtgtgtctggtttgtgtgtgtggtgtgtatgaaggaggtatggtgtgtgtgtgatgctggcatgtggtgtgtgtggcatgtggtgtgagggggtgtggtgctggtgtgtggtatgtctgctgtgtggtctgtgtagtgtgtgtggtatgtgtgtctgggatgtgtgtgggggggtacagtgcatggcatgtgtgcggtatacgtcatgctcatgtgtggtgtgtgtgtctggtgtgtggtatgtggctagcatagtctatgtagtttgtggggtgtggtgtgtgtgtggggtgtggttgtgaggggtgtgatgtgtgtgtggggtggggtgtatgtgtggggtgtggcatgtgtgtgggtgtggtgtgtgtctggggtgcggtgtgtcgggcgtgtgtgtgtgggatgtggcgtgtggggtgtgtgtctgggatgtgtggcatgtgactgggatggtgtgtgttgggggggtgttgtgtgtctggggtatggtgtgtatctggggtagggtgtgtatctggggtgagctgtgtcaggggtatgtcggggtgtggggtgtgtggtatctggggtggggtgtggtgtgtgtcaggggtatgtgtatgtctggggtgtggggtgtgtgttatgtctggggtgtataaggtgtgtgtgggggggtgtggtgtgtatgtctggggtgtggggtgtgtgttatgtctggggtgtataaggtgtgtgtggggggggtgtggtgtgtatctggggtgtggtgtgtggggtgtggtgtgtgtctggggtagggtgcgtatgtggggtgggctgtggcatgtgtgtggggtgtggtgtgtgacggtgtgtgtgtctggggtgtggtgtgtgtggggttggtgtgtgtctggagtgtggtgtgtgttggggtgtgtgtgtctggggtgtggcatgtgtgtctggggtgtggtgtgtgtctggggtgtggtgtgtgtctggggtgtgtgtgtggggtgtggtgtgtgtctggggtgtgtgtgtggggtgtgatgtgtgtgggatgtgtctggggtgtagtgtgtgtgtgtctggggtgtggtgtgtgtgtgggggtgtgtttggggtgtggtgtgtgggggggggtgtgtgtctggggtgtggtgtgtgtctggggtgtggtgtgtgtcgggtgtgtgtgtggggtgtgatgtgtgtgggatgtgtctggggtgtggtgtgtgtctggggtgtgtgtgtggggtgtgatgtgtgtgggatgtgtctggggtgtggtgtgtgtctggggtgtggtgtgtgtcgggtgtggtgtgtgtgtggggggtgtggtgtgtgtcggggtgtgtttggggtgtgtgtgtggggggtgtgtgtgtctggggtgtggtgtgtgttgggggtgtggtgtctgaggtgtgtgtgggggggtgtgatgtgtgtggtgtctggggtgtggtatgtgtgtggtgtgtggggtgtggtgtgtgtggggtgtggtgtgtgtggggtgtggtgtgtgtggggtgtggtgtgtgtctggggtgtggtgtgtgtctggggtgtggtgtgtgtctggggtgtggtgtgtgttggggtgtgtgtgtcgggtgtggtgtgttgggggcgtggtgtgtgtcgggtgtgtgtgtggggggtgtgatgggtgtggtgtgtggggtgtgtgtgttggggggcgtggtgtgtgtcgggtgtgtgtgtggggggtgtgatgggtgtggtgtgtgtggggggtgtggtgtgtgtctggggggtgtggtgtgtgtctggggtgtggtgtgtctgggctgtggtgggtgtgtggggtgtggtgtgtgtcgggggtgtgtatggggtgtggtgtgggtcgggggtgtggtgtctgaggtgtgtgtgggggggtgtggtgtggtgtgtgtctgggatgtggtgtctggggtgtggtgtgtcgggggtgtgtgtgtgtctggggtgtggtgtgtgtgtccctgcccgtccttcacggctggtaccagggtgactgactatagtaaatgtgcattgctagccgcatgacaaagcttagacagcagtccatc

SEQ ID NO: 16735 - DNA, 1209 bp, Artificial sequence
  DNA replication origin
ctacagagcagtgagaagcaggtcatcactcaccatgggtcctgccttttctttctcatgtccttccagcatttcttctgaggccctgaagaagtatcaagtgggctttgacattgcggtggtgagagcgacccctcctcacctggagaactgggaaatgtggattctcagggaccgcgctgttcacgagctccaggctgtgctgctggccctggtcctggggcgctgagccgcatctgcaatagcacacctgcccggccacctgctgccgtgagcctttgctgctgaagcccctggggtcgcctctacctgatgaggatgtgcacccccattagggggctgctcatggcccttgcagtgatgtttgggacagcgatggcatttgcacccataccccggatcacctgggagcacagaggtgagtgacgaaacctgcaggggtgctgatggcctgggatggggacctcactgcctgggatgctgaggtgggtggctggggacgggacagggaccccacttcctggaatgctgaggcgggtggctgggaacgggacagggactccacttcctgagatgctgaggtgagtggctgaggacgggatggggaccccacttcctgggatgctgaggcgggtggctggggatgggatggggaccccacttcctggaatgctgaggcgggtggctggggacaggatggggactccacttcctgggatgctgaggcgggtggctgaggatgggatggggaccccacttcctgggatgctgaggtgagtggctgaggacgggacggggaccccacttcctgggatgctgaggtgggtggctggcgatgggatggggaccccaattcctgggatgctgaggcgggtgactggggatgggatggggactccacttcctgggatgctgaggcgggtggctgaggatgggatggggaccccacttcctgggatgctgaggtgagtggctgagaacgggacagggaccccacttcctgggatgctgaggtgggtggctgagaatgggacagggaccccacttcctgggatgctgcggtgggtggctggggacgggatggggaccccacttcctgggatgctgaggtgagtggctgaggtcgggatggggactccacttcctgggatgctgaggcgggtggctggggacgggatggggactccacttcctgggatgctgaggcgg

SEQ ID NO: 16736 - DNA, 956 bp, Artificial sequence
  DNA replication origin
taggctcttgtgggtttcacttggccattcttagaatgagacttttatcttcatgttgacagcatggctgccagagctccagccatcacattctagttccaggcagcagcaggaagagaaggactgagggaattgctagctgaatcagcctcctttaaagagctttcctggaattgccatctaataaattccacatacagtttttttggccagaactctcaccagagaagctgggagatatagtgagctgggcacactgccaacccaagtaacctcggaattttgttagcgagggtgcaggaacatggatgctggggcaggaagccagtgatctctaccatggaagcaagaggccaggatgagaggtgagcattgctcagatgagtgatggtggtggagatggacaggaggagacaagccccagatgtgtttgaggctgagcagcagcaccatctatggattgggggtgggggtggggttagaggtagatggggtcggcccctgactgctggtgcttttttttaggtggggacatggactgtaggaattggctggaagcagagtgaggttctgtttcggctgtgtctggctgggtgtggaaggcggcatgtggaggtggtagggaggagtggggttctagagtctggagctcaggggtgtggttgttccatgaccctcacaggactcctggatagaagggggagcaagggactcagggatcccaggttgctgttttgagtgaactgtttacagaagtgtaatgtgaaagtgcccaatcactgggtgcccagctcaggacattctcatagagtgaacccaggggtgcagctggccccagatcaaggtgctagacgcccttgggccagtcctgtggcgggttacgctgtggggcccagcaaaggtacaccaggacagtagccatgcagtcatcagagaatgttggggacatgagagat

SEQ ID NO: 16737 - DNA, 1467 bp, Artificial sequence
  DNA replication origin
tggtgtcattcccttacaggtagcgggagccaggtggaggcctcacaggagggatggtggtatgaaccgtgggtgtgagggaagtgggggacattgggcagaggtgggggagggcaggaagagggtgcccaggagaccaaagccaggcaggacacagtgaggaaggcaattagtagggttcgagaagggtcctggtcagagaaaggagacactcaggaattaagggtgcaaggttctgaaaaaaaagagctcgaaggaatttggagtcgggacggaagcatcttggatttaaatcatttcagactcattgagctgaggtaagtagtaaaagctaatgttgtggtcgtgggctttagaaagaaacttcaatttaggaataaatcacagagtaaaccatcatggtttaatggagattgacgttgatctaggaaaacctatttgcccctgcactgctcgtttctgtgggattctgattggacctttccgcaccttggtgtgggccgccattgtggggatagtgccattttgttggttgtttgtaacattgtgtttaacgtccatgccttacagtcctcatttgtgcagtctcatctctggtggtagggctgtgtcttaccctctcccagggaagtagctgtggggaggaggaggtgctgagggagtagtggagggaggggagttgctgagggagtagctggggaaggtgaagtactgagggagtagctgagaaaggggaggtgctgagggagtagctgagggaggagaggtactgagggagtagggagggaggggaggtgctgaggaagtagctgagggggtggaggtgctgagggagtggaggtgctgagggagtagctgagggaagggaggtactgagggagtagtggagggagaggaggtgctgagggaatagctgagggaggggaggtgctgagggagtggaggtgctgagggagtagctgagggaggggaggtgctgagggattagtggagggaggggaggcactgagggagtagctgagggaggggaggtgctgaggtaatagccgggggaggtgaagtactgagggagtagcagagggaggggaggtgctaaggaagtatctgagggataggaaggggcagaggcctgttctgggtcacacagctgggatgtggcagcatgggaatctgaaccaggcaagctggcctcacagccggcactgcagctatcacaatatgcttcctccatagttgggggagaaactaagaagcaattaaggtttctaatagacttgaaagaagcataaaaaatgtttgagctggccggacacagtggctcatgcctataatcccagcactttgagaggccgaggtggacggatcaccgaggttgggagtttgagaccagcctgaccaacatggagaaaccctgtgtgtacgaaaaatacaaaattagccaggcatggtggcacatgcctgtaatcc

SEQ ID NO: 16738 - DNA, 839 bp, Artificial sequence
  DNA replication origin
ggcctgggtgcagcgtggtgtggggagtggaaggcacgtcctgaggggagtcactgtcctcccccgccagtgtgcctggcacataacccccctttcatgcctcagtctcctcctgctgctgccttgttttagaaggtgtggccaccagggtccaggatggcccacacccctgctgaggggaagtgggaagcggctgatcctttgtgcagggagcctcggagccctggagaagtcctgggaggcagcctcccctctctgccctccttggtggcccgagagaggccccgtggtgcttatcatggagacgggatggtgtttcttgttttctttagcccatgttgggctgggtggggtcatggccttggagcaggccctgttcagagccactcagtcagtctcagggttttttttgttctttggttttgccccttgtggtaggccaaatgatggcccccgaaaataccaggttctaacccttggagcctgagagggtgactttatatagagttagagtctgcagctgggactaagttgaggatcttgaggtggggagatgattctggactatctggtgggccccaaatgcactcacaagtgttcttctcagaggcagcagagggagatcgggcacagagggcacagaggctagagtagtggtgggtgtggggtggattttatctgccaattgggctgggcctcgggtgcccagataagtggtcaggtgctattctgggtgtctgtgtgggtgttcctgggtgaggttgacatgagaatcggtagactaaggaaagctgttgcctgggaagcaggatggacagacctgcagggatagaacacat

SEQ ID NO: 16739 - DNA, 672 bp, Artificial sequence
  DNA replication origin
ggagtggctcccttcagcgcttatttgaaggtggacccagaggacttgctgccagcttggatctggggtgggtcatggtgggggtcggggagcacagaacaccctggattttggcctgagccattggaaagacttaggctccaagtgggcttccacctgggctgtctcggaggcatctcagctttggggaggtgaggagcgtggtttggggacacaggaagcttgaggtgcttattagtggggaggaggctgtggggtacctaagcctggagttgaggaaacatctgaggactagcccaagggttagtcctgactggagccggggatatggaggtctcccagggcaggccccctcagaatgcccttgctcctttgctgtcaggtagagacatgtctgaacctgctcctgttccatgctggcctgcaagggtcacaaggagagacaaacttttgggtgcctccatcgagattggaaggaccgataggcagcgggcgagggagggtcggggttcggactggctgctgggctgcggtgggagagatggtctgggcctgggagatgagatggacagatccacaaggataggacacatggcaggatttggaagggaaggcatctggagaattgagggtctcctcttatctcctgcagtctttgggggcagcacctat

SEQ ID NO: 16740 - DNA, 1050 bp, Artificial sequence
  DNA replication origin
ggatcacttgaggccaggagtttgagaccagcctgggcaacatagtgagaccctcatctctataaaaatatagaaaatcagccaggcatggtgaaatgcacctgtagtcccagctgctcaggaggctgaggtgggagtgtgacttaaggccaggtattcaaggctgcagtgagcttgtaccccagcgtgggtgacagagcaagaccctatgcaaataaatacataaaaataaaatacaaataaataaatacataaagcagagaaggagatgagacgggttctacaaggggagctgggctgattgatggagccaaggctggcgccatgcctgtgcctggggaggagcaccgtatgcatggggaacaaaggagcaaaggccctgagacagataggagcaagtcttgggtgtccagggagcactgaagtggtggtggggggcagtgggctgaggcagagtcaggaagggtaggggtaggagaggaggtggtgggtgggggagtttgaggggttggggaagacccctggcttctggggaaaatgggccattgtgggggtgtcgggcacccggttaggctgtgaggtggtctgggagagcggtgctggtgtgggcacggtgcagcaatgtcgatgaggagtggctcccttcagcgcttatttgaaggtggacccagaggacttgctgccagcttggatctggggtgggtcatggtgggggtcggggagcacagaacaccctggattttggcctgagccattggaaagacttaggctccaagtgggcttccacctgggctgtctcggaggcatctcagctttggggaggtgaggagcgtggtttggggacacaggaagcttgaggtgcttattagtggggaggaggctgtggggtacctaagcctggagttgaggaaacatctgaggactagcccaagggttagtcctgactggagccggggatatggaggtctcccagggcaggccccctcagaatgcccttgctcctttgctgtcaggtagagacatgtctgaacctgctcctgttccatgctg

SEQ ID NO: 16741 - DNA, 1248 bp, Artificial sequence
  DNA replication origin
caggctgcctgatggtcaagaagcttttgtattgtaataaaaaatgttttagcaatatggtccatgcactgaaaccttcctgaggcttggtttcaaacataacactgaattccacatgcatctcagttcaaacgtgggcaagaagggatattacaggagtcatctcatttaataatcctacagtcccccaacaaccactgagggacaaccccactaaggaagagggcgggccccactgaggctgcgcacaagctggcaggcacagaagggcttccgggctcccccaggaactggagccttaaagaggacgccgcggccaccccgccctgcaggcccacctgcagctgggctgcatctgggagaggcaagcgaggggccggccagcttcactgcctgcatgccctttaggagcagaacaagctgcaaaacacccacctgctctgggaacaaggcacgcatgaccagtctaggaaaagtgtgcaaagctctcaagactccgatgcatacggggtatgtgtgtgctgtgtgtgctgcggcacgtgcagcatatgactgtgtggtgttatgtgtggggtttgatgtgtggtgtgtgtggtgtgtatgtgtacagtgtgtgttgtgtgtgttttgtgtgtgtgtgtggcatggtatgtgtatgtaccacgtggtgggtttgtgtagtgtgtgtggtgtgtatggactgggtgtgtggggtggggaggtacgtgtatggtgtgtgtatacatggtggggtatgtgtgtagtatggggtgttccgtggtgtgatgtgcggtgtatgtatgcagtatatatgtagtgtgtgtgtggtgtggtgtgtgtatgtagtgtggtggctgtgtgtgtggtatgtgatgtggtgtatggatgtgttgtgtgttatgtgtgtgtggtgtggcaggtatgtgtgaagtgtgtggtatggggaatgtgtggtgtggtgtgtggatgtattgtgtggtgggtgtgtggtgtgtggatgtattgtgtggtgtgtgtgtaatgtgtgtatactgggtgtttgtggtgtggggggtatgtgtgtagtgtgtggtatggggtgtgtggtgtgatgtgtatgtgtgtgttgtttggtgtgtgtgtactgggtgggtggtggaggcatatgtgtgtagtatgttgtgtgtgtgtgtgtgtgtgtgttccagagctacatttttcaaccttttcctttgtatttctcctttgtgatttccataacaagtattg

SEQ ID NO: 16742 - DNA, 873 bp, Artificial sequence
  DNA replication origin
ctccacacccctaggctcctcaccggaccctcggggccctccccgaacccctgcaggagcctccttctgggatccccggacccctggactccttcctggatccccccggggcccctcctgggacgcctcccagagacacctacccggacccctccgaccccctggacctctctgctatccctccccggccttctccccttcccggttgcctccccagtccctgcgcgcaggtggctcctctgggcgcgggggagcgggggcgcgctgcatacccgggccagggagggggcggtgcgctcggccaggccccgtcgcgccccggcccgcccagtccggccccgccaggtcaggccccactccggccagccgggctctggccgggcccccgcgggcttctattttggtcgcggaggccgcggaccctgtgcactggacccggcgccgcgcactcagacaggtggggcaggttgggccgcagtggtcaggtcgccgccttggcagtgagtgctgcaggcctcggtttcctttcgggttttggttgcattattctagaacagcccaggagaaccacaagccttagcttgggctgcacctgttgcagccgcctagtgagctgcaaggggctggctctactggggttatgccagtaaaaacgtgtaaaggagagttgaactcgtggttgtcctctattttctggcttagtattttggggggtaggtgggagagtgggtgaatgggagtctgtaagtgggcagtttgcgtcaaatgaggcctggtgtcgagggctgggtcctgctttccggaaggttttccacatgaagttgctttgcttttgttttgaaaacctcactctgtgttgagcacatcccaggc

SEQ ID NO: 16743 - DNA, 1119 bp, Artificial sequence
  DNA replication origin
cacagaaaccacaggaggccctagaacggaactctgagactgttgggcctttaactctgtgactgttgggcctgggactggcttcatttgtaaactctggctctcagagccagtgctcagcaggaaaacagcctcagggcccctgcccctcaacagcagtctgtagtccagggaggtatcacctggcctggagaggggctccccaactcctcacatttaggggaaatcttagctggttccgtaagaaactgtgtccccttctcaggactgtgttcctcaataggcctcccagcctggccagtcactgtgcgagccctgtcacctctcctgggggcagagggaagaggtctggatggagcagcaccatctctgagggcccccagatccccaaacccatgggctagtcacaaacaagtctcaccagcagcctcacaggaggaccatttgccatacagagtggaaaatgatgaacgtttggcaaaaggctagcacgggggttcagggaaaccaagactccaggtggtgccagcccctcccctggggaatgggagcagcctggtgtgaaatattcttgcccaaagtcagcagccaagtgttctgggtgccacgtgcctcacgcacactgcaggtcaggttctcagaagagctggcccagggtctgggggtgaaaaaaaactgggggatttgggggaggcctggaaagggtggggttcatccaggaccccagaaggggcaagcttgtctattgagagctggtgaggaagagggtgacagggcacctcttggtcctgggaacgggtgcttgactcagcagagaccaacccagggctgagggacaaccctctgggcctggcggggaggcaagagagatgggaggtgaggaggaaggagtggggagcaaaagtggggagaaggggagagaggtggaagagtgttgcgaaggtgaagaaagaggaggaaaaagagaagggaggaaaagaaaggttgggggagggaaaggagggaggtgagcaggggcgaggaggagggaggaggaaggaggaagaaaggggcggggccataggagggaagagaagaagggggagaggaaggggaagggaaaggggaggaggcgggaag

SEQ ID NO: 16744 - DNA, 901 bp, Artificial sequence
  DNA replication origin
tgtgtgcactggggggatgtacacactggggggatgtgtacactggggggatgtacacactggggggatgtgtgcactgggaggatgtatacactggggggatgtgcacactgggggaatgtgcacactgggggaggtacacactggggggatgtgcacactggggggatgtgtgcactggggggatgtgcactgaggggatgtgtacactggggggatgtgtacactggggggatgtgtacactggggggatgtgtgcactggggggatttgtgcactggggggatgtgtatactggggggatgtgtgcactggggggatgtgtacacactggggaaatgtgtacactgcggggatgtacacactggggggatgtgcacaccggggggatgtgtacactgggggaatgtgtacactggggggatgttcacactggggggatgtatacaccaggaggaatgtgctcactatggggatgtgcacactggagggatgtttacactggaggcatgtgcacactaagggaatgtgcacactgtggggctgttcacactggaggaaccaggagtatgtacatactggggacaggaacattcagttaatcacacttgggatgtgcacactggccaaggcacttgcactcactatgacacccacagagcaatggcattagcagacctcgatcaccctccatggaagggcacccttcaaatctgcatacctggaaagccaccgtcggttgtggagtggtgagattgctgaaccacagaggctggaatgccctgtcctcctcctcagcctgctttgaaatctctattacgtctttcctgctgcccctgctgccagatgatcccagcagaatcttgtgctttttaaaatttgagtgttttgttttgcacag

SEQ ID NO: 16745 - DNA, 1948 bp, Artificial sequence
  DNA replication origin
cggcggtggggtggcgagggggggcggcggctgctggggcccggggggggcggggggggcggggggtgccggggggccggggggcgggggcggccgccggggggaagactcaggcatagggggctgcaggtcccgagccctgccctgcgggaggcagctaaggcctggcgagaaattgagcgcagcacaggtgggccagcactgctgggggacccggggcaccctccacagctgctggccagggtgctaagcccctcactgcccggagccgacagggccagccactctgagtgcggggctgccaagcccatgcccacccggaatctagcgggcccacgagtgctgcgcaaagccccggttccggcccgtgcctctccctccacacctcaccgcaagcggagggagccggctccggcctcggccagcccagagaagggctcccacagtgcagtggcaggctgaagggctcctcaagtgcggccagagtgggcgcggaggccgaggaggcgccaacagtgagcgagggctgcgagggctgctagcactgctagcactgtgtcacctctcactagcaccttccaacctcgggaaggttggaagtaggaggaaaacaggtgatttgggccacaagcaagccacacaggagtcagctgagttcgggtgtgtgtgatagtgtgccctgagaacatgctattttttttttttagcttactttcagtttctttccccagtttcctgagcacagatcatgtgcatggacacatgtatggacatgagcatatccccagcatgttgccatgtgctgagtgaagattgttctgaacagcaatgatttctttcagatctttttcttatactcagcagacacgcatgtgcagccatgaggagccatgcatggttccaggcaccctgcaggtgctcacacatggtgggattacaggtgtgagccacagtgcccagcccacactcttcttgagaacacagctaggtccttgagtccaacctaccaggcagcccttcgcaatgctgaaaacacactcaaaatccctatcatgactttttacagcacaataaaacccagcttccacctttttcccatccccagggattctgatacagctctttggggatggatgaggcctgggcaactcttaataacctctccaggtgatacagatgtgtaggcaagagggaggggcaaaagaaaaaactatcagctaatacctagcaggagaagcagtcaatttaatgcaatgatccagttatcactcagtgtatgaaaagagcagctcatcgtaaaaaaaaaaaaaaccagcatgttagaggtggccaccaccacagtgcccggggacatctctgggagtgggcctcctttctcctgtttgctggctgagccccttgttcttctgccactacaaccaggtcagctgtagacttgtcctcttggcccccggggaaaccttcccacctggtgactcgacagcctcccacagccagagcagagactcagacctctccaactgagtcaactttgggaggacactctatccttcaggctggcccaggagagtgttcgtgcccaaaacagcagccctgtctcctcctccacacactcaacactggacaacataatcccaggtggcaggcattgtccatcacagatgtactaggagctgataagaataccaggcctgggccagggctgctctggacccaggggattgctgagcgaggtgccaaaatgccccagaactaacgacttccagatgtgtctctacctgggaggggaaccaggatgaccacacagatggtctacacctccactgccccatttggcccttttaacatttgtattttgacataatttcagacttagaaaaaaggttgcaagaacagtacaaagaatggccataatcttcacccggatttcccaaatgttgacgttgta

SEQ ID NO: 16746 - DNA, 1701 bp, Artificial sequence
  DNA replication origin
acctttctcttttgctaaattatctggaagtcgtaacttcagatgccccatgtttttggtttttttttttttttttagacagagtcttgctctgtcacccaggctagagaacaatggcacagtctaggctcattgcaacctctacctcccaggttgaagggattctcctgcctcagcctcccgagtagctgagattacaggcccgcgccaccacacccgactaatttttgtatttttgatagagacggggtttcaccatgttggccaggctggtctcgaccccttgacctcatgatctgcccacctcggcctcccaaaatgctggaattacaggagtgagccactgcacccggcctgccctgtggtttttgagaacttttaacatgctatggcagatgaaagtggatttgcaagtcacttgggccttggaaaagacaccagttcgaaagaggcaagccgaggcacctcctccagagcctggtgaggccagctgccgagggctctgtgctctctctgggggtgtctgtggcctctccctctacctccaagggctgtgtcccaagatgtcatgaggccttgcctgtccccacgcaggacttccacggcacttgaaacctgtggcaaggagtctgacttttgtagctctgaatctctgcagaagaagaggtaaaacccaggagcaagcaagctacggctgacctttctgcagcgccttccccaaaacgtcactgcccacaggaccctctgtgtggcaatgacactttgctaaatcgactctctaccagtgtgtctggaattggtgggttcttggtctcactgacttcaagaaagaagcggcggaccctcgccgtgagtgttacagttcttaaaggcggcgtgtccggagtttgttccttctgatgtccagatgcgttcggagtttcttccttctggtgggttcgtggtctcgctggctccagagtaaagctgcagaccttcgccctgagtgttacagctcttaaggcggcgcgtctggagttgtttgttcctctcggtgggttcctggtctccctggcttcaggagtgaagctgcagacctctgcggtgagtattacagctcataaaggcagcgtggacccaaagagtgagtagtagaaatatctaccgcaaaaagcgaaaaaacaaagcttccacagtatggaagtcgaccggagcgggttgccacttttattctcttttctggcgccagcagcctgcttttcttctcttatctggccccacccacatcctgctgattagtccattttacagagagccaattggtctgttttacagagagctgattgttcctttttgacagggtgctgattggtgcgtttacaatccctgagctagacataaaggttctccaagtccccaccagattaactagatacagagtgtggattggtgtatttgcaaaccctcagctagacacagagtgctgattggtgcatttacaaaacttgagctagatacagagtgctgattggtgtatttacaatcccttagctagacataaagattctccaagtccctaccagactcaggagcccagctggcttcacccagtgggtctggcaggggggccgcatgtggagctgcctgccagtcccttacggtgcacccgcactcctcagcccttgggtggttgatgggactgggcgctgtggagcagggggt

SEQ ID NO: 16747 - DNA, 1378 bp, Artificial sequence
  DNA replication origin
taattacatcaccctcgttatcagtctttgccttgacatggaattttttgttgcaagaagggaaggaggcagtgcagggccaggtggggctgcccaagggtgttgtgaggctcagatagtgcctggagagccctcctggcgcttgggactgatgagctcaccacaagaagggccatgacctcatgactgcgggacattgttttttttttggcctctggaattgccaagattagctacatgtatatattattttcttcaggaaccataggcattcctgagataggaggattctgtacatttgcaaacctgtagggtttgagactcacagtgacaatccccagcttctagggctgtcatgaaaatggcatgggatgctgacccacatggggtgctgtgcatgacacactttgctgttatccactaaagctcccctctgcctgcccactaatcaaaggggtttaaaggtttgaagcctggctcatgtaaaagctgtgactcaaacttcaggattgggtgttaaaatggaggttactatgcgccacttcctaacaattctaatacaggactcgtgtgtgtgtgtgtgtgtgtgtgtgtgtgtgtgtggtggagagggtgtataatgtgtgctgtgtgtggggtatatagcttgtatggtgcatataatgtgcgtttctgtgtttctgtggtgtgtgtgtagtttgtgttgtgtgtatgtgtgtgtgggtgtgtatactgtgtggggtgtatagtttttgtggtgtgtgtaatgtgtgtagttgtgagtgtgtgttcgtagtttgtgctgtgtgtatgtgtgtgtagggtgtatattgtgtgtggtgtatagtgtgtgtatgtatgtgtggtgtgtgtgtaatttgtgctgtatgtatgtgtgtgtgggatgtatgtgtatatgtatggtgtgtgtatgcgtgtgtggagtgtacttgtgtgggtttgtgtggtgtgtatggtgtgtgtgtggtatatggtgtgggggggcatgtgtaggtggcatacagtgtgtgtgagatgtacagtgagtcgtgtgtgtgttgtgtgtaggtggggtgtgtgctgtgtgtggtgtgtgtgggtttacagtgtgcgtggtctgtatgtgtatggtatgtgtatgatgtgtgtatggtgtgtgtctggtatgtgaatggggtgtgtgctgtgtgtgctgcatgtgggtttacagtgtgcgtggtttgtgtgtgtatggtatgtgtatgatgtgtgtatggtgcatgaatggggtgtgtgtgtgtgtgtgagtgtgtatgcagggcagggaggagccaggaatcttcatgattccccagtggttctgctgcagatgttgcagagatcatactgcctccaaacc

SEQ ID NO: 16748 - DNA, 780 bp, Artificial sequence
  DNA replication origin
ggtctggggcgtcctcagaggggtgggggccgagctggaggctgaggcatgaggagttgaccaggcaaaggatcatgctgcagtatggggaaggcagtgggtgctggggacatggtcagccaggtggtgagcagtgagcggggtgggatggggtgatgagtgctccacggtcggggctctggcaggcattctggtcccttaggagcaaggagcatgtctcaggctgcaagcccaagaaaagagcccagggaggggattctccaggatgtgcctcagtgaggggcagctcctgagggcggcaggagaggcctcaaaggaggggaacaaggatgtctcagctgcacccaacctcagcctgacgccatggcgtgtcaggcaccaagggacccacagctctgccttcctcctgctgcagctttctctgctgtggccgtcacgccagaagcactgcaagtgcaggtgcgcatgtaagcacatgagtggtatgaacaggtgcatgagggtgtgtatgagtgtgagtgtatgtatgtgtggctgtgctgtgtgtgaacatgggaatgtgtgtgagtgtgagtgcatgtgacatgggaatgtggtgtatgtgtgtgtgaatctgtgtgcatttggcagtgtgtgtggatgtgtgggcgtgcttgtgaacatgtgtacatgtgcatgtgtatacatgtattagtgtgagtggatgtgtgtatgtttgcgtgagtgtgccaagtgtgtatgtcaagtgcgtatgtgcctgtgtgcgttagtgtgtgtggg

SEQ ID NO: 16749 - DNA, 2844 bp, Artificial sequence
  DNA replication origin
ccaggtgtcctgttctccctgcagccccactgtgcctttctgatccactccatgtgcaaaggcatggtgaaccacaaactatgaccaccctgccaaatatgtgacccaacagcacatctgttggtgttcggttggggctctgaataaaagggcaggagcacacactgctcacttactatggcagggcggtggagggaggctgcaggaggcagggcagggaggtggagggaggcactgtgggggggcaactgtggggaaaggcccccgtgagcaacaggggcctgctttgcagtgggagacttggaagccactgggctgcagagagcagacccacggacaggactcccttcccacatctgtgggtgttttgcttctctttgcttttatgatgttgctcagggcctgcaaacttcctttttaagaactatctttccgtctgcttgcttttcctctgcttattgagtacattgattcattgaggtgactgagctatgagcagtttctcactggataccaaaatgtacacgcgcttcaggcagtgcagactgtatttcccatggccgctcagtgtgtgtgctgtcagtgtgggttcagacatatggcccaaagtgtctctgagtgtacatttttcacactgcccgcacatatgcagaggagacgccagagagaatttttgtgtgttatctccatctccaatgcctcatgttctagaaaagtgtcctgtgagcctgtgagaaggtgtgcgtgtgtgcagtgtgggatgtgtgtgggggtatgctgtgggtgtgcattgtgtgttcattgtatagggtatgtggtgtgctgcgtgtgtggtgtatttggtgtgtgtgtggtatgctgtggtgtgtgcatagtgtggtatatgtgtggtatggtgtgttgtatgtgtgtgtggtgtgtgtagtatgtgtggtgtgtgtggtttgtggtgtgtggtgagtgctgtggtatgcagtgtgtggtgtgtggggagtgtgtggtgtgggatgtggtataaggggtatatggcatatgtgcgtgtgtgcatgtgatatgtagtatgtacatggtgtgtgtatgtggtatgtgatgtgtgtgtggtgtgtgtgatatgtggtgtgtgtgtggtgtgtgtgtagtatgaggtatgtggtgtgtgtatgtggtatgtagtatgtgtgtgatctgtgtgtgttatggagtatgtggtgtgtgtggtatgtgggtgtggtgtgtggtatgtgtagggtgtggtgtgtgtatgtgatatgtggtgtgtagtatgtgggtgtggtgtgtggtacgtgtagtatatggtgtatatgtgatatgtggtatgtggtaaggggtgtgtggtgtgtgtgtggtgtggggggtatgtggtatgtgtggtgtgtggtgtgtgtatatatggcatgtagtatgtgtgtggtgtgtgtgtggtatggttgtatgtgtgtggtatctgtggtgtggtgtgtgtgctgtgtgtgtggtatggagtttgaagtgtgtggttatgtgtgtgtggtgtatggtgtgtatggtgtatgtgtggtgtgtgtgtgctgtgtggtgtgtctgctctgtgtgtgtgtggtatggggtatgtgtggtgtgtgctgtgtgctgtgcatgtggtatggggtgtggtgtgtgtgtggtatgtgggtgttatgtgtggtgtgtgtgtatgtggtatgttgtatgtgtgtggtgcatgtgtggtatgggtgtatgtgtttggtatgtgtgccgtgtgtgtggtatggagtttgtggtgtgtggttatgtgtgtgtggtatatggtgtgtatggtgtatgtgtggtgtgtgtgtggtgtgtgctgtgtgtgctgtgtgtgtgtggtgtggggtatgggtggtgtgtgtttgtatgtggtatgtgtatgtatgtggtagttgtgtatgtggtatgtgctgtaaggtgtgtgtgtggtatgtggtatatgtggtgtgaggtgtgtgtgctgtgcgtgtggtatggggtgtggtgtgtgtgcagtatggaatgtgtcgtatgtgtggggtgtagtgtatgtggtatatgatatgtccatggtatgtgtgtgctgtgtatgtggtatggggtgtggggtgtgtgtgtgtgatatggaatatgtggtatatgtggtgtgtggtgtgtgtgtggtatctgatatgtgtgtggtatgtgatgtatgtgtggtatatgagtgctgtgtgtgtggtatggggtgtggtgtgtgtgtggtatgtgtggtgtgtgctgtatgtgtggtatgggatgtatggtgtgtgtatgtggtatgtgtggtatgtgtttgtatgtgatatgtgtatgtaagtggtagtgtgtatatggtatatggtatttgtggtatggtgtgtaggggagtgggtatgtggtatgtgtgttatgtgtagcgtgtgtgtgatatgtgtgtggtgtgtgtgtgctgtgtatgtggtatggggtgtgtgtgtatggtatgtggtatgtgtggtagtgtagtgtgtggtgtgtgtgctgtgtgtgtggtatggggtgtgtggcatgtgtgtggtatgtggtatgtgtgatgtgtggtgtgtgtgctgtgtgtgtgatatggtgtgtggggggatgtgtggtgtgtggcgtgtgtggggggtatgtggtatgtgtggtgtgtgtgtgtggtatgtgctatgtgtggtgtgctatgtgtgtgtgtggtatggggtgtgtggtgtgtgtgggggggtatatgtgatgtgtggtgagtgatgtgtgtggtatgttgtgtgcattaataaattcctaggctctcttcccagggtcactgggtgacctaggcagtcc

SEQ ID NO: 16750 - DNA, 2323 bp, Artificial sequence
  DNA replication origin
tcatgaggtcaggagatcgcgaccatcctggctaatgcggtgaaaccccgtctcttctaaaaaaaaaaaaaaaaaaaaaactgtagaaaggggaaagcagtccaaagagaagtatttcttccaagagactcatcagcacactgtgtttccagagatgtctttctgttaacagcattcttagactcaaaagtaaatgtagatatactttaaaaaacaaaaacaccttgctaagagatgaatttttagaaacttgttggacaaagaaaagtcattgatagtcaactgctgtgagaggcaagccaggaaatgatgattaataccctcaaattataataaaacccatgcctcattaggggctcgcccaggagtactgacttgtggatagacaccgtctggggaaaactctgtcgcctgtgtcaggctgatgctcttacattttatagccccttgtaggatagtgcatgttgagaagaagccgcttcacatcatcgtggtgcaggatctgtggtgtggtgtgcttcatgtgtgtgttttgtgtgtgtagtgtgtatgtagtgtagtgttagttgtgtgtactatggtgtgtgtgtggcatgtatgtagtttgtgtgtggtgtgtgtgcagtgtgtgtgatgtgtgtagtgtgcatgtagtgatgtggtgtggtttgtgtgtgtttttatgtgtagtgtgtagtatgtgtgttgcatgtagtgtgttgtgtgtcgtgtgtatgtagtttgtgtgtgtggtgtgtttgcagtgtgtgtgggtgtgtactgtgttatgtgtgtaatgtgtatgtagtttgtgtgctgcacgtagtgtgttgtgtgtactgtgtatgtagtttgtgtatactgtgtgtagtatgtgtgcagtgtgtgtgtagtttgtgtatgacgtgtgcagtgtgtgtaagatgtgtgtagtgtgttgtgtgtgtagtgtgtatgtagtttgtgtgtgtgtggtgtgcgtttagtgcatgtgtggtatgtgtccatatgtgtggcatgcatgtagtgggcatgtagtatgggggtgtatgtgtgtggtgtagtgtgtgtgatgtgtgtagtgtgcatgtagttgtgtggtgtgtttcgtgtgtgttttgtgtgtgtagtgtgtatgtagtgtagcatgtgtttagtatggtgtgtggtgtgtatgtagtttgtgtgtgatatgtgtgtagtatgtgtgatgtgtgtagtgtgtactgtgtgtggtgtgtatgtattttgtgtgtgtggtgtatgtgatgtgtgtagtacatggtgtgtgtagtgtgttatgtgtgtagtgtgttgtatgtggtgtgtatgtagtttgtgtgttgtgtgtgcagtgtgttatgtgtgttgtgtgtgtagtgtgtatgtagtctgtggtgtgtgtgatgtgggtagtgtccgtgtagtacatggtgtgtgtagtgtgtgtggtgtgtgtagtgtgttgtatgtggagtgtatgtagtttttgtgtgttgtgtgtgcagtgtgtgatatgtgtagtgtgttgtgtgtgtggtgtacgtgtagttggtgtgtgtgatgtgtgtagtgtccatgtagtacatggtgtgtgtagtgtgtgtagtgtgttgtatgtggtatgtatgtaatttgtgttgtgtgtgcagtgtgtgttgtttgtagtgtgttgtgtgtgtggtgtgtatgtagtttgtgtgtgtggtgtgtgtgtgatgtgcatagtgtgcgtgtagtgcatggtgtgtgtgtagtgcagctgtggcatgtgttcgtagtgtgtgtggcatgcatgtagtgtccatgtggtatggagtgtgtgtgtgtggtgtagtgtatgtgatgtgtgtggtgtgtggtgtaccgtatgtgatgtgtgtagtgcgcatgtagtcatgtggtgtgtttcatgtgtgttttgtgtgtatgtaacgtagaatttggtgtgtgcggtgtgtttcatgtgtgtggtgtgtatgtagtttgtgtgtatgtgtatgtgtgtggggtagtgtgtgtgatgtgtgttgtgtgcatgcagtggtgtgtttcatgtctgttttgtgtgtgtagcatgtatgtagtgtagcatgtgatgtgtgtagtgtgtttcgtgtgtgtggtatgtatgtagtttgtgtgtttggtgtgtgtgatgtgcatagtgtgcatgtagtacatggtgtgtgtgtagtgcaggtgtggcatgtgttcatagtgtgtgtggcatgcatgtagtgtgcatgtggtatggagagagtgtgtgtgtgtgtgtgtgtgtgtgtgtgtgtgtgtgtgtaccatgagggacatgcgcttt

SEQ ID NO: 16751 - DNA, 999 bp, Artificial sequence
  DNA replication origin
cggggccatcacttagcagggtctctaaggggagcctagagaagtagtgatgggaagggctgcccagggagctctgccctctcactgcagtggggaaggaaggcctgggccaattctggaaaagggaagcctgtgacactggtgggtaaggggtcagtagtgtcacagtggggagtggggccccatgtctctgatgccactggtggggaaggtggacctggtgtcactggaggggaaggtgagcctgctgtcactggtggggaagttgagcctggtgtctccagtggggaaggtaagcctagagtcaccagtggggaagttgaacctggagtaaggtgaacctggtgtcccaggtgaggaaggtaaacctggatgtggaaggtgagcctggagtcaccagtggggaaggtggacctggtgtctccagtgggggaggtagacctggtgtctccagtgggggaggtggacctggtgtctccagtggggaaggtggacctggatggggaaggtgagcctggagtcaccagtgggggaggtggacctggtgtctccagtgggggaggtagacctggtgtctccagtaggggaggtagacctggtgtctccagttggggaggtggcctggtgtctccagtggggaaggtggacctggatggggaaggtgagcctggagtcactggtggggaaggtggacctggtgtcaccggtcaggaagatgagcctggtttctctggtggggaagatgaacctggtgcctctggtgcggaatgtgaacctggagtcaccagtgggggaggtgaaagtggagtcactgggttttctcctcgccttggtgataagggtccgcggataacagagcaccttgttttacagctttacaatgttctagtcagattacacagaaagggcactaatcatttctcttcctaactcacccttcaattctggaaaacagtagacaatttttaatactgttgtctctctgctatccacatttgc

SEQ ID NO: 16752 - DNA, 1162 bp, Artificial sequence
  DNA replication origin
catgcctggctaattttaaaattttttgtagagatggagtctcactatgttgcccaggctggtctcaaactgctggacttaagtgatcttcctgccttggcctaccaatgcattaaaattacaggcatgagaccctgcacttggccccaactgccatcttgacactgctatttgaaaatccaatcaggatctcatatttaatgtggccaaaaagagacttaatttacccccaagcttccaaacttgctccttcctagacttttccatctcagtaaatgactcaagcccaacaggcagcccttgcccttgattctgctcttttccttgccttccacatacaataaaccctcacattgtcctgcagtcttcaccttctcatttcaaaatacattttgcatccatccaccaactcagtgagaggccactggaggttcttcatgaccttgaccagccattccagagggtggagggggcagtatggggatgggggatggccgtgcaggagctggaagcagagatagcacagatagcatctgcagacagcactgtttggtgcataacaggtaatggcaaaatagggctattggtgggggaaaatgcggggtcaatacaaaatgaaaatttaaaagaccaacataaagcatgttttcttgctattggaatggtctggtagagaggggacacaatggtgcaggaaaagaggcatctctgagaagatggtggtgggggatgcagagttcagcacctggagaaagggctgctctgcttcactgtgtccagaggtgcctggtgcatggaagcccagaagtcaggggttgggggccgatgatggacaagacagccactgcctgctggctttggttttctccctgaagggcagcttgtgggtggtggtggggggggcgctgtgaggctgaggacagaggctttgtgcaatggttgctccggagagtgggagagcaaactctttaggagaagagagtaaccctcctgggcaaggagagcgcttgttttgggttttgcagtcttccgtaagacaccaggcacagcatacttgtcattcccaacttgcctgatcatcttagcggtggtggccactgggtagggcccagagggtactgcaggcagggtgcactcgacagggttgggcggtcccagggca

SEQ ID NO: 16753 - DNA, 1304 bp, Artificial sequence
  DNA replication origin
tcgccccgaccagcagcttgggctggagctggagccggtcagatatttttctttactagtgaaccttgcctagcactgctaggttctccaggcaggacgacggcctttgggggctggtggacgggattggatgcctccctctctgctgcaaccgctttgggtccgtcttgattgttccccccaccgtttgccacgtgctccctgcgcttctggcgctgggttggccgcggggacccccgcacggtccgcgcacccctggggacccccgtgaacaggccaggaggtgggagctatgttagtcactgcggggttacaaatcaggatgtaaagtgggggccaggggccaggaaggagaaccaaggggcgccgcggggtgggggtgggggtaggcctcgcgggaggggccgcggaagcgaggccagcagcaccctggagaggggcggggagggtgcttggcccattctgggcgctgccaacgggtgacagactcagggtctagccgtgagggacgtgggctggggcagcaatggagcaggagcccggcagggcgggtgcgggccgggcttacgcaggccaggccgagagtacgcgcgtttgggtgggggtgggaaggcggggcgaggcccaggacagcgtctggtgtcagaaactggctgggcggggaccattccagaggccaggagagcaggaggacggacgcagtggggaggagggccctaaaattgactttggagcgggttacctgtgagatgtatcagggaggaatgtccagcagacaattggctacggaaatccggagctcagcgaagagaatggggccgcgtgaccatgacatttacccaaatgatcctcagcaggcctcgccaattcctggggacaccagtctctcatagaggatctttctgtcttctcagagtcacttttacaaatgttgccacagggttatattgcttagcttccttccttccttccttcctccctccctccttccctccctccttccttccctctttccctccttccgttcctcccctctttcctctctttccttccttccctcccttcctccctccttccctcctctttctctttcctctctctccttccttccttcctccctccttcgctcctctttctctctttcctctctcctccctccctccctccttccctcctctctttctttccttccttccttttttccttctttcctccctccctcccttcttctttccctctctttctcccttttctttctctccttcctttcttcctctcccttcccctgccccaccccttcccct

SEQ ID NO: 16754 - DNA, 1266 bp, Artificial sequence
  DNA replication origin
acagccccctcatgccccttgcagttctgaatgcctctcatcaatcccggggtcttgggggaatggcagaaggatccccatcacagtggggtctcccttttcacttataaatgcggcggggctgtgctgtgccttccgagtgaggaagggctctcttcagcccacttcacagaagcctccctggcaatccaagacccctagtccagctgcagatggcaaaggagacccaaagcacaggaaaaaaacgctatggataaccctcaacagcactgcagtggtctgaggctacttgaggctaagggtgcagaagaccagcccaggcacaggtgtcagggaaggccctgtcctcaagcgttgggaaggaggtgctcttccaatcagcctctgtcccccaactgagggaaagagtccggccaggggccacctgggaccacccaagcccactgcatcttctcctccttttccatctggtgacagctgcatttccgtgggtggccaggaggagagtttttgattcccttgctgccatgaagacatgtgtgaagaaaagaagctgagctcactctgagccaggtgttagagggctatggaatgaggggctttggtgctggtgctgcctggggatgttgagtgtgtgatggctcctaggatctgagcagggccaggaggacgcacaggagggccggggcgccaccaaaggcagggagaagcccacgtggacgtcatcagatcccctctttgttatttaactgagactctagtccaagaaggacaccgtgttgcgggccttgagagacccctggcattggcgctccagccaggcccctctgtcctgttgctgtgtctgcactgccctggcttccgtatgtttttgctgtatggccaggacctgtggctcccgtggcctgcccttgagctgcccttgagctgcccttggactcatggagctgttttgctggcaggcgcagaggcaggaaggacccaggggttttgatcctcatcgccgtcctcccggcctcatgcctttggccaagaggaccagagtgggagtaagaagcccgggcagacgggcagacttgagggtgtcattaggatccgagttcccctaggggttgggctccacccaccctgccccggaactggcccgaaattgtgccctgcctgctgctcccctctgggccctgctctgactcgccctccccagtatcccctggagcccccttcgtcactccctgggtgctcatctcacggcgtgctcctgaggaa

SEQ ID NO: 16755 - DNA, 1362 bp, Artificial sequence
  DNA replication origin
gcggggaggcggggcggggccgcggagtgcccgccccggcccgcccctgccggccgcggccattggcggcgggccgggggcgggtgcgggcgcggcgattggggccgcggccgccagtcacgcggggctggcgggcggcgacgtagcgcggcgctcggaactgacctactaacacacatctctccgcgcggccacggcgcccgcggacccggcgcgcccgcccgcctcccgcgccgcgccctcgccgccgcccgcctcccgccgcggccccggaggcccggcccggcccgagccccgagcgccggcggcccgactcccggccgcccctttctttctcctcgccggcccgagagcaggaacacggtaagcgctccgcccaccgccggccgggggcccggcgaccgctcccagggcgcgctgcgggcgggcgggcgggcgcggggtgcgggccgcgctgtgtgcggggtcgggctgtaagctgggctcgccagcggcggcgagtgcgcgcggggcattcattacataaacttttgctgccttgtcaggatgggactcgccaccttaaggtggctgctttgattgcagcgccttcgcgccggcacgtagtcctggctggtttgcgctctccccccgctgctgttgcataatgtctcctgatttcaggaaaattgatgttttggtaaagaagagcgccaggcaggctgagccctctccgagcgggaagatgctctttcctctctagtgtctttctttctcgttccttctctggggctggcggcgtaggggggagaggaatggggggttgaggaatggggaatagtcttaatttgcttggtgagaaaaagggttggtagcgtgaacggtgacggcattcggagaatgcctgcgcggcgtttgtttgtgtcaggggctgtgtctgcacagacgttttccaccctgtttgtcgtcagcgtgttttacaagccctcgggaaggttgtgggatttgtcctttcatacattgcataatctgcccacggtgaaatgttggcaagaattgcgggctgatgtgggaatatgcgcgtatgtgtgcaatgatttggtaattgaggcgcagcgttggatattagatcgttatttacgtctatattacgtcccaaataaacaggttttaaaacgatactacaaaacctaaaagcaagaattgctcgcattgaattctgatcttgggtactactggggttcgccctttcaatgttctcagctgttatttttaaatctgggacgaaccattgtgacgtttacctccccaccttcctaattttaatgcattccattcgatcagccctttttctcaccttattgtcattgctttttcagacac

SEQ ID NO: 16756 - DNA, 990 bp, Artificial sequence
  DNA replication origin
ccccggccagggccaccgccgtccgagcgcccgcgagggctggcgccccattcccggcgcaacgagtgttgcgcaacggcccacgcggccgacacgaccggagcgagcctgcggaggagcccgggagccccccgtcccaccgccccgtccgctcttggctcccttcaccctcccggtcgccgcggtggctctgcgctccccgcgaccctcacttgctcgcagaggcgctttttgtcttcctgagagccgcagcctgctgggctacctgttgccgactgagcactgcgggttgcggctacccgggcgtggcccggacctcggcctccccttccccgcacactcccgagaggagccctctaccttggggtgggcaggagggaaggcggggggtggcggctggcaagctgccaacactcggggcgcgctgcggcggggaaggggttggcgcggccgggcagctgcgcagggctgcgcggcggaggcagcgattaaaatgtcccggcgcctctcccgagagccgcgacggcccggagccgggagggaaagctccacgcacaaacaccgccccctgcacaattagggcgaagatgacggctgcaaagttgttgcgtaacacgactgggaaacgaggctcgctgaggtccatctacccacccccgccacgcgggtgcggcgttcctcggaggatgtgaaggtccgcgctcgggtgcccccgctgggacgcccactgtcgtttggtgctggggcttgagacgaccgcgcgggatctcttcctgtgattttgagctgatagctgcttagtgttatttctgcgtctaactggatacggtagtcttctctcccaaattcccgggctacggaagagacgtaaaaaaatggaaaaaagagcacctagccgcgacttcttaagtcgtcgcgctagactgtcaaggcacgtggcacactccctgcgtttaccgatacacggatagtggtcagtgctggccttgg

SEQ ID NO: 16757 - DNA, 872 bp, Artificial sequence
  DNA replication origin
acctgtctggacccctctcccttcccagacaccgcctccactttgactcatcaagtatcgttcacgtaggcaccccagtccatctggagttagcccctggtggactgcagcaatgaaagggcagggctgggacatcttggggggagtgatagttgccctgtgggcggaggttgttgctgccgtcctgcgggggttgtagctgccatcctgggaggggaagtagctgccatcctgggggagttatagctgccaccctgggggggaagttgtagttgccatcctggtgggggttgtagctaccatcctggggggttacagctgccatcctgggggagttgtagctgccatcctggggcggggggggggggttgtagctgctgtcctgtggaagttgtagctgccctaccaggggacttgtagctgccatcctcgaggtggttgtagctgccatcctgggcgaggaggttgtagctgccattttggggggattgttgctgccatcttgggggcggtggtagctgccatcctgggggtggtttatagctgccatcctgggagggttgtagctgccatcctgggagaagttgtagctgccatcctgggagaggttatagctgccatcctggggaggttgtagctgccatcttggggaggttgtagctgccattctggcggggggggggggttgtagctgcctgggaggggttaaagttgccatcctgtggggtgctgtagctgccatcctgggtgtggggcgcggcttgtagctgccatcctagaggggtgtgacagttggcttctgaagttccagagatatagtcactttcttctggtgcctcccctgggtacttgcagatgcccaagggccttcc

SEQ ID NO: 16758 - DNA, 1907 bp, Artificial sequence
  DNA replication origin
ctcggggttggggagtctggggcggggcggggcatcagggggctgagtgggcagtctgggatgccaggctgggggtggggactggatgaatgtcaagggcgcaaggtgggtcccccgctaacgcgagtctcgcgggctctgcagcggccttcaccatgatcggcacgtctacgcacctgtcggaccagtgctcacagttcgccatcccatccttctgccacttcgtgtttcctctgtgcgacgcgcgctcccggacacccaagccgcgtgagctgtgccgcgacgagtgcgaggtgctggagagcgacctgtgccgccaggagtacaccatcgcccgctccaacccgctcatcctcatgcggcttcagctgcccaagtgtgaggcgctgcccatgcctgagagccccgacgctgccaactgcatgcgcattggcatcccagccgagaggctgggccgctgtgagtgcccgagggcccggggcgggaccggggggcgcagggagtgtagggcccttgaaatgtgtatgggggtgtcggtgaagcccagggagccccatctgtccaggccccacagaacccccttagcagccgagggccccacagcctaggcctccattccagcagggcagcaggcggggcctcggatcaggggctttggagccattcagccccaggctcgcatgtgggcttgcactgtgtccagctgtgggactcaggtgaagtccctccacctgcttgagcctgggatttcccttctctgaaatgggagtgatctcacttcctgtggaaatggctgttgcgggcatgagaggagacagggccagcttcctaacttgcccgacggtcagcacgcactcgggccgccaggcgaaaatgcagactctcaactcctgccccaacctcctgaaacctggaggatcagtccccagaaacctgtaggatccttagccttggatgaatgtgaggcccacggagatgctgcaggactggcctgggagggcacctgagaagaacctgtaacaatcaggcatcactagggaaggaaatacagggaagcaccgtgcacctttctacaggtccctgaatcgtggggcctaagggatgagcgtgggggagggggacagttctgagcccggggcctgggtgtggcctgtttggggtctgcacaggacgaagagcatgctccccactgcccctcttgctggcagcagcccctgccctctggaggcttagtaaaccccaagttgtgagccccagcagggtggccatggccagtcaggatggcagacacaggacagggagcgctgcttatgtctccgaggaaaaccattggctgacatcactgcatccatacgggttgttgcctccctgaggagtgagacctagggaacgggccacctccgccacagctccggggctgtatttagcatcgttggctaatctgggggtccaggaatggccaggactccttaccaggaccagccagggcctggtccttgggcccgttgcctgcattcagaccctcattgtgaccctggacaagttgctaagctctcatatccttatattccgtggggatgacaccagtactaacccgtggggctgaaatgaaggtcaaatgaggcaatatttaggaaggtggtttttttgtttgttttgtttttttgagacagagtctcactctgtcactgaggctggagtgcagtggcataatcttggctcactgcaacctccacctctcaggttcgagcgattcccctgcctcagcctcctgagtagctgggactacaggcgtgcgttaccacatctggctaatttttgtatttttagcagggacggagtttcaccatgttggccaggctggtcttgaactcctgacctcaagtgatccacccgccttgttagcc

SEQ ID NO: 16759 - DNA, 1544 bp, Artificial sequence
  DNA replication origin
cgcaacagccatttccacaggaagtgagatcactcccatttcagagaagggaaatcccaggctcaagcaggtggagggacttcacctgagtcccacagctggacacagtgcaagcccacatgcgagcctggggctgaatggctccaaagcccctgatccgaggccccgcctgctgccctgctggaatggaggcctaggctgtggggccctcggctgctaagggggttctgtggggcctggacagatggggctccctgggcttcaccgacacccccatacacatttcaagggccctacactccctgcgccccccggtcccgccccgggccctcgggcactcacagcggcccagcctctcggctgggatgccaatgcgcatgcagttggcagcgtcggggctctcaggcatgggcagcgcctcacacttgggcagctgaagccgcatgaggatgagcgggttggagcgggcgatggtgtactcctggcggcacaggtcgctctccagcacctcgcactcgtcgcggcacagctcacgcggcttgggtgtccgggagcgcgcgtcgcacagaggaaacacgaagtggcagaaggatgggatggcgaactgtgagcactggtccgacaggtgcgtagacgtgccgatcatggtgaaggccgctgcagagcccgcgagactcgcgttagcgggggacccaccttgcgcccttgacattcatccagtccccacccccagcctggcatcccagactgcccactcagccccctgatgccccgccccgccccagactccccaaccccgagccccgcacaccaccctggagaggctccccaccagcaggccagcctgcccatcacctgctctgatttgcagcagtcacagaaaagtccctggtcccagggcctcacttagaaacatcagaagcagaacaagaaagaaggaaaactcggccccctagctcactccgctaggtgcttcttccaggacaagagggttcagacttcagatgcaaaagcagatcctaaggacccgccatgtgtggagagcgcaggccaagaagtgcagtaccgagccccaggcttcccaatgtcccagatctgtctggggagaaggctgtcccggaagagggagtcagctcagctctgtgaactgcagctggaggagacagttggtaaaatgcggaaagccaagagggtgagagcagcaaagtgggaggagagccgcgttacaactctggaaggttctgtgataagggggagcagaaaaacccgaagatccagagccccctttggtagggcggtttgttttttaagggcaagatgtcagaggatgcagtttggtggttagaagatggggtgagttcgggaacaaagtgggggtgttggggagagatctgctgcacctggggtgcatggctggacactggtaagggtgaagaagctggccaaggcagggctctaaggaatgcatcagcctgccctgggctcactaccccattttcacctgtgaaaggctggcttacaacaattgagcttggggacagtgg

SEQ ID NO: 16760 - DNA, 1278 bp, Artificial sequence
  DNA replication origin
aaggcaggcagagccacagcccatgggtctccccacaggcagtctatatctctccttctgagatgttcaaagtgatttagaagtacagatggtcagttaaagacacctcttcaaatgctttgtcacatttttaggagatttaagatcatgtcaacttaaggtagggcagctttgctgtgggatggttatctttctctccaagtgtcttgtctctgtgaagtggggctgaaaaccaatggtgagtggtaaatgctggtctcttcccccttctcccataccctcactcctttatctcatgtttaaatcctccatggactgacatgtcatatctctggaaatatgtagaaccaggcaattctagagtgtgtgtgttgggggggtgggggggtggtaaacaaggacccactgaaggaggggatcgcggatgccagggagggccctgcataccacagcggggagctgtggggtggtgtgggagccttggcaggtgggcaggaagcctggcggggggaggtggcttctgcaaggagatcaggtccaggctgggggacagagctggcattcggggcaaggccgaggaagcacaagtgtccacgtctcaagacaagaaagagcgtgggtgatctgagaccagccagaggggaaagggggctactcttgtgggaggtgaggctgcccaaagagcctgggcaggtcctcggctggggttggtgaagatttggagcttagttgaggtaggtggaaacgccttggagggtttcagcaaggaggagatgtgatctgattgatctcttgaagggtctcctgtggctgtgaacatttgggtaatgtggtagagcatggaggtggggccaggccacagcagtgagcccgagcaaggttgctggtggctaccgtgagggcaggcccagggagaaagacaggggacactggctccgagacctgtattgggatagaactgatgaccgatggaccggcttgaggaatccagggaagagggagccagatggcatcgggtgtttgccttgagccactgggtagaaggtgaggctgcttaccgtttatggagaagggttttctgagagaggagatgcacaggctttgggggtgaccgtgagcaggtagagagtggccagtagggtcccatggggcaggccgagtttgtgccgtgagagccagtctcagggcaaccccttccacgggcgctgatggttttgtgttgctgttgggtttttgagacatgcctatctccatacatctgtgttgcctagggatgtg

SEQ ID NO: 16761 - DNA, 949 bp, Artificial sequence
  DNA replication origin
cgggggtcctccacttactatcatggggttcttcagaagcactcctcagcatgtgattcatgccaggatctgccctgctttttagatgaattatgtcatttagtctttgaaacagtctgtgaggggagatgctgtttgtcccttttacagatggggaaactgaggtagagagaagcagcatgccttgcccagcattatgtccccagaatggtgaatctggattcatctggggcagtttggctttccaagactctgctctcccatgagaagcccacagtctgcctctttccttgcccagggtcagcggtgagcccacgtcagagtggtgtaccttcctttctttatgtggccaccagggcacagtcccacaccgtggtgggtggcatcccagtgatggtgccagagggattttacatggaaagattttgttatttacatttcctaagagaagggtacctgccatgccacgcagggcctcaagggcagcagcaggttgggttgggaggcagaggggcagtgaggggattgggaaatacaaggcagtgggggacggttccagatgggctgatgtgactcttgttggcaggctttggggcctgggggtgggggctgttcctgggtgtctggtgcctggtgcctgccctggggtcacatagggccaagaagttggcttggcgtgtgaatgtaatgcagaaggtggtggcaggtgagtgtgatgcaggaggtggcgggaagtggggctctagggtggttggtttgcataagaaaggcgagctcccagtgggccctttgctgtctctaggatttgccaggcctgggaagggcagtctctagctagtggggccacaaatgcaggagcatcaaggatacagaaaataaaatatagttgatacaattgaccctgtgatgaatggatgccaagtagacagttatagaatctagaggctgg

SEQ ID NO: 16762 - DNA, 1546 bp, Artificial sequence
  DNA replication origin
tcccaggacccgggcttcctccccgaggtcttcctccttcaagggcacacggccccgagtgtcccccgtctgtctcggagcgtccccccacccccagggcggcctgatgcctggcagaatcctggggtggacgtggccccggagaagcggctcttgcggcgggggtgggggcgccggcggctcccgggtcctgactttcccagcccgcgggccgcttgatggaaacgggctctttggcatcccttttgttggtccctgaaacctcctctcccccaccgctctggggtggccgaagtggtgtgtgatctggattgaaatggtttgtgactgggatcgcgggtccctgagcggctggggcgcggccgccttctggccgcgccggggggacccccgggacctgtaggaggctggcggcgggaggggcggggcccggctcctaggtgggtttcctcccggggccccacttcccccgagtccctgcgcggtttcggctgcttggatccggggcgcagaggaacggcggggaggttcggaagtgcagcttgggacctgcctaggttgcctggaggaggcggcgttagctctggcggtgcagactccgggagcacctcccgcccgcgcgcctcgggccggattctcggcaccctgcgggggtggaggagggcgggcggggccttcaggcccaggagcgccagagacctatggggttcgcctgaagcccccggaatgtgtgagacacttcttactagtaaatgggcttcagtatcccccatccctgcactcctgcaggaaggtgagaatcgggacagtcgcaggctgggagacgctctgcttttcctgcgtcctgctgggagctgcgcgctccaggtatcctggcctgccgccctagccggcccaaggtacgcgagtcagaaaggctgcacagtctttcctgggggggggttttagtttaagcagatgttgattacgtcagacattcctaattacttgatttgggaagggagcttgcgtttatctcactgtgcattaaagcataaaccgctcagagtgcacaataaaataagtagaccacattctaagttggtatccatcactcaagacctctgtcgatttctgcaacccctcccccaagaatctcccaggagatccctttgctgggggagaggggtggcggggaggcggcttaaacacgttgctggacgtgctgttgggcggcttttgctgttcaccctgcggttaattgtcctacaaaaactctgccttgcagaccatgagggttgagcgcagcctttgaggggcggtgctgtggtgggggtttttagatgggtgatgaggaaagcatgatgggtccattgcttaagccaaggtggttgtaacaggaaagttccttgagttttgggtgaaggaatttaaacactcatagtttccagtgaatgtacaaatgtcttatatgaacaaagcaattggagtcgttttctttaatttttgaaccctgttctttttctagtgaaatactcataatctttataggagagggcataggata

SEQ ID NO: 16763 - DNA, 817 bp, Artificial sequence
  DNA replication origin
agagagcaagaacatagcacagaatgggcctgaacaggtaaggaggtgtcagatccccagggctatgaaagatttcaggctttcacttaggaacaggagcaaggcatttggcagaagcatcgttagctttagtttgaagagatcttcccatatatgggtggagaggagactggagcaggtggaagctagagatggaaagactagttaggaggctcttctccaggcaaacgagacaagcatctccggctagggtgatggtgatagagagagaggacgggaggcagagggcattgggtggagaccaaaggccgtgatgctaagtgcacataggagagagggcaaggagggggttgggcttctgatcttgtggaactacacggatgatggtgccatcaagtgcaggagggaacgtgggaaaaagatgaggtttggggcagggtttggggtagggcgatgtagagcttgagtccatgatttaaataacttgagtttgaggtgccattgggacagtcatgtggaaacgccaggcaggcagctgcaaatgtaagtttggaggtcaggggagcatgccaggctggagttacagatttaggaggtgctgggcacataggtgacattggaagccatgagcttggaagagatttcccaccgggagagtgtggagcaagatgagaggatggcagaggaccaagaccagcataatcaccaagtggaagaggttaaggtgcaaagaagaacaaggagaaatggctaaataagtagaagcaaaaccaggagctcttgatatcatacaagccgagggaaaacatgttttgaa

SEQ ID NO: 16764 - DNA, 1061 bp, Artificial sequence
  DNA replication origin
tcagtggtctcctttagtttgtcataattcacggctttatatgcagctttctgaagcccttgaactaaacaagagatcatgtagtcctgcctggctatgccttgggcccctgcctggtaggtcctttggggccttcacgggtactgccctagtgcctggccttggaggccaggctcaaggcgccagcagtcatcagcataagattgagctagggtccaaagtgaagatgacatttaagtcattccaagtgggattataggactgtgttaagtattggaattcttgtatatatttgagtagggtctgacggaaaagagcctgaatgctgactgatttgggaaaggtcagatatagagaaagggatgtgaacctggacttttccttcggctcctgccacctctcaaaggggaaattgctgggcaggggcatgggggtcggcttcagggtcaaattgtaagccagagcaggtgtgaggagggatggtaatgggagggacgtaaaggggtggcttgtgggtagaactcggttctgagggggaattagggccaggttcggataggtgggttggggggagaaagattgaaggggttaacaggtaaagaggagtcagcatccccagtggaagaaggagaggtagatggaagggagataaggaaaatttgggatggaccacattgggagcagagactagggagagatcatagtaaaaaatgcctggatgtagggtacctcagaccatttgcccattttgcaaccgaagttgtctaagtcccgcaaaatagagaaattgaaagtgctgttttctgtccgctgagagccattgtctaatttatattggggccaggccgtgttacagaaaaaaaaaattagacgtttaggctttagattgggtgaaagctaagaggtttgaggtttttgaggacagaagccagtggggaagatggagggtgggaggttgcccatgttagaactgggaaagtttgaggggaaagaaagagacaaggaaaagagcaaccactagcatcctcagtgggcatccccaatggaggtcccgggttgtg

SEQ ID NO: 16765 - DNA, 1139 bp, Artificial sequence
  DNA replication origin
aagcgcttgagtaggggttgcctctagggccttttttagagtaaaaggaggggcgagggaaggatttaggatctgtgggttcagctaagtttccttttgtgagtttatagagtggtttggttaggatggcaaaacctggtatccaaaggcagaagtatccaacaacgtctaagaaggagaggagtagttgtttggtggtggggattggaatttggagattagctgaatacggtctgctggaagtgcacacctatgttggtggaggattataccaagataagtagaaatttgagctttggagggggatactctgtaccccttggagtagaggtgttgaagaagcaggatagtgtcttgctgggaggattggtaagaggggctgcaaagaagaaggtcatccacatattgaatgagatgggaaacaaatggacgaaaagaaagcaggtcacgggagagggcctggctaaagtagtgtgggctgtctctgaaaccttagggcaggacggtccaggtgagttgttgggactggtgggtgtcagggtcagtccaagtaaaggcaaaaaggggctgggaagagggatgtaaggggatggtaaagaaggcatctttgaggtcaataacagaataatgagttgtggaaggcggtattgaggataggagagtataagggttaggcatgacaggatgaatggggaggacaatctgattgatgaaacgaaggtcttggactagcctgtaggatttatctggtttttgaataggtaggatgggagagttgtaaggggagttggtagggactaagaggccatgctgtagtagacaggtaataacaggctttaggccccttaaagtctgttgtgggatggggtattggcattgagcaggataagggtggccatgtttcaatgggatgataaggggtgaatgatcagttgcaggcgaaggagtggaggtatcccatactttagggttaaggtggggagatgaaaggagaggttgcgagggaggtttggaattggataaaagggtagctctgagatgtggctgtagtccaggaatagtcagggaggaggataatttagttaaaatatcttggtctaataaggggactgggcaggtggggataactaggaaggagc

SEQ ID NO: 16766 - DNA, 1631 bp, Artificial sequence
  DNA replication origin
ggcggtccccaccgacggcgcagcccgccgggaccgggagaaagcagctgcggacaccgcgcccgtgcgtctgcgcgcctggccgccaggtgacccagcagcccggccgccgagatgcccaacccgcccaggctccgggcgctgtgacttcgcgccgctgtgtgcgcctccccgagcgccggctgcgccccccagcccggcccggggcctaccgcctgcccggccccctgccactgccaggaggacggcatcatgctgtctgccgactgctcttgagcttgggctgtccgccataccgggggacctggatcccctgacggcttacctgtgagtactgcccgcctgtctccacctggtactgcgggctgctggcttgcacccagtcctggcctcagcaggacacctgcttgcttggtgccctggggcgtgggcatcccggagagggttcacccccttccaagttgaccgttgcgggactggggaggggagaagagtctgagactaaatatcaggcgagcagggagaccaggcttccctgacttggcttccccattggcctccgtgcttgtgggctgactgcgggagcccaggtttggcaaggtgggttctggaccctaagcgggagggcgcggggctggctcccccatctcctgttgctgcattctcttccagcagagcagtgcccaggatggtggctgagggtaaagctgacagaactggaggtggaggtgaggggagcgtgccccagtggggtggaaataatgtctgttcttctgccatggtgaggacaacagggctgtcacactgaggctgggtggccttctttggggggggggtcccagaagctgggaggggggccttatccactcttgtctcctcagaaagggactctgccagcaccatctccctttactggggcctcccggctcccccaggggcctccctaaagtcatgtcccaagaggctgtgttggagacactaatttgtgggcaggcgcggaggctgaaaagcggagaaccatttttagcgtctgagttggggtgagatggcccgtgaaggggaccctattgggggcagctgtcctgtccgtctggctcacaggagcttcccctcagagctggagggctgggggctctcgctgcttaccacatgggcaggaggagggtgagagagcacattccaggccacctacccgcacccccagccccgctctggggaaaggagacctcctccagcccagctctgcaggctccatcaacttcctcagaggagctgggagcaggtgggaaagcctggggccttctgctgagggctaggatcccagagctccttctggcctgagagagacccctcatggcttctagcatgtgggagttctagcacgtgggagcttagaggaagaggacgctgggcgaatctttataggggcctagcaagaatttgtggaactaaaaggatgctcagtgttggcagtgtcctggtgggaggcagagggtcccagatggcaactcttcatggggctcctctccaaatgtccctgtccctaggttgggatgtcctcctccactccaaaaggcacaggctgtgggccaggtaagggagtgagaagagaaaaataatgcccatcttct

SEQ ID NO: 16767 - DNA, 694 bp, Artificial sequence
  DNA replication origin
ccttttcttaccaaccagggaaaaggagtggagacaaaaggaagaaggctaagaactcggctctggggtctccagcactgagaggccggaagggcccagcccctctcaggccctgtacatacagctgttccttctaggcttcaagcagtgtgttgtcctgggtgtggaaggcagagggtgggtccacgtgtgatagattcagatccataattgtccactctgagggtcagctcaggagctttgatacctggagatttctatctggtgggtctgcagtgggaccctgactcagaaagaggaggcacagagcatccgaccttgccacctggtgtctcagacatgatcatcgcccaaagctaactcctctttctttgtcctcagggtgattctggggggcctctagtctgctatctcctcagaggcagctggtagcaaaaagtgggagtggagtggctggcgactggcaccagcagctgagcgtgagatgctgctgatgtgtcaagggagcagtgactctggcaaggcagaggctgtggacaaagtggctttggtggcatgagagggacaaggctggtttgggtgattcagtgcagtcaggcctgggaggagtcttcagggaagaaaggtggagaaatggggcagtagctggaggagattgttgccatgccttgacgtgggaggcatgagagggagg

SEQ ID NO: 16768 - DNA, 743 bp, Artificial sequence
  DNA replication origin
aggaattctttggcaaaagactgcttcctgggtctcaggggtcggacatggggagggtcagggcggggtcaggggctgtcttgggagggggttagggacgggttcagcgcctgtctggggctggggtcagggcgaggtcaggacctgtttcccaggagtcagggccaggagtcaccgcctgtttcgggggtcagggtcagctccagttccccttccttctgtcctcgtgtcaggcgatgatgggtgtggggtcaacgcggaccagagcccagccggggcccctgctctggtctctgctgccgctgctgctcctgagcccagaggccgcccctgccccacagtcccgcgccgccagcccctcgcaggctccgggggaggccagagagagcttgggggcgcagcagggccgggagcccgcagccagagcccaaggtccgtttgaagcagagggtgtggggccgagccggcctcggaggcagagggcagggggcagggggcatttgagggggccactgggccacgggggcagggggtcgagggctcggcaagaccagatgaggtaaggagtgtccgggagaggcaggcgtctgcggagagatgggggaactgcaggctagaggcggtggggagaaggccggggctctgggcctggtgccagggccggaagtcacccgaatccgttgtctctctctccttccctcccagccaggtggctccagagacgacatcaagcaaggtgggtc

SEQ ID NO: 16769 - DNA, 898 bp, Artificial sequence
  DNA replication origin
catcccatctaggaagtgaggagcgcctcttcccggccgccatcccatctaggaagtgaggagcgtctctgcccggccgcccatcgtctgagatgtggggagcgcctctgccctgctgcctcgtccaggatgtgaggagcgtctctgcccggccgccccgtctgagaagtgaggagaccctctgcctggcaaccgccccgtctgagaagtgaggagcccctccgcccggcagccgccccgtctgagaagtgaggagcccctccgcctggccagccgccccgtccgggaggtgaggggcgcctctgcccggctgcccctactgggaagtgaggagcctctctgcctggccagccgccccgtccgggagggaggtgggggggtcagccccccgcccggccagccgccctgtccgggaggtgaggggcgcctctgcccggccgcccctactgggaagtgaggagcacctctgcccggccaccaccccgtctgggaggtgtacccaacagctcattgagaacgggccatgatgacaatggcggttttgtggaatagaaaggggggaaaggtggggaaaagattgagaaatcggatggttgccgtgtctgtgtagaaagaggtagacatgggagacttttcattttgttctgtactaagaaaaattcttctgccttgggatcctgttgatctgtgaccttacccccaaccctgtgctctctgaaacatgtgctgtgtccactcagggttgaatggattaagggcggtgcaagatgtgctttgttaaacagatgcttgaaggcagcatgctcgttaagagtcatcaccactccctaatctcaagtacccagggacacaaacactgcggaaggccgcagggtcctctgcctaggaaaaccagaga

SEQ ID NO: 16770 - DNA, 1168 bp, Artificial sequence
  DNA replication origin
agtggacacagcacatgtttcagagagcacagggttgggggtaaggtcacagatcaacaggatcccaaggcagaagaatttttcttagtacagaacaaaatgaaaagtctcccatgtctacctctttctacacagacacggcaaccatccgatttctcaatcttttccccacctttcccccctttctattccacaaaaccgccattgtcatcatggcccgttctcaatgagctgttgggtacacctcccagacggggtggtggccgggcagaggtgctcctcacttcccagtaggggcggccgggcagaggcgcccctcacctcccggacagggcggctggccgggcggggggctgacccccccacctccctcccggacggggcggctggccaggcagagaggctcctcacttcccagtaggggcagccgggcagaggcgcccctcacctcccggacggggcggctggccaggcggaggggctcctcacttctcagacggggcggctgccgggcggaggggctcctcacttctcagacggggcggttgccaggcagagggtctcctcacttctcagacggggcggccgggcagagacgctcctcacatcctggacgaggcagcagggcagaggcgctccccacatctcagacgatgggcggccgggcagagacgctcctcacttcctagatgggatggcggccgggaagaggcgctcctcacttcctagatgggatggcggccgggcagagacgctcctcactttccagactgggcagccaggcagaggggctcctcacatcccagacgattggcagccaggcagagatgctcctcacttcccagacggggtggcggccgggcagaggctgcaatctcggcactttgggaggccaaggcaggcggctgggagatggaggttgtagcgagctgagatcacgccactgcactccagcctgggcaccattgagcactgagtgaacgagactccgtctgcaatcccggcacctcaggaggccaaggctggcggatcactggcggttaggagctggagaccagcccgatggccaccttcttataatgacaacagtcatactggattaggggcccacgctactccagtatgacctcatcctaactagttacatctgcgataatcctatttccac

SEQ ID NO: 16771 - DNA, 1450 bp, Artificial sequence
  DNA replication origin
ttggactgttacacttacgccgctagttcttgaataaacccagtataatcataatatattatttatatattgttggatttggtctgctaatatatacgtattttaaaatctatgttcattagtgagactgacctgcaaaattttccttctgacgtccctgtcagtttgtaatatagttatgctggtcttaaaaaactggtagaactcgtgaagaatatagagacctgtggtatctcttgtgggaagatttgaaattatgaactcaatatcctcaatagttatagacaatttagattttctgattcttcttgtgacaattttattgtttttttaaagaaattattcatgtaatctaaatatatcaatttactagcataaaattgttcatagtattgtgtgcagaactgctgggttcttggtctcactgacttcaagaatgaagccgcggaccctcacggtgagtgttacagttcttaaaggcagcgtgtccagagtttgttccttctggtgttccagtgtgttcggagttttttccttctggtgggttcgtggtctcgctggctcaggagtgaagctgcagaccttggcgttgactattacagctcttaaggcggtgcgtctggagttgttcttttctcccagtgggttcgtggactcgctggcttcaggagcgaagctgcagatcttcccccatgagtgttacagctcataaagtcagcgtggacccaaagagtgagcagcagcaagatttattgcaaagagcaaaagaacaaagcttccacacagtggaaggggacctctggtgggttgtcagggctagcttgggcagcctgcttttattgccttatctggccccacccacatcctgctgattggtccattttacagagagctgattggtctgttttacagagagctgattggtccgttttgacagggtactgactggtgcgtttacaatcgctgagctagacacagaagttctccaagtccccactagattagctagacacagagcactgattggtgcattcacaaaccctgagctagacacagggtgctgattggtgcatttgcaaaccctgagctagacacagagtgctgattggtgcattcacaatccctgagctagacacaaggtgctgactggtgcatttacaaaccctgagctagacagagtgctgattggtgcattcacaatcccttagctagacataaaggttctccaagtccccaccagatcagctagacacagaacactgattggtgcatttaccaaaccttgagctagacacagtgtgctgattggtgcatttacaaaccttgagctagacacggagtgctgactggtatatctacaatcccttagctagacataaaggttctccaaatccccactagactcaagagcccagctggatgagcccagctggattcacccagtggatcc

SEQ ID NO: 16772 - DNA, 1331 bp, Artificial sequence
  DNA replication origin
gcatggaagaggggaagatggacgagaatgaatgggggtaccacggagagggcaataagagcctggtggtggcccacgcgcaggtgagcggtggacgtgcggcgcaggtccggtacctcactccgacggccggtatcaccccgcccccattatccgtttcctcaacagggtcggttccacgtccccccagtaccttcctcctccccggccggtctccggaattcccccaccctccagcatccccccctaccgcttgggttcctcatcaccccagtatcccctctctactgggtcagtctcccattgccccagatccttctcctggccggtctgtcgtcccctcagtattcccgttccccgtcagagtcagttccacatccccctccccgccccgtcggtgccgcgctcagcctcacgcggtgccgcctcccgcctggatgcccgccggactgccaggccgcagtggggtggaggcttggttgggacggagggcccggccagcactggaggaagaagcagagtgcccacagtgctgttactctcagcaccaaaagagttcagcctcgtgagactacggaattgctgtgctgttaatagtaaggggatgttgtccacaggtcctcttctcaaccttttagaatttgaaggctttcacctgaattcaacgagggtgaaagttttagaaactgcagtaagatctcgcaaaggtgaatcccaagagtgaagcgtgtgggtttctgtgagggcccagatctctctgaccttttgctgtctggtacaaccacgcaggaatgtggccggctggaacgggggaggggggtgagggaggcgaggataggtgtcatgtagggaggagttagagcatgggtgttaaaggcacaggaatctcagtgtctacatttgtgaagtggaactagtagtagaattcactttgtgggattgttgcaaagaccagttacgcaggaacccatcaagttatgcttagcaagtgataattgtcatcccttggacagataaataaagtgaaaatcagagaggttaagggcattgcccgagtcgaacagcttgtcagggatgatgtaggcagtggagtcctgccttgcttctgttgttcctatgctgggtgcattggtcagctgtagtgtaagctgcaaacacccaggtagcccctaggttgtgcctttggattttgttgctcattagcacagggaactaaagaacagagactacaagctttgctcaagatctttaggtgaattaataatggaccaggctaacctaaagctgtccttctcttgtgtagtccactattggcaaagtgagggatgttt

SEQ ID NO: 16773 - DNA, 2506 bp, Artificial sequence
  DNA replication origin
acatgccagatactgagaaactgtgggattttttccccaagccccaggaagacaggacgcttccagagaaatcctgggactcttccttgtctgtaccctgctctggcacgtcctgcagggatactgagaaactgggagtgcacggcaccaggcttgagagaagcaggccctatgtgcatgcagttcccaccctgtccagctcagatcctcagcttgctcacccataaaaaggaaacatctaggttatctgctgggcccatggtgggcctggctgtcccccatgcagggctgaccccatggtgctatcccaacatgacccagcaggtggcgctacccatctttggaaagtgaaagacagcggtacctgtcagggggcacctgggaagatgctgaaaccaggacctgccccacagaggcctgtgaacacttagggagcctcgattcccagccttggggtctgagtcccagccagggaggggtgtgcacccaccaggggcagcccacctcagagcccattactaagagccctccacagaggaagaaagaaagctggtctcctccaagccccggccctctcctcaccctccccagattggcaaagtagaggatgggaggtgagtacccagcggtcacaatgacgcagaggtacagggctatgcacagaggtgggacccgaactgtggaccccagcagtgacctgctccagccaggaggataatcttccttctgaatctacaaacataaatacacacttgtgccatatggccaagttcttgggggcaaatacctcatgagaggaaaggccaggactcctctgtcacctgttggccccaagttaagtccctgtaaatgttggattcaaggggtgggagcccaagcatcccctgaagctatgcaactctggcccatccactccaggatctgctctcctcagcccttctgccctcagtctccatatatgcaaagcagagacaagcctgggcctgctgcggtttcattcacagcaaaatggaaccggcgccacagaaccaggctcctgggggctgggctaggtgcaaaaggaacattaaaaggatcacacacgctctgctatccccggccacatgtgggcacctgccaggcatgccctatgctccagcaactgcttgcgtgacctcggaggaagctgaggtgcagcagctaggggcccccaaccccatgtggcccccatatcgcctcaccctttcttgtcaccaacttgagcaccagtgtgccagagatgtgccaggggccatgcttccccaacctcgtaccatgctggccctgatggagctgggcacagccactgactagtcagggctgcaggcctcagcatgaggcagtgagaggctaagggttccagaggcaagtgctgaggacagctggccttgtggaaggggagggcccgacagcagcacggttacctggtggcaaacatagcacgcagcgaggagaaggtggctgcgtcctccttgagggccttgagctcattgcgcagcttcatcatggtctcggtaaccatggccttctcattctcatacttgctcttcaggttggcaagggccacctcggccgtctgggggacagatgtgtagggtggaaaagtgaaaggcgtgaagtcagcctagaggtgctctgggagcaggatcgggagccccggtctgaagtggtggcagtgcctgggaagaaagctcctgggaggcccctccctgtgacaaaccctggggatggactccagcagctacgccatggggagtcccacctgctgattctgactggcagaggagggactgcccctaaacctgccaacaggacctccacgaagccccacaattgctctccacagctcagactatggctctcacatgttttccctccagtatcaggaagcactacgaggcagtcacagtgagtcaagggcagcggcatttctcactggctgagcagctctgctgaggggccctcacacccacctgcctgctccaccctcccagctgggggccctgagcaggggagggtaggcagtcgagctactatggggctggctctgtctggtggtgacgcaggcctgggggggccccgtggcagggggaggaaggaggccaagggggaaacacccttaggccagtagtaggtgacatgtgcccctgctgcctggcacctcacctgcttgttggccttgagcacagtgcgcagcgtggtgatctgctcccgcttggtgctgagcagcgacttcagcttgaggatctcctccataagcgcttccttgtccttgtccacggcggggcccagctcctgagaggcaatgcgctggcgtgacagctccgtggtgcggtccacggctgcctgcaggtgcttgatctggtcacggatgatagcgatcaggttgtagatgttcatgggctcccggcgtgggtcactcaggggtgatggcagtgaggagccaggcgaggggctgctgtcccccgtcccaccatctgctcggccc

SEQ ID NO: 16774 - DNA, 1353 bp, Artificial sequence
  DNA replication origin
tcaggttgtagatgttcatgggctcccggcgtgggtcactcaggggtgatggcagtgaggagccaggcgaggggctgctgtcccccgtcccaccatctgctcggcccgcctcaggagccagcagccccttgggtaggaggatgggtgagcgccggccacgcgcctcggggctggtgcggcccccgggactggtgcggccggccccgccctggccctcgcggtagtagtccagcatgacacggttgggtgtctcattgttgcacatgcacacgtggtggtagagattggccagctcctcactgaaggtcaccagctcatcctgggccacactcaggctgccctgtgtctcgccggcgacgtcgctcaccttctttagctccttctccagccgggccagcagctcgcggtcctggcggctggccttctctagcagggagaccttctccgtgagtgcctggccctcagcctcatagcggcccttctcctcggcgtgctgggcctcacgagcctcgtgcgtgctgcgcagtgccttgagctgctcgcggagctcgccagcctcagccacagccacatggtacttgcaggccaagatctcaggcccgttgatgtccacctcgtagtagtccccatcctcatggctgtcacggtccttctcgttgtccagggctgtctgccgctccttgctggcctgcaggcgccgcagggcactcagattctctgtgaggcgggtcaccttctcctgctgttctgacagggagccccgcgtgtgctccagctgcttctgtgtgtcctgcagcgttgccagcaggcccgccttttcccgctccatctgcaaaggcacaggcagcaggacaccatgtcagttgctatggaccccgagagcttggaggacccccaagatggcctagtgacatcccaccccatgtcagggcaggctgtcagccccaggttccttggccatgctgtcagtgaggtggacaaagacacacagggtgtggaaagaatggaattcatgctgggccctcagaacactaaccgtcaccagtaatggtggtcaccctcaacgcaggctctttccccaaccatgctacaggggatctgggctaagaaagtggagctctaggctggctgggtgtgtagtcgggaatattagcaccctagccctctgcttcggaggacaggactctgttgccttggatcaacagggatccatgtcccaggggatgagcccaagcatgaccatggtgggcccctgacacctggcctgcgtgcagggatcacatgtgggccagtgtctcatcacttcaccctgacaccacgtagttaacaggggagcaatgtgggtgctgcagt

SEQ ID NO: 16775 - DNA, 1363 bp, Artificial sequence
  DNA replication origin
ggccgagtacgggctggcggtgctcgaggagaagcaccagctcaagctgcagttcgaggagctcgaggtggactatgaggctatccgcagcgagatggagcagctcaaggaggtgagccgagccgccctgccctgcgacccccgcccggcgccggggcctgtgggcgtcgtccctggcaccagggcggccaaggtcagcttgccaagcgggggccggcaggggtgggccgccggggcggagggggcacgggcagtatgtgggagtgggcccggccttggctagcaggccggtgccgcggccgttgcagacgccgctaatgcaggggtccgggcgccttgtcgcctcctgcagctgcccgcctgcttctgtgcggacctgggcggccccggcggggcggggcttcgtaagggctgatgctttgcggtggtcgctgttccgggtgtgtctgagtgtggggtggggttgggagggcagtggctgagccgggagctgaggccacggatgctggtgacccgctgggagaggccgagggtgggcctgggtctgggtggctgcggctctgtcaccttcagagaaagcacttcccctctctgggcgcagctactttcggagcgtttctgcttctttcatgagtgcctccgaggtggggaaaggtcgtggacagcggcctaagtgagtaggggctcggggttgcacgtggaggttgcccctggcatgggtcccccagtacccttgccccaggcccagcgctgtgtcctcatggccgggattgcgctcccaccagctagcatgacttccctggcccacttcctgtccagccccgcttctcgggcccttcccctcgctgtggcttgctgtgttcctcttggacggagacctcagtggtctgtgtcattcccactggggggagagtaggttagaccaccaggctggtcgagggtctccaggcggcagggcagcgggagtcttggacagtccttccccagcttctcttctcccgttccctgactccatagcgttgtttgcaggaattgctttctgggaggatacaccagggtttggatccaggctgtgccccttgctagtgatgtggctttgggtagaggccctccgtgagtcttagtttccccctctgcaaaatgggagtgcagtactgcgtgcccagaaaggattgttgtgagggtcatgtatttggaaaggactggtgtgcggtcaggagtatagcttggtggtgtgctcccttcccccacttgagtgtgtcctggtgagcccttggctcttggtttccaggcttatcacctggcacctctgctcccagtcagcccagacaggtgcctaaatcatttgcagccttccttgcct

SEQ ID NO: 16776 - DNA, 1131 bp, Artificial sequence
  DNA replication origin
ggctcctcccctccggcgcgcggggcccgctgggggctggagtcctgcctgcgctccgaccacaaggtccatcatgcccggcgcccgcccggcccccggctatgattggcccatgctctgtgaggggcgggccctcgggcgcagccactgacgccaatgtggcccagggggctgtggggacagtagtcccgctagcgcaccgactacaaaacccgtccagccccgcgcccacccgtccccgtccgtgattggcctgcgccgccagcgtcgagccggatgtaccggcgccttgcagtcccctggacggcggtcgagtgggcgcggccccgcggccttccccacactcagagccggggacactgctcggtcgccgggcctcgcgctcccctgtgcctctggcagccggcggccacgcggggtggcaagacggctgccgggagaacccccagggggaggcgggtgcggggcggcaggactgggctcccgaccgtgggacgaacaacgcggacagagcccgggaggccacgagctagaagcgcatccgagagcgcgggtgaacggctgctgctggaaacccgtggacggtgtgacgcatgctctgtgcagacgtctgggggcgggaggaggacgggccagcagggggcgcccaggggccagcgggaacctcagcaccgcccctcagtccttcaaggtctatttcttgggaataaagacatttccattaatacagggtcataaacgtggtaaatataattgttgtctccgcatctatttttaggcctgacttaagttgtttgaaagccagtcgtacccttcgccttggcgtaggtaacacttctccgtatatggtggtgtgtgagataactcgtttattctttatctcattgacctaaagcgcaacacaccccacagccgctgaccgccatagcacctaatggccagtatcagtgcagatgagttcacccttccctcgtattttctttagccagtccacaggccccaagggaaatcctaaaggatgatttccatggaccctagcacagccatagtcccttccttcccaccgtctctcactgcccctctccatctgcttgtccgcctctcttaggcatccctaacctctccggaacc

SEQ ID NO: 16777 - DNA, 2200 bp, Artificial sequence
  DNA replication origin
cgcgatctcggctcactgcaagctccgcctcccgggttcacgccattctcctgcctcagcctcccgagtagctgagactacaggcgcccgccacagcgccggctaattttttgtatttttagtagagacggggttcaaccatcttcgccaggatggtttcgatctccggacctcgtgatccgcccgcttcagcctcccaaagtgctgggattacagtcgtgagccaccgcgtccggccatctttgtccatctttgtccatcttaatgaaaacataatttgcagcaatgatattgagattcacctggtgtattaatattttaacagaaattttatgaactgaattacaagctatcaggtaaatcaagtaggccacaggttcagtaaaaaggaaagcaccttctgaacgttgatcctaatacctgtgagcattcatgctctgaaattatagctgagcgcacactgtgtgccagatgcggtcctacgtgcagggatgtacaatgcccaaggaactgccggtgccaggatctgggcttgtcaaaaggtgccttcggtgtatgtgaggagacctatcatgggggacacactggaaaaaccaccaacatggtccagcgcaatcagtgaggcaaatgcatggggaggtggagagcgagagctgcagaaggaacagaggctccatagggagcccagagtggagagaagcccctggagggaggggctatggaggtcctggtggaagaaagcccggggagcccggtgggtgtggattagggtcaggaggggatcagtgagtgaagagaagcatttcaaggagtgtgtgtgtgagtgtggatgtgggtgtgtgtttgtgagagtttgaatttgtgtgtgtgtgagtgtgtgagagactgtggtgtgtgtgatgtgaatgtgggtgtgggtgtgtgtgagcatgagtttatgtgtgtgtgtgagagtgtgtgagagactgtggtgtgtgtgatgtgagtgtggatatgggtggtttgtgtttatgtggcatatgtgagtatatatggagtgtagtgggcttggtgtgtgagtgtggtatcagtgtatatatggggtatccatggtgtgtgtgtggagtgtatgatgtgtgtgtggtatgtgggtgtatgggggatgtttgtggtgtgtgtgtgtgaaatgtatgtgagtagatggtgagtgccatgtgtggtgtaagtgtgtgatgtgtgtgtggtgtatgtgagtggtacatgagatgagtgtggtatgaggatgtgtggtgtgtgtgtgtggaagttatgtgtggtgtgtttgtggtatgtgagtgtaagtgtatgaggcatggcggtggtgtgtgtggtgtctgtgtatgtggcgtgtgtgtgtgagtggtgtgtgtttgagagtttgtgtgatgtgtgtggtgtgtgtgatgagtgtgtgttcacggtgtgtgtgtggaatgtgtgtgtgttctatgtgtggtatgtgagtgtgagtttatggggagtgtttttggtgtgtgttttatgcatgtggtgtgtatggtttgtgtgtatgtggtatgtgtgtgagtggaggtggtgagtgttgtatttgtgagagtatgtgtgatgtgcatgtggtgtgtgtgggggtggtatgtgtggtatgtatggtatgagtatgtgtctattggggtgtctatggtgtgtgtgtggaatgtgtcagtgcatggtattgtgtgatacgtgagtgtgaatgtatgcgggagtgtttgtggtgtgtgtgtgatgcatgtggtgtgcatggatgtaggaagtgagtgtttacagtgtgtgagtttgtgtgatgtgtgtggtatgcatgtggtatgagtgtgcacgtattggggtgttcatagtgtgtgtgtggaatgtgtggcgtgtgtggtatgtatgttagtgtaggttgtgggtgtgatgcgtgtgtggtgtgggtgtggtatttgtggtatgaatatgtgtgtactggggcgttcatgtgtgtgatgtgtgtggaatgtgtgagtttttggtgtgtggtgtgtgagtgtatgggggctgtttatggtgtgtgtgtgtgtgtgtgtgtagatgtgttgtgagggaaagtgtgaaatgttttgctgggaaaggaagatcatcaggtaagagaactgtagcaaggttaccgtagcagcaggacagcaaatagatcatgaggtgcattaga

SEQ ID NO: 16778 - DNA, 1066 bp, Artificial sequence
  DNA replication origin
gagctgggcgggggcagggcctggcgggctctcaggccaggtgcactcgcgatctagaggcagcccaggccattctccaccacctgggcgcccaagctgcaggcgccctctacctgctggcaacagctgcctggccactcccaagctggctggcgctcccaagcctcgcagaaccggggctagatgtcgccgtggctgcggccaagcccggcggtctgcccggcggcggctgcaccgtggctggaaccgaccccccagtcccatcccccatggctacggagggcccctgtcagcggccccgatctctctttggaggaggagcggggcgggagtcacggccaggagggccctcaggccggaagggatgcacgtctgcgattccgagacgtcccgcgcgagcccaggagaacccgcaagccagcagcgcctgcgcccgagctgcagcagccccctgcaggccacgcgggctcgggagcggtttccggagtccgagctggcgctgagctgcaggcgcgagcctaaaggcttagccggggcccacgctgtctgagagatcggagcgttcagctacaggcacgcgcttaacggcttcgtggagctcactcggtctgagaggtcggaggctgcgagtgtcgctgctgaaggctgtggtggaccaggctggatcgcggattctgagctacatcgcgggtttggtggtggatcttggatttgggggtggatcgcgggtttgggggtggatcttggatttgggggtggatcgcgggttgtgggggggatggcggatttggggctgggtgggggtggaaaggccacgaggagccgcggcggctcaggagcgggtggtgggcgtctgaaaagtcgccaccatgaggaagctcttcagcttcgggagacgcctgggccaggcgctcctggactccatggaccaagagtacgctggtcgggggtaccacatccgggactgggaactgcggaagatccacagggctgccatcaagggcgacgccgcggaggtggagcactgcctgacgcgcaggttccgggacttggacgcccgcgacag

SEQ ID NO: 16779 - DNA, 880 bp, Artificial sequence
  DNA replication origin
aggtgggggggtcagcccccccgcctggccagccaccccgtccgggaggtgaggggcgcctctgcccggccagctgcccgtccgggagggaggtgggggggtcagccccccggcccggccagccgccccatccgggagggaggtgggggggtcagccccccgcctggccagccgccccgtccgggaggtgaggggcgcctctgcccggccagccgcccgtccgggagggaggtgggggggtcagccccccgcccagccagccgccccgtccgggaggtgaggggcgcctctgcccggccgcccctactgggaagtgaggagcccctctgcccggccagccgccccgtccaggagggaggtggggggggtcagccccccgtccggccagccgccccgtctgggaggtgaggggcgcctctgcccggccgcgcctactgggaagtgaggagcccctctgcctggccaccaccccgtctgggaggtgtacccaacagctcattgagaacgggccatgatgacaatggcggttttgtggaatagaaagcggggaaaggcggggaaaagattgagaaatcggatggttgccgtgtctgtgtagaaagaggtagacatgggagacttttcattttgttctgtactaagaaaaattcttctgccttgggatcctgttgatcggtgaccttacccccaaccctgtgctctctgaaacatgtgctgtatccactcagggttgaatggattaagggcggtgcaagatgtgctttgttaaacagatgcttgaaggcagcatgctcgttaagagtcatcaccactccctaatctcaagtacccagggacacaaacactgcggaaggccgcagggtcctctgcctaggaaaac

SEQ ID NO: 16780 - DNA, 1255 bp, Artificial sequence
  DNA replication origin
ggacggggcggctggccgggcggggggctgacccccccacctccctcccggacagggcggctggccgggcagaggggctcctcagttcccagtaggggcggccgggcagaggcacccctcaactgccggacggggcggctggccgggcggggggctgacccccccacctccctcccggacggggcggctggccgggcagaggggctcctcagttcccagtaggggcggccgggcagaggcacccctcaactgccggacggggcggctggccgggcggggggctgatccccccacctccctcgcggatggggcggctggccgggccaggggctgatccccccacctccctcccggacggggtggctggccgggcggggggctgaccccccccacctccctcccggaccggacgaggtggctgccgggcggagacgctcctcacttcccagacggggtggctgctgggcggaggggctcctcacttctcagacggggcggctgccgggcggaggggctcctcacttctcagacggggcggttgccaggcagagggtctcctcacttctcagacggggcgtctgggcagagacgctcctcacatcccggacggggcggcagggcagaggtgctccccacatctcagacgatgggcggccgggcagagacgctcctcacttcccagatgtgatggcggctgggaagaggcgctcctcacttcctagatgggatggcggccgggcagagacgctcctcactttccagactgggcagccaggcagaggggctcctcacatcccagacggtgggcagccaggcggagacgcacctcacttcccagacggggtggcggccgggcagaggctgcaatctcggcactttgggaggccaaggcaggctgctgggaggtggaggttgtagcgagccgagatcacgccactgcactccagcctgggcgccattgagcactgagtgaacgagactccgtctgcaatcccggcacctcgggaggccgaggctggcggatcactcgcggttaggagctggagaccagcccggccaacacagcgaatccctgtctccaccaaaaaaatatgaaaaccagtcaggcgtggcggcgcgcgcctgcaatcgcaggcactcggcaagctgaggcaggagaatcaggcagggaggttgcagtgagccaagatggcagcagtaccgtccagtttcggctcggcatcagagggagaccgtggaaagagagggagaggga

SEQ ID NO: 16781 - DNA, 1197 bp, Artificial sequence
  DNA replication origin
cccgaccctgggaaggtatgatggtcagtcctactggtggtgctgccaaagctgccctttgcacagtgctcactgctgactttatgaaactcctgggaggagacgatgtgagtggggaaactgttttcctcaatgggaaactgaggcacagagggcatggtacctggccagcgtcacctatggggtgtggcacaggctgggtgccctgtgctcttcaggacatggtggggcaggacctgtgaggcccgcagtgcagtgtggagaccagagcagacagttcccacaacacgatggggctgcatggagggagtttgtttgcgttctcattagcgtttatggggctcttggctcggtgctgggatcttggggagatggagaggcagcagatggcctcagcctcagagaaactgtgggtatggggggcacagcttgggtaagttgccaagtgaccaggtcctgggagcgctttgcgggtcaggcttgctggctcctaggtggggacgttgctggctgacacggggaccatcgggagacgggctgggcaggtgaagggcagtccggtgcctggaccactgtgagctggcttggcggagacgaggccagggctgtgttcaatggaggctttattatcactcaggtgtaggaaggatcagaccactgccattgacaagatggtttgtcatcctcagtttccaagagaaaggggcatgtcacaccacaccgtgaggccacagggaagcccagggtcagtcagaaggcagagggttcgagggggaactgtgggcctgagacggtaatgtggtttctgcgggaaacttgagttcccagccatgatgggaatgggaggtcagacacacctgattctactccctcacttttgtagtttacacacaactgaccagcattaatcttaaaatagagatcagaagactgacagaatagactctgtggcaataagataccaaattataaacaggaccaggcaagtgtacacaccatacacttaaagaataaactatattctggctgggcgcggtggctcacgcctataatcctagcactttgggaggccgaggtgggtggatcacctgaggtcgggagtttgagaccagcctgaccaacacggagaaaacctgtctctactaaaaatacaaaattagctgggtgtggtggcacatgcctgtaatcccagctaat

SEQ ID NO: 16782 - DNA, 1043 bp, Artificial sequence
  DNA replication origin
gtcctgtccaggcatttattttctccaccgaggatgcgtataagagagccagctctgggccaagggccagcctgcctggggttccagttcttgctccattggtcagtctctctgagcctcagtttccctcgttgtaaagtgtggtctgtgtcagccatgtcttgaaggacagtcagttctgggcagccagttccgggcagcttcctggggctgtggtggccagaagccggtggggctggcatccacacacgtgtccttggagtgcccaatgctccctctgtccccacagaagcaggaggtatgcgggaacctgacgctgcagcaccacatgctggagcccgtgcagagggtcccccggtacgagctgctgctcaaggactatctgaagaggctcccgcaggacgccccagaccggaaggatgcggagagtgagctggggccaagggctcccaggagggtgcaggggcacctgccaagaactctgggggtggggagagagggagagagagagtcgtggggtcatgggggtaggggagagagaaacagagagaccagagggaaagagacagagacagaggcaggggagggagagagatggagacagggagagagatagggagatgtcagggaaagagagggagagggagggagaaacagaggggaggagagagagacacacagagacagaggaaggagggggagagagagggatggagaaacagacagaggggaggagagagagacacacagagacagaggaaggagggggagagagagagaaagagagagaacaagtgagccccctagcagcccaggaagggacttagcatctttgagggcagagaaaaatctcccctgcttgaagtatgcgggtggacattggtctggggaaggtgctactaaatgctggccctgttcagagcttaggccccaggaatgggcctcatagggctggtgggggctgctcctggtccaagggcagcaactggtgtggctggcaggcagcccggacaggcgtctgtgcagaatcgtgggagccccct

SEQ ID NO: 16783 - DNA, 1037 bp, Artificial sequence
  DNA replication origin
tagtcctcattccttgcaaggtgtattggagacgggtgaagggtgtggctgtgctggaagctcctactgctggcctttgccccagcgctccagtggtgctgaaggcctggtgggcccatgtgatgaggcaatgcctccgactggcgccccagctgcacaccatctccattcccctcactccaaagccctttctcctgagaatggagaaaattcaatgcttaatgttgaatgtaaaagtatccctgaggaaggaactgatcatttaagtatctttaggttaagagattaaagttgaatctgtgttagcaactggatctcagcacagaatgctttggaggtgtttttccaaagggcaccagcaacctgtgcctgaagcggttgatgttgcttgtcatacctttgccacatggcgggggggcagcaggggggggggaataagtagatgagtccttggaaggatggatgatggatgggtgggtgggtagaaggatggatgaatggatgagtggttggagaggtgggtgtatcaataggtagatggatgcgtggatggatggatgaggggatggatggataggtgggtagttagataaatggcatatggaagtatgaatggaagtggatatataggaagtataaatggatgactggagaattgatggatggatggatggatgaacagacgaatagttggatggcatacggaagtatgggtggatagatgaatggttggatggatggatgaatgaatgagtggataatgaatgggtggatggatggatggatgggtggatgaagggatgatggatggatggatgatggatggatgaatgtatggtagaggatggatgggcaggcaagtgggaaatgtgatctgtgcctcttaaagaactctcagtttgggacccagtttgtactctagaattgggggatttaactcaaacctggtttccccatcagacctgaggagagaatctgttgctttaagagccatcctcagaatacatgcccaggtccctgctcagctccaggcttca

SEQ ID NO: 16784 - DNA, 882 bp, Artificial sequence
  DNA replication origin
gtgtgggttcctgagtctcccctgacaggttctgtggctcctggccaccctttgtgcccccttggcccacccctccttgcaccctggctggctctggggtccacccaggtgccagtaggttctgtctcctgtgactggcaagcagagggaatcctgcgctgccggggaaactgaggccccaggtaacactgctcaagcaggtggaccccagctggtggcacaggcctgctgtgggtgcctcaggcctgaggctctgggctgctggcctgagggcctggtggggtggggacacgtacctggctgcctccctgcaggtgcagcacctggggatctgacatggggatggcggcccacacctcgctccaggtctcaccgctctctgacagccgcagggggccgcagagcaggctgggctgggggtctgcagtgggtgtcttctggggacacaaagacacaggttaggggcagtctcccctgcagtggtcacccctgttctgaggaggctggggtagggccagggccactgcttggggggagctggctgtggagacatggccaagatctgcacagagactgggaccagcctcacccggcttgcaagggtcactagaagcctgcaggacataggcatgtgtggtatcagatggggtttgcaggctgggccctccaaggggagggcatccatatgctgggtcaggacacatcaaaatcataggaaaacccaacagcaagtacctgagggtgggtcacgggacagggacttcaagcgtgtcagttctacacacaccatatacatgcacgtgcgtgcacacacagcacacacacacacaccacacacacaggccctccctctgtcatgtcactgttggagctactgtccac

SEQ ID NO: 16785 - DNA, 1641 bp, Artificial sequence
  DNA replication origin
gccgcctggtttcgaactgctcgctgccaggcttcggctccgctagggcgcctgctgggccggcggagggtcgaggaggttcgtcctcggggcagatcgttgctgtggcccccacccacggctgtgcggccccgcgaccccctcccctcggctttcccgtctgtgaaatgggcgcagagccccgcacgcggccactcggccccagccctcacctgtgcggttccctggggcaggcgtggtgaccccggcccgcccccggggcctcgccttgccacggagggtggcggccgcccagcgcatcctgcgcgctccgaggcgcttggcggggtctgccaggggagtgagcccggcttgtgggggcggggcctgggcctgggcctgggtgaggggcggggaggccccgccctccacgcccgcccaggggcggttccatgcaacttacagaccacgcccacacgttggactggggccgaggtccggccgggggctgtgggcgggggcccttggggagaccaaatacccagcgggccaaggcagccggctgagcggaaagtgttgctactccggggcgttgcacgcgtggctacctctgcccaacacccttcccccatcccttcctgttctcaccttcactcctagtgtggtttttccatgtgcttctgtgtttttattttttgagcaggattttgccttctcagggtgccggattcggccggtaccaaagggcaaacagcaaaacgcctccccggcccgcccctcccgtaacccactcacccccagagtcctgtgtggacccagccttctttccctgtctctcactgggccaggccgtctgaggcacactgaggtctgggtgcccttgttgtcttcggttctcactgaggggcccccggctgggggaaacaggatggaaagccctggggtctgtctgcagggcccaccacacctggaggcctcccttctcctggcttccccttcccacccagctccacttgcagcaggcccagagctgtgatccgggctctttctctccctctgaccccacccaacccaggcttagccccctgcccaggcagccaccaaagggttgggtgtggtgtcaggcctcagacatcctggatcttgggctgcttgtgggagaccacctgagccatgcctattcctgtggagctggcaaaggcaatcctggcagagggaacagcaggtgcaaaggccctggtttggcaatgtgtggcagcagaagcccagtgcggctggcttaggcatgcctccaggagcgcagaaggtggcccaggtgggccaggctggctctagagtgcctggcaggtgaccgtgaagagtgtggatgttcaggtggaccatgaagcagggttccagcagggcagcccctccccgtctctgctttccgagccctccaaagctgaggttcagtgtgaaacgtgaggggccctccccctttcgccatcagggttggcgtcacccctgatatgttcttcccacttggacttgtgggtcacacacgatggcttacttcaatctcctttattcaaaatcaagcatgtgtattctttctgccatgtcgggaagggcagggccatcagcagtgcccactccagaccacactctgggaccccagaatgt

SEQ ID NO: 16786 - DNA, 1666 bp, Artificial sequence
  DNA replication origin
ggcagaccccgccaagcgcctcggagcgcgcaggatgcgctgggcggccgccaccctccgtggcaaggcgaggccccgggggcgggccggggtcaccacgcctgccccagggaaccgcacaggtgagggctggggccgagtggccgcgtgcggggctctgcgcccatttcacagacgggaaagccgaggggagggggtcgcggggccgcacagccgtgggtgggggccacagcaacgatctgccccgaggacgaacctcctcgaccctccgccggcccagcaggcgccctagcggagccgaagcctggcagcgagcagttcgaaaccaggcggctgcacgcagcagcccgcgcgcccgttcccgagtggccgcagcgccttggtcccgggcgtctgcggacagcgcggccggccaagcctctccacgccgcaggctccgggcccctccgcgcccctcccggggaagtcgaaaccggcctcacctggcgggcgggtggcgcgggggcgggaggggggagccgggagccctctctgcgcctgagggaggtgtcatcttcacgattccttggtgaccagcgcagctccactttacagatggagaaactgagcctgcgagaggggagtggctgtccgaggtcaccctgtagccaggcttgggatcgcctcggctgtctcggaggaggctcagaggcctttggaaggaagagaagctgctttttattttacttttaagtgtttgaattcaagaatgtgcttaaagagttgtctgctcccgtgcccaaggctccggggttcgaatgctggccttgctccttgaatgattctaaagtctaacccttttagaaacggaaccaaaccggaactctgggtctcagatatcccaaaagcttacttccgcggccactgcccacgaacgttaggcctgagggttctgggcgtctcaggcgttgcggggctaaggctctgcgcaggaggaagctgaggcccggagtggggtgggctggaccaggtcacactgtcagcctgcagccccagggaactggcaggaaggtggcaggagaatggcttcctctcacagttggggaaactgcggctcagggagctaattcaccgagcagaggtccgcagctcagcaaagtgggcgctgagacttgttcctggcgctggtggatttggtttatttagtttgactctggcagcctaatgtccagagtccctaatttggtgttggggtgatgagcacttttgctcctgtgtttgagcaaggcctgcccagggcctggtactacctgaggagccccttctactggcacaacagcctgggggcgtgggtgccagtgccctttggatagccttgacttgcccaaggtcagcccaaggccagggagtatctggaggctctggcatatttgcatacaaaaggctgtttgccttggaatttgtgctgggaatggagcttagtctggcaccctgtgctcttgttcatcctgcctggccctggctctgcctctgaccaccatgaccacttcccaggcactggcccccttgttggagttttgggttaggatcccccctgtgacctggggtgagtcgctgtacctctgtgcctcagtttccccatgtgccccagtttccccactgtatacctgcccccaagcttgtggac

SEQ ID NO: 16787 - DNA, 886 bp, Artificial sequence
  DNA replication origin
ctcaggggcaggagtgtgtgcaaaataaacccagagaagtaagtactacacgtcataacagtgtgatggatgcagaagaattggggtcaggctgcatcccactggggcaaaagaggccctctggggaagccccctctgggtcctccaggggagcacctggaggccagagccagcctggactcacccaggcacacaagcagatgagaggcctgcagggacccacaggctggtccactaccctcctgccctgggacggccctgtacatgggcctggggcaggctgggtctgatggcagcctggcctcctggggagcatggacggggctcaccttcagtgtttggggacaggggtggctgctgtatagtgaccatgactgggccccaagaattttgaggtttccaggtgacaactgcacccattctcctgatgccccctatgccggccctgatgggaggtcatggcacaggggagaactgaggcaaagagacagatggcgcatggactgcagggaccactgtgctgtccgagaaggggacactgagttgggcccccattccgggtcaggctctggcatctcaaattagagctgctatgggggaacggcccacacaggcagggaaggaaagaggaagggaaactgctgctgctggctgggagagtgctgctattccttccttcacgggtctccacttcctggctggggcccagtgcattcacatcatgtggggctaggagcttcttgtggcgggctccggagctggaaatgccaggcctacgagagggaaagcaggaaggaaagcgggagggaagtggagttggcccaaggtcactcattttacagtccaggaaactgaggctcaggcaggttaagtgacctctctagtt

SEQ ID NO: 16788 - DNA, 952 bp, Artificial sequence
  DNA replication origin
gggactcgagtgagaggggcggagtttagagccctgggggagccgtagcgggcgcggaaggggcggggcctaacggtagggggcggggctcgtcaaagggcggggtttagagtccccgaggctacacagccaaagccggggggctggcctagccaaaaggggcgggcgagcacggcccgcgggcggcgttcgctggagctggtggaccgggcggctgaccgaggggcggacgcgcggcggggcagaccgctggggactgcgggcggcgctgtgtccgtcgccatgacaggtgggcacggggtcggctgggcggcagggatgcgggcgccctggatgggtggcccggcccgggggtccggctgccttgcgagtcgcctgcaggccgcgcctgggcagcgggggccgagtgaccttggcccgtcagctgtcggtggtgcgcgagtgcacccccgcgaagtggtgggtgtcccggggcttctacccggcggggccgtgccagccgaggcggtgccgggcatgatgggtggtggccaggtgcggggcccgaagagggcgggggctacaaggcagctccagggtggggctgcacagccgcggtctgggctcagccactgccaatgtgtgtgtgtcccgtggtggggaatttggtctgaaagagtaggaggtggtagaaatgacaccggagagaattcacagcggtcctgctgtgattctggccacggaaacaacgctccatccttacaaccaccccagcgaggtcgcgggacaggcgatgcgttcctcggcggcatgtgattcctgtgggactcttggagtctcccagactccttcggtggtccacgacgctcttgcccctgtttagttctaagagaatcggggacagcgactggaccccccaaggttgttgtgctccacgctagtggccccagcccagccttcctccccagggcct

SEQ ID NO: 16789 - DNA, 981 bp, Artificial sequence
  DNA replication origin
ccagggtggggctgcacagccgcggtctgggctcagccactgccaatgtgtgtgtgtcccgtggtggggaatttggtctgaaagagtaggaggtggtagaaatgacaccggagagaattcacagcggtcctgctgtgattctggccacggaaacaacgctccatccttacaaccaccccagcgaggtcgcgggacaggcgatgcgttcctcggcggcatgtgattcctgtgggactcttggagtctcccagactccttcggtggtccacgacgctcttgcccctgtttagttctaagagaatcggggacagcgactggaccccccaaggttgttgtgctccacgctagtggccccagcccagccttcctccccagggcctctctggtctggggacctgcccaccatcctcctgatcccaaacagggtgactctgccctgtggaccttcccctgttggagaagccccatgagggtgatgggctggtaagggaccccatggcagcccggccagggagtatgggggttcccagaagctacacttcattcttactgttctgtttcatggagcagaattggctcaggggctcagggtagccccagaagtccctagtcctctctcggtgctcgctctcttgagtctcagcctaggtcctgcccacaaataggatctcatgggctggaaactgatgacttccaggacaccaggccagaagagacttccagcctaggccacaagagaccccagctgccacctgctcccctttgtcctcccttctaactcttcttatttgtggctctcatttctgagcacttactgtgcattggaccctgtgttgggtgattcctgtttgaaaatgatcagatggggacacctggaatatctcgtctgtgtacagatggggaaacaaagtcttaaattgtgccctgcccaggctgggattccgtaattcccttagtgagttcatcagaatgcgtgggaca

SEQ ID NO: 16790 - DNA, 897 bp, Artificial sequence
  DNA replication origin
tggggggagggaggggtgagagagggagtgagggagaaggtgaggaggggtgagagagggttagggagaggtaagggaggggtaagggagggggtgagggaggaggtaagggaggtgatgagggaggagtgagggaggggatgagggaggagtgagggaggggataagggaggggtgagagagggggtgaaggaggagtgagggaggggtgagggagggggtgagggagggttgagggggtgagagacgggtgaaggagggagggggtgagggaggggtgggggtgagagacgggtgaaggagggaggtggaagtgggtgagggagaggtgagggaaggagttgagggaggagagagagagtgaaggagagggtgaaggagagtgaaggagggcatgggggggtgagggaggggtgaaggagggaggtgacggggtgagggagaggtgagggaaggaattgagggaggagggagggagggaggggtgagggtgggggtgaggaaggggtgagggaggggtgttgggggacctagtatggaacccaggagtatatttgtcacaggtcagcaaggacacagggcacttgagctcagaggccggaagtatagctggtcttgcacaatccacggtaccggtctgggagaaatgaccctgctgactacaaacacaggctgggttttgggggtgctgacgcagctttgttgtgctgctgcttccagttctgccggctcagtgccttgtgaccggggccggtggctcctccatagagggctcacaggggtcctgcccactcagtgcctctcacacctctgcacaaaccctgggtctcagcagccacagggttctggccttccttgggtgagcctggacacccaccctcatgcagacaggttcag

SEQ ID NO: 16791 - DNA, 1052 bp, Artificial sequence
  DNA replication origin
tcagaactcattcccatatcaactacttttcaaaccctctatgggacaaacacaaaagtggagagagcagtgccacgagctcagcttctcggcatccacgcggtccacctactcagtagttgctgttgttttcccccgggagtgctttagagcagagcccagttagaccccctcactcaggagtgcttctgctttctgtcacttcagcaatggggctatgcagacctgatgtcagcccagacacaggactgcaggtgggggccactcatccatccgaggaacgggagctggagccaccccaagtcacggggctcagcccaggtggggacagaagaaaagtgatgaggaagtaagtgggggcctcagtagtgctggaggccttgccccctcccctgtgcccctggaaggctgcttggaggaggaaagggcagaggctggcaggagatgcacaggtacctcagctggaggggccaggtcgggggacccacagcggggacacagaggcagtgcgggatggaggacggggcaggctgaccccactcccacctcaggccaccagatgctccacatccagggagatgaggggctggggctgggaggggcggtggggagaacagaatgggtagtggggggttggggaaggatgggggaccaaggagaagagagtgaaacgccagacactggcggcccgggagccaggtttccactgggtgaggggtcctgtggggcaggtgggccctgagagtccagggcctggtcccggcatggctcccagctcccctgtgcccagagaatgtccccgctgaccacaggcatcactggacaccactgcggggaagcagcaacttcaaacttggtagaggagagactcaggggcagcacctcaaggcctgtccacaggcgggggcaggaaaacagtgctggaaacatgtgagggggaaaacgacgccgctccccacctgaccctgcctgggtcagaggtcactaggggctgctgatgccagtgacctcagacttccacctctgtgcctccaaacctcaccccaggagat

SEQ ID NO: 16792 - DNA, 1089 bp, Artificial sequence
  DNA replication origin
ccagtgtgtgagcactttggagcaataggcagggggctcctccggctgtgtgtccttgggaagttgccacacctcgctgggccttttagacatggtcttataaagagagaacaaagggtctctcctgccttcagggaagtggggaaagcaagtcaggtaataaacaggtcagtggcttggaagcgccttggaaaggaagggatactgctcctcccccaaccctgaccttgcccgggcaatgccctccactcagagcagtctctgctcacttctgcgggcggcaggataggctgtgcctcctgagatgggtgcatctcaagcccagaggagattgggttggatttgttcccggatcactgtcttggctctgggcaccagagggagagagacacagccccgccccaccaagccgcggttggagagcagcccagcccagacagggcaggagaggccagggcaaagcagggggttccctgggggctgggagcccatcgtggggggcggggcatggtggtcagggaaggctttctgtggaggtggggacattggctctgagccctggagggcagggaaggtgggtgagcagatctggctctctgagatgtgtggaagggcatctaggcagagggaacagtgggagcaaaggctcagaggctggaccacagagcacatgagggccaggtaggaggtggggggatgggaagccaggccgatgggaggggccttgcaggcctgatcacggtctggtgtccagggagctgtggaaaggctatgagccagtgtgaggatgagcacatttccccttgaggggtagaaaacttcgagggccgctctgctcacccagcctgggggcccaggaccacccaacacacctgttcctcttcccaacctcaagaccttgcttctccgtttcttgggcacatcatgtcagcactctgtgcctcagtttctcatctgtgaaatgggtgtggtcgcggtgcctgccatagagagtggtgaggactcagtagctgatgtatatgaagtgcttagagccaggccagcactcagcgccctcatccttctgcctgccacggagaccctctccca

SEQ ID NO: 16793 - DNA, 1538 bp, Artificial sequence
  DNA replication origin
cgggcgcgctcaggcccggatcctggcggcctgggcggccgcaccatggactcgggaaccgaggagtacgagctcaacggcggcctgcctccgggcacacccggctccccggacgcctcggtaagaccttccccccaccgctgcatgatcttgccaggccctgtcctttcggggcgccgcggctccccgggcacctgtgtgcgccgcgtccgcactgcagagtgttgggggacgtcccgctctaggccaagtccttcccgccccatcagggtcagaacgatgcccccgggagctccagccacccccggcaagtgggcgggacgagggggcgtgggggcgcagggcgggctggcgtccccagccccactaagcagcgcccgcgcttggctgcacggcggagggggcctcggcgcagctcctcgggctaaggactgccggcgcccggctttcccgacctcccccccactctcgcgcgggcctctctaacttcagcctcgccgtgccggctcctccgcgcactttgcccggaggcgggcggaggggagtcacagcctccgggctccagaccagctgcatgcagacagttacgtcaccccacgctgaccacacaatctgatgcgtgccttgatgggggaacttggggcccgctgtggtccctattccactcacctgccttgagaaatagaaacgtcacacagccttcagtgtatgccgccaccggccctccagaacttgccctgcccggcctgggagggctgtgggcagggggcaggccctggtagtggtcccgcttcagaattcttcatcccaggactcagcacttactgagcaccttgtgtttgttgcaaggtcctggcatggccctctggtgacttgtttactttgaacattctttccttttctaaccccctcagggatgggggcagggaacagcagcctgttgggtttttccaggcctctccatggcgtggaccagactggggcaaagacactctgcccactcgctggtgaacagtcctaggccggtgctgtggggacaggacatgttcggggaggcggggccccatgagccacgggataggatggccctggggctgcatggacacttgttcctaggttagagaggagctgtcgcactgcaggacttgaccggtgtgcgggaccccagcgacctggccctgccccagtgtgtgagcactttggagcaataggcagggggctcctccggctgtgtgtccttgggaagttgccacacctcgctgggccttttagacatggtcttataaagagagaacaaagggtctctcctgccttcagggaagtggggaaagcaagtcaggtaataaacaggtcagtggcttggaagcgccttggaaaggaagggatactgctcctcccccaaccctgaccttgcccgggcaatgccctccactcagagcagtctctgctcacttctgcgggcggcaggataggctgtgcctcctgagatgggtgcatctcaagcccagaggagattgggttggatttgttcccggatc

SEQ ID NO: 16794 - DNA, 1564 bp, Artificial sequence
  DNA replication origin
gccaggatccgggcctgagcgcgcccgagcctcagccgcaggctccagctgcgcgcccgcccccggcccgcccccggcccgcccggcggcgagctgctgccccagactccgcctccacccggggcgggcccggggcctggaggctgtacgctgagagcgcgcagtttggggcgaccccaacccctcgggcctgagacggtcccgcggggccccacaagggagggggcgcgacgccgatggccccagaggaccctgcgctgcgtcttgctctgaacctccgtcgcggacacttttaatccacaaaatgaggccaagaacgacctttccctggccaccaggcaaactgcatgaaagcgagcgggcgttgccgctggcgcccacgctgggtttttcccaggcggggttcgccctgggaaccgcagatcgctccagcacagcgcctgctgcgcccctagtaacagcgtcagagagtccggggttcccctgattgcgggccacgctgacacagggcttcccactccctgaccttaggttttcctgcctgggaaatgggggttatgagggcacagactgctggaggggctgggggaggcacaaaggggatgaacgtgcgctgactcatgggcccatctgtgccacctgtggcagggggtgggctgggggcagcacagtgcccagagccctggccagatgctaggcgggcccccacctgttgtatgattgaagtggttgtttggtctctgtttctccatatgttcattcctcagcactttgcccatctgggggcctgggggtcgagagcatgtggcggccaccctgggaggccaggggagttcatcctgaccacagcatagtcagcttgcggcagtatggccactctatttccagaagggcagtggaaggaaggccagctcagaccccaggctctgtccagtcaggctgccaccgggacaggaggtaggagtgagtgggcatgggcagggcagcaggattgcgcttgccctgatcctccaaacggggtcatcccatgaaggaggagctgtcgtgggcccacttcacagcagagaaactgaggctcaggctgtcactgccccagctctgcctcagaggggatctgcaggacagggtctggcacggtggcccacgacggggatggttgctgttgtcctcgcataatcagggcactgttggcacacctgagtgttcaccagcagctggaaatccagcaccattcacacaaaaaactctctcacagtatgggacaaatccctattctgggggatagtgcctgcccacgagggctcaattcctggaggggcaggaggtgtgggaccacagagaaaatacgtcacacccagaaagggccctgggagctgcaggggagccctgagaccttggaaggccaagggcgtgtagagaggccccgaagtaggagggcttggcaggtggagaccccgtcctgagagtattctttcctttgtgccatgtgggagctcctgcagtgtggttcatcattcccatccttttttttttttttttttgagatggagtcttgctctgtcgc

SEQ ID NO: 16795 - DNA, 1725 bp, Artificial sequence
  DNA replication origin
ttgcccacacactgccagtgtggcctgttgggagcaggaggaggccagataggtgtgtgctggtctcagaacacgcttagctctgtcccatcctggttttcccttggataggcttgaacacacccatcatgaacaggtctgtggacttggtgcccttcctagattgactgaatctacaaggaattggcagccttttaaggtgggcaagtcaggatgatcagcccactctgcagggccagatactgaggctcaggaaggaccaggacttgcccaagttcactcagctggttaggggcaaggttggggggtctttagcctccaaagggaagacagaaaagatccttttccacccctgacctctacctggaagactcctgccccaggagatgcaacttagatccctgtccctcaggcctctctgtcctgcagagctggcgtctgctgtttggcctcctcctcgtgtgagctctgggctcatgccagcggacttgagccccggaatgaatgcctgtctcacacggtagattagattatataaataacaggcaagtgccaaatgcatagccctacacctagcacactatttaaccactggctctctggggagaaaagtcctgatttgaggtgtttgccaatttccgcagtgtaaatactcccagcattgctgacttcaggctacagggtggcattgctgaacccagagctgggaagggatgttcactgttgcccctcacaaattagtttcagccagtgccagtgcccagcggggctccaggaagtcctgcttctctgggtaacagttggcctggcatattcttccctctacattgtgaaggtgagatatcgcctctgctggcttttatgccacatgagttattttgtgccaggggctccaaggcctacaggcccacaagcatcttttcatctctggaagtgtgtgtgtatctgatgggggtgccagcccagtgggatggggactgagatgagaatactctggtatctcccttgtgcctcagtttcctcacctaggatcatggaggctggggtaagggtgaagtgttagctcagggcattgcctggagcagggctcagaacttagcagtatggttactgacacaggtcacctgctgcattagggccagagacgcccaagagagggcttgtccgtgggggtctagaggaggaaggagctagagatcatggaagacttctcgggagaggtggcatctggcagaggtgggaaggaagaacactttgggtcaaggggcttctggaagcctctccatatcccatccaaggcattccagctcagcttcggtcttgaaagttctgggatttagagcatataacttctgcctttggcgcctcagtttgctctagactgtgaaatgggcataatgatcaccagtgcctccctgggtgatgatgaggtcctcatggttcctggtggtgaagtgagggcaggaaaggacacgctgagccccaccaggcttagccccaggctgggctcccgagggcggcggtacccctggtccttttcttcctagcctgcccattctgtcctggcacagggccttgaggtctagcgcgccgggctgcggcgtgctgaggcgttgagcctgctgcctcctctcaggaagaaacggggtcctccgcagctgacagccctgcggggcgttccaaagaacttcagaggacaggagcgctacctcgagcaaagaaccg

SEQ ID NO: 16796 - DNA, 1417 bp, Artificial sequence
  DNA replication origin
gacgtccccggcacgctgatggagcccgggcgcggcgcggggcccgcgggcatggcggagcctcgggcgaaggcggcgcggccggggccccagcgctttctgcggcgcagcgtggtagagtcggaccaggaggagccgccgggcttggaggcagccgaggcgccgggcccgcagcccccgcagcccctgcagcgccgggtgcttctgctctgcaagacgcgccgcctcatcgcggagcgcgcccgcggacgccccgccgcccccgcgcccgcagcgctggtagcgcagccgggagcccccggagcccccgcggacgccggccccgagcccgtgggcacgcaggagcccggcccggaccccatcgcagccgctgtcgaaaccgcgcctgcccccgacggcggccccagggaggaggcggcggcgaccgtgaggaaggaggatgagggggcggccgaggcgaagcctgagcccgggcgcactcgccgggacgagcccgaagaggaggaggacgacgaggacgacctcaaggccgtggccacctctctggacggccgcttcctcaagttcgacatcgagctgggccgcggttccttcaagacggtctacaaggggctggacacggagacctgggtggaggtggcctggtgtgagctgcaggtgagggtgccccagcccgcagggggctttccgcagggtctgtccgcgagtgcgtccttgggcctgtccttgctcctgcgcctggccttaagaagccctgggggcggcggggctccatgtgtgtcaccctctgtgtggatggctggcaggatgcataccaggtgtgcggacggcatgtggggcctggctgtgtccgtgcgcaggttgcggtttgtgagtcagctggtggcgagggcaggcctctgttgtgcgtttggtgtaagtgtgcacgctgtgggcgtagagagggtcctggagagtgggcctcggaggctgtgtctcttaggctgctgcttctccagtcccgatgacctactttaatgacccagggagtctggactgttgtgtctttgcaaaacagtgtggaggcttcaaggcccggtgtgtgcagtcagagtgttttgggggctctgggctgcccataaattagtactttcctgtgtccagcaagccgtggctgccccagcagggatacctgcagagacttcttctgacccagggcctgtgacccagaggtggtgcctggtagagctctggggacagctgggcaaggcctggaagtgtggttagtcgcctctgctgctctgagagctccatttgttcacaaaatggacgtgtgagaggtcttaaaaccgagtcatgcagaatgcgtgtgggggtttttcttggctgcagaggctctgggcatgcatttttcataatcctgccatcaccgtggtgt

SEQ ID NO: 16797 - DNA, 1001 bp, Artificial sequence
  DNA replication origin
tctgcagggtggtggatggaacaggggtgctgcagtaggctggatttgagttagacctcggcagccagagcctgctgatctggctgaggcatcgcaggcgcatgtgactcttggagcttgttagttcccattccctttaaggaaacgcaggcgattctgtctctgggtctgtcccctgcaggcatggggtggagcctggcctctgtccaggggtctcttgctccttgactctaggtgggaacagcaaccgagaggtgcttctggtctatatgctttttgtctatatgttgatgttccttgccaggatgttactggtgccccaaacttgtggtttccctgcatctcccccaaaagaagtacctccaacatttgtccctagtcgatgtgtgtcatttgggatcagctctctctgtgctgatctgagagggttttccatgagagggagtctggacctgcttagaatagccccctttgctgagaacttggtgtgtgttggggctgtgctggaagtctcgtcatcacaaactgtgaggactgaggggaacaacccccaaggtcaccagtgaggagatggcagggcattgtgggatcaggggaggagggcccctgcctgtgtgtagagtggtgtaggctgactttgtgcagagctattggaaggactgatgggactgcctgtgtgatgtcctgggtatgggccaggggctgctgggcgtgtggaacggaagagggtggggtgtagggctgcagggagatcaggggctgtgggaggggcgttggactctgcgaggggagtgtgctcctgggtgggatgtggggtcaggtctcactgagcagggaagggtgacaggtgggtgctccttctctaggtgtgttggctttgtgtcgtgaggggctctcttagtccacagtgtggagatgccatcctgcacatgaccgctagcattctgggcatggggagggttcctgggagtcacgctttacactgtagagggagggtctag

SEQ ID NO: 16798 - DNA, 2110 bp, Artificial sequence
  DNA replication origin
caagtgggtggcagtggaggatggggggcatgggatgctcagagccccacaggccttgtggggtggggcagtgatgcttctgctggaggggtggggcccagagcttttcggggggcgctgggaaggtccttcctgggggctgcaagtatgaccccagtaggggaaccccaagtaccctttgctgaactcagctgaggaccttgagctgcaatgaggccccctggggcctggtgggccaggggtttggcccagggaaaggtatggcagtcaggaccatggctggagtggacagtggtctgagttgggggcattggtggcgggtggtagcagaggatgcagaggagcagccacccaggctggggaggcgcctgctgagtgaggaggtttcagattttcactgaaagaaagaaaaagcgaatgagaacaggcagctctggggagccgggagaccctggccacagagcaggttgggagggagcctgtgggagtggctgcggggtccaggccgggggcacaggggctggtcgttgaaggcctagtcccctgcagtctgtggacgtgccactgcactcggcagaggtgactttgcagatgggattaagttaagtatcttgagactgggagattgtcctgggctgtcagagttggccagatgtcatcttcaggctgtcctaagtgggaggcaggagcttctgagacagagaaggggatgtgggtgtggaagagggaggaagggaccgtgggacagggaacgaggcatctcgaactgtgagagaatacaggtggtgttggaagccctgtgtgtggtgattgaagccgggggaggctgctgcagcctggtcactgtccccactggttacccacgcagccctgtggacatggtgcagttggggccagccaggagccctgtgggagggatgtcccgagggcttcctagacaaagctccctgagcagggcctggagacattgatggggctgcgggatggcatccttgggaacgggtgtcagggaaggctggctggtgtgtgtgtgtgtggtgggggtgtgggggctgtattctggtaagtgctggagaggagagggctgacataaggccacactgaggaggtgttttaactgcctgcttggtcagtgggtactagggagccactgaaggctcctgggggagagtatatgaaaaccgttcagagatatgggcttcacagctgtctgtgaggtgctgggagtgggagaagcagaggcaaggacagcctgggtgctcaacatttctgctggggaggcagacgagggcgggcagaagaactgatggcctctgtcagccgcatggaatggagaaagtatattaggttacggcttccaagagtcagggaggcccaagcacctgcaggtagaactgcccaggtttggaatgggggccagaaaggcggggccagccctcggggctgtgggccccaggaggactcagggttctaaatgtgctgggaagccccactttcccccagcaaactgttgtcgggtacccaaggtgcctggcatgggggatgctgcaggaacaagctgctggctcccactgaggggcaggggtggggaagggtgctgactctgagccatcacgggctaggtgtgtgacaggatgggacagagtgggtgtttgcaggctctgtgacacgggctgacattcactgtcctgcctggccctgatgtgaatgtcatagcagattgtcagcactgtttggggctcagggaggctcagaaagtgagggatgcccgaggacaccagggaggaacatgggtgtctggtgggggtatggggaccccaagctgggcagagccttggggctgtgtgtttggtggccttggactgaccctgtcctgcctggccctgggtgaggacagaggaggccagaggccagcagggctgaagagctcatcatgctggaagccacaggccaagaagtgaactgagcttgcaggggacagcttcaggtcaggggaggccagtggatattggagttaggcactctataatatgttgaacatattgggctcagatcagagctgtgttaacgtctgtgggaggtcctgctttcctccatccattctggtaca

SEQ ID NO: 16799 - DNA, 1239 bp, Artificial sequence
  DNA replication origin
accgatgatgaatgagtagatgaataactgaatggtgagcaaaagagtgaatgagtaaatgagtgagtgaatgtgtgagtgtgtgaatgagtgcgtgaatggggcagatgagtggatgagtgagtgagtgaatgtatgagtgagtggatgagtgagtgaatgagtagatgagtgagtgagtggatgggagtgaatgagtaaatgtgtgagtgtgtgaatgagtgaatgtatgagtgagggaatgtgtgagtgagcgaggagtagatgagtgagtgaataagtggaccaaaaagtgactgagtggatgagagtgaatgagtaagtggacgagtgagtgagtgaatgtatgagtgactggatgagtaagtgaatgagtagatgaatggtgaatgagtagatgagtgagtgagtgaataggagtgaatgagtgagtgaatgagtgggtgggtgagtggatgagtgggtgggtgagtgaatgagtgggtgagtgagtggatgagtgagtaaatgagtgagtgaatgtgtgagtggatgagtgagtgagtgaatggatgagtgagtgagtgaatgtatgagtgagtggatgagtgaatgaatgagtggatgagtgagtgagtggatgggagtgaatgagtgggtgggtgagtggatgagtgggtgggtgagtgaatgagtggtgggtaagtggatgagtgagtatatgagtgagtgaatgtgtgagtgagtgatgagtgagtagatgagtgaatgagtagaccaaagagtgactgagtggatgagtgagtgaatgagtgactgagtgtatgagtgagtggatgagtgagtgaatgagtgaatgagtgagtgagtgaatgagtgagtgagtgagtggatgagtgattgaatgagtaaatgtgtgagtgtgtgaatgagtggatgtatgagtgagggaatctgtgagtgaataagtgagtggatgagtaagtgaggggatgagtgagtgagtggatgagtgagtgaatgagtaaatgtgtgagtgtgtgaatgagtgaatgtatgagtgagggaatgtgtgagtgaatgtatagtgagtgaatgagtgaatgtgagtgagtgaatgaatgagtcagtgaagaagggagggagtgaatgagtgaatgatatgagcgcatgagggtagacatcctctgggacgtgttctcctggaagccactgaagtccctggggctcccatagcggccctggacacacccttgagac

SEQ ID NO: 16800 - DNA, 1141 bp, Artificial sequence
  DNA replication origin
atgagggtgtgtgctgtggggaggggtctggcgggttgatggaggaagaagggtctcatgggcgcggctgcatttgggatgtaattttttttaccaagatgacccttgtcacgatcctgccgcctgcttctcctctctgctttggagtctggcttgatgttctttgggcctttccggaaggatccaggggtcttggcttgcatttactttcactctgatctctccccttatctgtccagatttacctgctttctgtctgtttagaagtccccggaattttgctcttctgtgtttagttatgtttctggtttccttcggaaaatacacgtttcttttctgacattcccatgggaattggtgcaacagaggcaggcattgctctgtgggctcattggaccaagatgaggaggtgatcctgggggcaggacctcaggtggaggtgagaagggcgtggcacgtgtgcagcaggagaggccttggctgggcctttggacatggctgtcacctcgtgaggggaagttggaagcacatggagccttcggggccatgcaggctccctggatttattctgagccctctgtggagagaatctattgaagtatttgggggaagggaagggccaggatccagggggactatagtgagggatgaggtgggagagagcgtggcgagggatgggtgagctcagacagggtggtgggagtcagaggggagaggtggagattgggcaggcggcgggagggtggccagtgctgagtggtgtttgaatgtggtgcctggggttggtggttcccttgtgggatggtgggcagagcgggcatgtggtgcatgcacctgaccagggttcccgggtgatgatggtggcgtttgtttgctgttttctatttaaacttaggtcagtgattggttctgctggcttgtgcagacacagtggcccaagggtctggggaggtgtctgctgtgtcctcctgcacaggagggcctgggctgccctctgggctgctgactggtcagtttggctctgctagggcttttctcttccctccattctcagctcttatctcagtcacctgtccacgtctcctctgttctaatccactgggccctgagtacttcttctgagttgtgtatacgttagaag

SEQ ID NO: 16801 - DNA, 879 bp, Artificial sequence
  DNA replication origin
actgggctgcccgccctccctgaaggaccccagggaggtcatggcctggaaggaccaagagcagcctgccaggttggtagagaaggtgaggctggagggcaggagacagcagccaagccagccaccaagggacaagtggctggttgtgtgggaccctggagcgttcctggtgcatatgactgtgcacactgcccagcccggactccccagcccagccccaactccctggccagcccaaccccaggtcacaggtcacatgcacagacaaccccctctgtgggtgtcctagtgcaccagccagggcctggcaaagcgtgcgccaccactgacggcagccatcaacctagaattacctgcggagggacttgagcaagcggctgcaggggcgcctgtggcatctggaggggcttcagctgagcgggggcccccacctgggaggctggagccaggtacggtggcaggtgggggggaaccggctggagggggaccacgggctgtggggccaggacctgcggcaggggtgtcggctgggccagcggaggaggctagagggagagaaggtagctccccttagaccaccaatctgcccagacaagcgcaccccactggttacacatgacaggatatcaaccctcaccctcacatgcacacgcacatgctcacattcacacatgcctgcacacacacacttgcacagtcacacgtatacacattcagacacacagatcaccaaactccagccagcctggagccagggcacagcagatcttgcagaaatgttctgagtgagcagagccttccatgtgcagggcactgcgaacactatgcacgcacacaaacacacacacacacgtacacacacaaacacatgcacatacg

SEQ ID NO: 16802 - DNA, 1257 bp, Artificial sequence
  DNA replication origin
gccacaccaaggctgccagaccaggcctgggtgagggcaggtacaaagataccacaagagcaggggccacagagccatgggaaggtagggacacagaacctatcaggcacggactcctgcatctcctgacccattcggaaaacggaagagatgcagatgcctcgcgctggcgccagcccccgcctccctcagcctcacacacatctcttcctgagaggggcgaccccaggcagggctgcctccttgcctgcctctgtcctcctttgcatctctgggtcctgagggtccccagacgctgggagggtgagcccctgcccagcaggtgattacctggctccctggtgtagcagctggagcagcttgttcaggaaggtggggctggaggggctcagggcgcacaggcagtgccggctgcgggggcagcacaggttgtgggggcagcatgggttgcgggggcagcacaggttgagggggccgtgtgggttgcgggggcaacacaggttgagggggcagcgtgggttgcgggggcagcacgggttgtgggggcagtgtgggttgtggaggcagtgccggctgtggaggggtggccctcatattctgcaccgtgtgatggggggaaggagggacgtcagtaggcgccatctgtgggaaggccgctgggtacacaggttggcctgggagctgggccacggcagaatgaatggacagggcagccacgcccggtggggctacggccagcagggggatagtggccggtgcatttggcacaatggtccggcagggcatggccaggggcgccccaggggggtggggcagcttcacagcctgcagaggcaaggctggggacgcaggggggagtggggcagcgaggctcggcaagatcacggctggagagaaatactgaggtggtggcacgggaggcacagtcgcggtcggcaggtctgggagggccggagggaggccgtcgattcccgccaggggcgtgatggggggcacaacaggaatcgggggcatctgaaagagacacaggagtgtgtcagtgtgggccccaaccagggtccctgcccacagcacttgcatgcaaggacagccacagtcattggggacgaggggacacgggatgaagacagcatgaccctttccctccgagacacctttgtgtagctgctgttgaagggaacccaaagataaacccaacaggtgcagaaatctcaaccatgtaaagctcttcaaatagaaaaggaaagttggcaggct

SEQ ID NO: 16803 - DNA, 1483 bp, Artificial sequence
  DNA replication origin
ggagctgggtgagggcccagaagcaggcttggggtattcgcacaggacgggctgcctctgtaggtcacagatttgggccctggagactccagactgttccagataagctgactttccccgccattgccgacgtgctggttgtcctttggtgccattaatgttcttgggttttgctcagctatggaggttctgatgtcacttctggaaaagagctgagtgacagctgtgaaggcgcctttggagggggcaggctggagggcagggcagcccgaaaacaccaccgcaggtccacgcgtgcgcgctcccggcaggagagggccagccggccccggcttaccatcttgaacgtgagtgggcggggcgtggcgggggtgtggtgggggtgggggcatggtgggggtgtggtgggggtggggccgtggcgggggtgtggtgggggtgggggggaggggtacttgggggtgtgtgggggtgtggcgggtgcacgtgtgggtacgcccgtggtgggtgctgatgctgccccttccaggtgtgcaacactggggacaagatggtggagtgccagctggagacgcacaaccacaagatggtgaccttcaagttcgacttggacggggacgcacccgatgaaattgccacgtatatggtgaggctgggtctgggtggcttggctcccggtgtttcttggacacgtgtgggcctgagcagagcgccacaggtcacatgtcgagcctggccttgtgtggaggtgtcggttggcccaggggcttttcgggacagtgctgaccttttacgcctcgggctcttccccacactgggcggaaaccccttgggtttggaagaacagcttgaaggatgttctaaccattctaagatgctgctccctgagggcttctggagcatctgagcccttcctccaaataaaaggaagccttgtgggtaggttccttgagtgaggcacgggagggcatcccggagtctgatgtcctgtggtccttgcttagagcttcctccagcctccccagctggagtgcgggctctgagccctgacccatgtcccatgtgcccacccagctctgcctgcatctccctctggagccacccctccctgcctgtgcagaccaacctgagtccatgagcaccttgtaggccttcacagccccacacctgtggtccccagcacctgagccaggctaggagtggggatcgttttcgggccctcagaaactctccagctgaaagcacgcacgaagaaacatggaaaggatgtacatgtggtcctcaaatttcctggtgcatccgtgactgcctcccaggagaacattctccccagaccattattcctgcatcagtgaggtttagggagccaggtcctaaaggggccagcagcacactggacagtgttgtagcgctcactccagatggccaccaagtgcctggagtaggccggcatgagtagggaatagaatataccactcaagtt

SEQ ID NO: 16804 - DNA, 1352 bp, Artificial sequence
  DNA replication origin
aggctcctggaagtctctcctttgaggtgcttctggtcctctccctgccctttccctagaccccacctgcccctggctcccaatcacttctgccatttctagtccccaccccattatctctaccctctgtctctggctcctggcccctgtcacccaggctctcagagcctatagcagctcctctccccagtgttctcacatccacaccttcctgccccctacaagcttctcttcgtagcagccacagctggggtgtggcttggcaacatctcagctcccctttgtgcctgctgaccctgaccactggctccccaggatgacattcctgctgagcaaatgtgcccaggatctgctgccctctatcccaaaaggttctaggtcatacccaccttgggctccatccactctctggcctccaccaaggatctgttgggccatgtggccaatgggggccaccttcctggaggcctctaagaccagcagtgattccacccatccctgccttcctgcctctcccagcagctccagttccctcctcagttctccacgaacacagagacactcactatatcctcaatgtatggcactgaccaccccgccagcctgggcagacactctcttagcctctgtgcatacgctgtgcagagagggctcgcaggagagaaaggagatgtgcacggctcttcccacataagcctgtgatttccaacaggacacgacttacaaacgtgccttcaggcactggtgaatttggtgttagccctcccatcccgaaggacatcccagtaaccccccagccgcagcaggacagaataaatatttgctggatgagggaaagagacatggagaaagagagaggaagagaaagaaggagggtgggagagagagagacagagacagagacaaagaaaggagagacagataggaagagagagtgtgccagaaacagagtggtgggaagcgagacagggagagaaggaatgaaaggggagagagagagagaaggagaaaggaagaaagagggaaggagacagatgagaggcagacagggtgaggaagacacatgcctcagtgatcccccaagacatacccccaagtgcagcaggaggaggcatggcacccagagaagccagaagccaagcagacagcagggtgggggccggcccagcccagaggactctgagtgggagactgtctactcaaaaccacagggatgctgggcctggtgtctcacacctgaaatctcagaactttgggaggccaaggcgggtggatcacttcaggtcaggagtttgagaccagcctggccaacatggtgaaaccccgtctctactaaaaatagaaaaatcaac

SEQ ID NO: 16805 - DNA, 817 bp, Artificial sequence
  DNA replication origin
aggcttatgtgggaagagccgtgcacatctcctttctctcctgcgagccctctctgcacagcgtatgcacagaggctaagagagtgtctgcccaggctggcggggtggtcagtgccatacattgaggatatagtgagtgtctctgtgttcgtggagaactgaggagggaactggagctgctgggagaggcaggaaggcagggatgggtggaatcactgctggtcttagaggcctccaggaaggtggcccccattggccacatggcccaacagatccttggtggaggccagagagtggatggagcccaaggtgggtatgacctagaaccttttgggatagagggcagcagatcctgggcacatttgctcagcaggaatgtcatcctggggagccagtggtcagggtcagcaggcacaaaggggagctgagatgttgccaagccacaccccagctgtggctgctacgaagagaagcttgtagggggcaggaaggtgtggatgtgagaacactggggagaggagctgctataggctctgagagcctgggtgacaggggccaggagccagagacagagggtagagataatggggtggggactagaaatggcagaagtgattgggagccaggggcaggtggggtctagggaaagggcagggagaggaccagaagcacctcaaaggagagacttccaggagcctaagaacaggaagtggatgctgggagggccgtggagtccagagggaagtgtggggaccttttaggaaagggtggggaagattttcagcctcaactgggaattgaggtgacttggcatctg

SEQ ID NO: 16806 - DNA, 2432 bp, Artificial sequence
  DNA replication origin
tgctcttgctggtttttctccggcggccagtggggggtgccgtgtggaagaagcccacgttggggggcagtggcttgcccaggcggcggtacagagcttcgatctcctgcttctgctggctctgcagctccgagatctccttcaggtgcctgcaggaggggacaggagggagcgccgatgggcttcctcggtgtttccaacaccgccagctcctccaggagggaggtggcgtgggagaacatgggatgaagggtgggcaccctgcctgtgccttggcctgggccactctaaagcggcacacaggggctgtaaaatgacactgtttgttcatatctaaacggggaggtcccaaggtagtgggcctctggcatcgacgtgcccaacagcacgggccaggctaagaagcctcaaacttccaaatacccagactcggaatgcttacattgatacttgcaatgaaagtcccaaacatgaacacaggtgaagggaaatcagcaggtgccaggcactagagactgcctccatttatcaggcaaatgtgtgttatttcctccacaggggaaacagacagtggaaggcagctcagaccaatgcaacacggcatgaagaagtcagcgagacgctcactgacttccaggggccatgccacaccatatgtgagcccactgccacaggtcccacatcaccccgcaggtgaaatgcaggtggctcattgaccatgggcaagggcagagtctagaactgccgaggcaagaggaggatgcccaggggaggatgcaaaggggaggatgcggaggggtggatgcagagaggagaatgtggaggggaggatgggaaggggaggatggggaggggatgacgccgaggggaggacgccgaggggaggacgccaaggggaggaagccgaggggaggaagccgagaagaggatgtggaggggaagatgcggaggggaggaaggtgaaaggaggatgctgaggggtggatggggaggggaggatgcggaggggaggaagccaaggggaggaggccgaggggatgcagaggggaggaaacagaggggaggaaggtcgagggaggtagaatggggaggggagtaggctgaagggaggatgcggaggggagggtgcggaggggaggaaggtgaaggaaggatggagggggaggaagatgaggggagaatggagaggagagaaaggtgagggaaggatggagggggaggaaggtgaggggaggatggagaagggaggatggaggaggaggaggaaagtgaggggaggatagagagggaggaaggtgaggggagaatggagaggggaggaggatgaggggaggatgggcaggggagaaaggtgaggggaggatggaagggaaggaaggtgaggggaggatggagagggaatgatggagaaaggaggatgaagggggaagaaggtaaggggaggatggagaggggagcatggagaggggaggaggccaaggggaggaaggtgaggggaggatggagggggaggagggagaaggaaggatgaagaaggaggaaggtaaggggaggatggagaaggaggaaggtgaggggaggatggagggggaggaaggtgaggggaggatggagggggaggaaggtgaggggaggatggtgaggggaggatggttaagggagggtggtgaggggaggaaggagaggggaagatggagggggaggaaggtgaggggaggaaggtgaggggaggatggaggggacgatggagaggggaggaaggtgaggggaggatggaaaggggaggaaggtgagggaaggatggtgaggggagggtggtgaggggaggatggtgaggggagggtggtgaggggaggaaggagaggggacaatggagaggggaggaaggtgaggggaggatagagggggaggaaggtgaggggaggatagagggggaggaaggtgaggggaggatggaggggatgatggagaggggaggaaggtgaggggagaatggagagggaaggaaggtgaagggaggatggtgaggggaggatggagagaggaggaaagtgagttgagggtggagaggggaggaaagtgaggggaggttggagagaggaggaaagtgagttgaggatggagaggggaggaaggtgaggggaggatggagagaggaggaaagtgagttgaggatggagaggggaggaaagtgaggggaagctggagagacaaggaaggtgaagggaggatggagaggggaggatagagaggggaggaaggtgggggaggaaggtgaggggaggatggtgacgggaggatggagaggagaggatggggagtggagctgggcctccctgttgcatcacagtgctctgagcttctgcaaggcctaaggccaccccaggggccctggctggaggcctgtaaccccttgccttcaccccaagtgc

SEQ ID NO: 16807 - DNA, 989 bp, Artificial sequence
  DNA replication origin
gatttgggataaagaaaaaggagcattaaccttgactacgcttttagctccagccacctttttaagagtaaattgctgggcaggagggggagggctagtcacggaacgaaaccgtaagcgggaccaggtgtgaggaggggaggtgataaaaagattatagggtggaggagcggaggctgaggaagaattgggacctagcttggcctggcgaggagcagcctggggaggaagggagaggtcagatgggtctgtagaaaaggaagattagaaagactcagcgatgcttgggattggtactgaggggacaggcgggagggaaagaaggaagatttgggacgagttgcactgggcacagagactaggaagggactgacgtgtaaaagaatgcctggacgtcaggcacctcagaccgtttgcctattttacgacaagaattatttagatcttgcaggatggaaaaattcaaagtgccattttctggctatttggaactattgtcgagtttgtattggggtcaagcggcattgcagaagaaaataaggcatttaggttttaggtcaggtgtgagtttaagaggttttaagtttttgagaacacaggccaagggagtagaaggacgaatggagggtggaaggttgcccatagtgaaggaaccaagcctagagaaaagagagagtagagaaacggagggaaggggttcgggggttcttaccttccagaaaagtgggaaaaggggttggggcgcagagataagaggtcggggcacggaaataagggatggggtgcagaaataaggggtcggggcatggaaataaggggtcggggtacagaaataagggattggggcgcagagataagaggtcgggacgtggaaataagggattggggcgcagagatacgaggttggggtacttgcccctcctctagaaaagtgggacttgccgctaagagtgaaggagaaggggtggaggggtacttgcccctctccc

SEQ ID NO: 16808 - DNA, 1144 bp, Artificial sequence
  DNA replication origin
ggggtggtggggccgtggcgcgcgggcgggctggcgggcgggggcggcggcctctaggggggactggggcgggtcgggggcgcgctcatggccgccgcggccgccatgtgctgccgcctcccagggccatgtctggggagggacctgccgccgccgccgctgccgccgctgcgaggccgaggccgaggccgaggctgagggccggggcggggcgggcgggcggcgctgacgtagcggacccgcccggcgcggacgccgcccaggcccgccggctagcaggcggaagaggcggcgccggcgggacgcggctcggggctcccggaggcggcggcggaggcggaggcccggagttgggccgggacgggatccgggaggcttctgagccggagcaggcagcgcctggaggccagaggccgttcgcccgcctcaggccggtcggccgccgctcccctcccctgcgccctgttcccggcagggccagagaggccgccgcctccgcccggtggttctcgggcgaagggaagccgcgaagcaggtcctggggaagagctcgcctgctcctgagggaagcagcgataagatggcgctttgaaggggagccgaggccgagtcactctgttcgtcgggacgccgcctttctaacgccgccgtcggctcgcaccactctgggcctgctgcccacactgactgcggggtccgggagagcgggatgctggccggccgcgcctggcttcttggaaagagcaggaaggagcgcgagaatgcagttccgcggcaggtgctcatcccagcagcttcgggctctcggttgtggtttttacacctatgacaaatgacatggccaaacacaccataatgtctgaaggtacaggtagccctaagcgcctgctcgtcacggaagagactgtcttgagagcacaggtctgttgcagcgtgggaaagcctgcgttaccactgcgcaatggctagactgaaacgtgcgcctttgcagtggatctcccagctcttctgagggagagggatttgaatcttgttgctttagtagcatcttctggaaggaggtcgtttacgtaaattctgttccaaagctctgtcgtaactgcttctaaaatgaggttgatactgtatgtatattaggcttgca

SEQ ID NO: 16809 - DNA, 1251 bp, Artificial sequence
  DNA replication origin
tacaccgactgggtcagcggcggccagtggaaccacatgcttggctacctggcggcgctggccaaggcctgcttcggcggcaacatcgagctcttcgtcttcttcaacggcgcgctcgagaaggcccggctgcacgagtgggtcaagcggcagggcaacgagcgccagacggcacagcagatcgtcagccatgtccagaacaagggcaccccgccgccaaaggtctggttcctgccgcccgtctgcatggcccactgcatccgcctggcgctcatccgcttccacgtcaaggtgaggccggggatccgggcgggccggggaccggggccgcgccgcacccctatcccccttcccagggcgcagaatgtcgcccggccgtggcggcgctgggggcagcgagttcccccagcccttgcccgggatagcctggccgggccgggctgcaagatggatggccgcgggtgcaggccgcgcgctgcccaagcccgtctccagctgtccctgttcggggtccgcggccgcgtggggacacttgagggctgggagagagccccggaccagaattcggaggcgacagtgtcatcatccccaatatccttagtttttcccatcctatttgaggcgggcaggctatcactcaccttcaactttgacaaaatactcccttttctaatttagcctgttctttcccagcaacaggttcatcttggaagcaggcaggatacagagtaatagagggggtttcgccagagcccttgggggctgcaaatatcagtgctgctgccgccgcccttgccaatgttgttagcccggtgacagcgagacgtgtctaagggccagtgccctggcctctacttcagaacgcagtgccctgtccgtgttcctcttagtacagggtgtttagagaatctttctatggctttttgtgttagatttcaaagacccgtgcactttgacaggatgggattttgtcagttctgtgacttcacgtccgtgtgaaagaggtctttaaggcagttcggttttgtagatcccatgcgaaaggagtcgctcaaaatcagggggcgaactacgcgggcgtgaactcgcaggatttatttttcgggtgcacagtaagtattcagtgaccttcagcggtgccctgacgggtgggtaatcagagctctatatcaccggcctcctctggccctttggcagagggcttcgcagctggcactgggccagaggagaacttcaggacccagcagtgac

SEQ ID NO: 16810 - DNA, 1167 bp, Artificial sequence
  DNA replication origin
aaagtggggtgggaccccggggagaaggtgggcgggaccccgaggataagataagttgggggaacccgggcaaggcagaaggagagacgcggggtgcgggagtggagcccgcaggagagccttcctagtctagaaggccgacaagcaaatacttggccctaactttcttctgacccccaccacggtgggggtgttcctcctcctcggccgcgctgcctccctccgttccccactgagtttctggttgggacaccacttcctctttcccctcattttcggctggggactgccgcctccctcgcaggatcccgcggacttccctgatgctcagccccagaggaagaggacagaagcccgggccgggagtgcgctggcacgggctggtcagctctgttccctggcatttgagccccccaggcccgtgacctaaggggccgggctggtcagctctgtcaagagagagctccctggcatttgagccccccaggcccgtgacctaaggggcgaggagtatgggaaccctggcccccgtgtccagggaactgagcccccacggtggggaggagaagcggaggtgcgctctgaggggtcacttgcacgcgttctagaggaggacttccctgcctcgccagcgctgcatccttggggcatccgcgctgggcaggggccacatccctgcccgcccttcctccctcaccctctttctctccccatcctccctcagcaaaatccgcatcgtgctgggaaatgtgggccacccctgctcggaattccagaatctccggacaggaaacctggctcagtctcctagcagcatccatgacaaggctccttagcccctcagcccctcaccatcaccgcccacctgcagctgccaaggggccgtttgctccaccgcaggcggctcaattaaggtccttcctcctactgagccaaaatctaccctcagagtcagccacccacccccaacaagtgaccccgtggatacagactcagggcagtgcccaaagcactgggcactggggaagggggcggggggagaagtagctggccatagagggagaggaaagagcaggagacccccagctcccacacctctggactggccaggatggcctgcaataggccttcctacctgaattccggttgtcactggttcccttcctc

SEQ ID NO: 16811 - DNA, 1016 bp, Artificial sequence
  DNA replication origin
cgctcggccccgccgctgcgctgcccgggtcggtccgggccgggccgggggccgggccgcgcgggggcggcgggggcggcggggcgcaggcggcgccgcggccgggaggggacggggacgggggcgcacgacagcccccgcgcgcgctcccggccaggcgcgtccacacaatgccgggcgcgctggctggaggggccgcgccgggagccgcccgccggcccgcggggctcagggcgctagtgtgcgcgggggacgggccgcgcgcgggacacaaaagggaatggacgcgcgggggcggcgggcggggagccgcggccccaccgaagggacccccggccgccgagcggcctctacgtcagcgccccgggtggcgccgcctccgcccgccggcctgggccgccgctcccgccgccgggaaggcgggctggggaaccctgcgggggagaaggtgggttgggggaccctgccgggggagaagacggccggggggaccctgccgggggagaaggcgggtggggggatctcgaaggtggaagataggccgagaagggcccccaaggctgaaggtagacccaggggtccgcgggcgcgaaggtgagctgggggagccttgagactgaaagtggggtgggaccccggggagaaggtgggcgggaccccgaggataagataagttgggggaacccgggcaaggcagaaggagagacgcggggtgcgggagtggagcccgcaggagagccttcctagtctagaaggccgacaagcaaatacttggccctaactttcttctgacccccaccacggtgggggtgttcctcctcctcggccgcgctgcctccctccgttccccactgagtttctggttgggacaccacttcctctttcccctcattttcggctggggactgccgcctccctcgcaggatcccgcggacttccctgatgctcagccccagaggaagaggacagaagcccgggccgggagtgcgctggcacgggctggtcagctctgttcc

SEQ ID NO: 16812 - DNA, 1496 bp, Artificial sequence
  DNA replication origin
tgccgggccgcgcgcccttttgtgcccagggcgggggcgccaagcacggggcccgcgctgggcgcccctggccgccgcgcacaaagcgaggcccgcgggccgggaggtgggctcggggctcggggcgcggggaagttggggctccaggcccgggccgggccgcctgtcagctgggtcgcggcggccgcagaggccgggcatccggagggaggccgaggcccggagcccccgccgcctcccccctgcgaagttgcaggaactttccccgcgcgggctcggggttggccgggccgggagaagcgggcgcgcagcccggcgcgggtcccgggagaggcgcgagtggcgggctccgactccggcagggctggggagtccgtgggggctccggcgaggtggcagccggcgcgcccaccctccgccgtggccggcgagctcccttggaccttgtccccgagggcaggacccctcccggacccccgcggagcagctagacccggcaggcctgcaggtccgcgggcaggagtgcggtgacagaatagtgtctgtgagttgggtaaggggggtttgttgtggctttgccacctcctccctggccttcagttttccccgtttctctcctctccgttcccggcaggaacgccggttttgacatgatcttatgctccctaaggaagatggggaggggggaaggaggtaacgcttggagacactgaaaacccccgccctcttggcccttgccgatggccatgacctggccccatgcctagggcaggtcccttcccaccaagaagtaaatggaggaggaggaagaggaggtgacagtgttgcccaaactgctccaacaggttctcttgcatctgactttgcctgtgggatgtgtttggacccggggctggccagggctgtatgccctctggggctccagtcccaaaccaccggcagcaagcagccgggggaaagagaggggtgtgtggtggtgggtggtccgggattctccttccagagaggagatcctcctgcaggttctaagactgggtcttcaagactggtcagtggtgcttaagagtgggctgtggccccaagtccagtcctgccagtttacatgtggggacctgggtggctgggatgtgacagggcctgctatgtctgtcagccccagtcctgagtcctacctccctgctgttagaagggcctgggactctgtggggtggggatgcccacggaaatctgggctgccttcctgggtatgcccagggctgtggaagccccttagagcaagggagactgagtgtgaacaccgggctctgcccagaacagggctgacatgcacaccctcaactggcagccgttgagaagttcatggccgggccaaagtgagtgagagcctctaaggctcctcatatccagggatgctgagctgctggccctgaaaagccctgaaagtggtggggcctctgccttctcccccatctccaccggagccctgacctggcgag

SEQ ID NO: 16813 - DNA, 1522 bp, Artificial sequence
  DNA replication origin
agcaccctgcaagacagggccgaggggaggagtgcaccacccaaggcctctgacgcggacagacagtggcaggtgtgagaatgacaggagccgcagctggagggctcccgctgcacaccagaagcactgggagccgccagaattctttgcacaccagcagcactgggagctgctggaattttttttttttttttttgagatggagtttctctcttgttgcccagcctggagtgcaatggcgtgatcttggctcaccgcaacctctgcctcccaggttttaagcaattctcctgcctcagcctcctgagtagctgggattacaggcatgtgccaccatgcctggctaattttgtacttttagtagagatggggtttcaccatgttggtcaggctggtctcgaactcctgacctcaggtgatccacccacctcggccttccaaagtgctgggattacaggcgtgagccaccgcgcccagccgagcctctggaattctaagcagggcagtggtgtagtctgcgggttgtccattgctgtgcggacagtggcctgcagcagggcagagtgggggcacagagagcatcaggaggctcagggcaccatgcctggactagggggcagggaaagggccaagggggttcaggagatcagtaagtctggtgatagctgagaaagtgggagggaacaggaagaggcaaatatggacggccaggagactgttgtgagtggtgggggcagaggcggggccatttacagagggcccacggtggaggggcaggagctggggacagggacagatctgatctggggacacatgtggtctaagatacctgtcagattctccagggatgtgccagttggatagacaggccacaagctcagaagagctaaagaagttgtggagctgagtccccagaaaagcctcaaggagagcagttaacaggacaggaagcaggcaggtgggaggaaatccatccccaacaaaggacaagacttcaaggaactagagggctgcaatgcctaattttgccaagagggcagttaagattagaactgaagaatgtccactggctttgatcacatgggaatagcgttaaggataaaccaggggggactagacggtgaggaagaagaaagaatgtgtacaggcaaccgtgtgggaagctcgaggcatacagaccatgcaaaggaagctctgaaagcaacagggaaggcctcccatccacctgggccacaggcagaaaattgtccttgatgaatcccaatgccaacgtcctagcagtgagagttccaaacttgcactaaacccatcggttgggaaccccaaactggatctggaactaatcttgtgaaaaccataaaaccttagcaaaaggcaaacacaaaccgtcttgtaggtggacagcagccaaggacatactagtcccaatggaatgtgacccctctgaagcaccatgccccacagaaggaggtgaaccaccaagagggtcagtcaatagacacaccagtcaaaagagatcacc

SEQ ID NO: 16814 - DNA, 2709 bp, Artificial sequence
  DNA replication origin
aagggacgttgcagggtgtacctgctgggctggaccacgtgagtggtggggaagcctggggcacctgtcctggctacatacagcatctggagcccagggcaggcccctgactcagagtttctgggtggggcctgggccttgacatttataaagcttcccaggtagttctggtgcacagacaggtgagggtcctggctgcagggggttgtgggcggtggggcagggccctgtgaagaggccagggctgcatcccatgggagggcctggcagggaggtccccaaggagcccaggacttggccttgggggtccttgctgtccagcagcaccaagcccctggttctgtgggatgacagtggtcaccccatttcaccactctgtgagcctagacaggctgatcacacactgggtgtctcagaagattcttctggaaggaggggagccagtgtagacaggaggaggtgtgtgcataggcatggggcagaggaggaggatgcggatgcgagacaggctgggcgctatgggaggggccacctgaagctgagggcagcgggggtgcagacagggcaaagagaaagcctgggagtctgtgtggagcctgccagaagtgggtgaacttggactgagctgaggtgcagctgtgtctgttcaggtgcagatgcagctgcaggtctatgttcaggtgggtgcaggtgtgggggtaggtgcaggtgtagatgcaggtgggggtgcagggtgggggtaggtgcaggtgtagacgcaggtgggggtgcatgtgtgggggtaggtgtaggtgcagatgcaggtgtggatgtaggtgtgggagtaggtacaggtgtagatgcagctgtgggtgtgggagtaggcacaggtgtagttgcaggtgtgtgggagtaggcacaggtgtagatgcaggtgcgggtgtgggagtaggcacaggtgcagatgcagatgtgggtgtgggagtagggtcaggtgtagatgcagatgtgggtgtgggagtagggtcaggtgtagatgcaggtgtgggtgtggatgtaggtacaggtgtagatgcagatgtgggtgtggatgtaggtacaggtgtagatgcaggtgggtgtggatgtaggtacaggtgtagatgcagatgtgggtgtgggagtaggtacaggtgtagatgcaggtgtgggtgtggatgtaggtacaggtgtagatgcagatgtgggtgtgggagtagggtcaggtgtagatgcagatgtgggtgtgggagtagggtcaggtgtagatgcaggtgtgggtgtggatgtaggtacaggtgtagatgcagttgtgggtgtggatgtaggtacaggtgtagatgcaggtgtgggtgtggatgtaggtacaggtgtagatgcaggtgtgggtgtggatgtaggtacaggtgtagatgcagatgtgggtgtggatgtaggtacaggtgtagatgcaggtgtgggtgtggatgtaggtacaggtgtagatgcagatgtgggtgtgggagtaggcacaggtgtagatgcaggtgtgggtgtggatgtaggtacaggtgtagatgcagatgtgggtgtgggagtagggtcaggtgtagatgcagatgtgggtgtgggagtagggtcaggtgtagatgcagatgtgggtgtgggagtagggtcaggtgtagatgcagatgtgggtgtgggagtaggcacaggtgtagatgcaggtgtgggtgtgggagtaggtacaggtgtagatgcaggtgtgggtgtggatgtaggtacaggtgtagatgcaggtgtgggtgcggatgtaggtacaggtgtagatgcaggtgtgggtgtggatgtaggtacaggtgtagatgcagatgtgggtgtgggagtaggcacaggtgtagatgcaggtgtgggtgtggatgtaggtacaggtgtagatgcaggtgtgggtgtggatgtaggtacaggtgtagatgcaggtgtgggtgtggatgtaggtacaggtgtagatgcagatgtgggtgtgggagtagggtcaggtgtagatgcaggtgtgagtgtgggagtaggcacaggtgcaggtgcaggtgtgggtgtgggagtaggcacaggtgcaggtgcaggtgtgggtgtgggagtaggcacaggtgtgagtgtgggagtaggcacaggtgtacatgcaggtatgggtgtaggtacaggtgcagatgcaggtgtgggggtaggtataggtgtagatgcaggtatgggtgtaggtgtaggcaccagtgtagatggaggtgtgggtatgggtgtaggcacaggtgtagatgcaggtgcgggggtggaggtaggtacaggtgtagatgcaggtgtggttggaggtacaggtgtagatgcaggtatgggtataggagtaggtacaggtgtagatgcaggtatgggtataggagtaggtacaggtgtagatgcaggtatgggtataggagtaggtacaggtgtagatgcatgtatgggtgtaggtgtaggaacaggtgtagatgcaggtgcaggggtggaggtaggtacaggtgtagatgcaggtgtggttggaggtacaggtgtagatgcaggtgcaggtgtgagggtaggtacaggtgtagatgcacgtatgggtataggagtaggtgcaggtgtagatgcatgtatgggtgtaggtgcagatgcaggtgtgggtaaaggtgggggtgtggagagaagttgcaggtcactggg

SEQ ID NO: 16815 - DNA, 855 bp, Artificial sequence
  DNA replication origin
ggtagagcgggacccacacctgccgcctggaccacaggatcacaggaccacaggacagcgtgtgggggagacatgcctccaggtgggaagggcaggtctccaggggcgcctggagctgaccatagaaagtgatgtttctagcaacatgagcagaggtagaggcaggcagcaagaccctggggttgtcagacatgggccctgtgggctgaacagaaaggagagtctgcagcggctcagagcagggccctggggccaccgtcacagtggagggatgcgtcaggcccttggggagccccgcagttcgggagcaggtggagtgagctctccaggactacagcctgctgctggttggccagaggcgagggactcttcccctgcccctgccatgtgcccatcatctccatgcctggtggggagctcagaaactcggccaggtcagtctattctgcaggaccctgcctatatatgtgcccacatcctttcgccccggctggacccagagccggtccctgaacctgcagttggcaaaacagggttcaatttgcgaacctttggggccatacccagaataaccaccggggggcagggcagggccgggaacaaggaggacaattgtgtgaggttatttagtgcctggggctggggcgggtgctgggacttaagggctaatggcaggcgtgatggtaactatgggccaaaacaacaacaacaacaaaaaaacaagcatgctgtgagtgctgggaaggaaggcgacagtaaaaatcagctcagcttagtcattgatgcacatgtgctctgttaccttgttcatgcttcacagtcgccccccaagggagatcccctgagcgtctctat

SEQ ID NO: 16816 - DNA, 948 bp, Artificial sequence
  DNA replication origin
caccagtctgtcctggaagcacctctgtggccagctccttcatcctcgggtcggtcccgtgaggtggtaacaccacgattttcattttcagaggaggacattgtggcccagagaggttcggcagctggtcagtggtggaggtatcctgaggctgacctcacctgcaacttgggagctgaagccctggcctgcagacggcagagaggacagctagaggaggctgccatggggtcagcctagaggcctcagcttatcctaggccaacacctccttagattatcccacctaggccctcaaaggacaggactcctctctgcagcatcctaggggtgcagccgtacaggccctggttacatgcctcctgtgagggggagctcagtctcatgcctgggagagcactgcagccctgagccagggaagggaaaggccttcctattgcacaaagcctccttagcttcaggaggcatgcttgtctcactgccttgggtcaatcactatgaaagacacactgaacacacatacacacacatggagaggacgagggagagggagaaaaagtaagagagagaggagagagacccactcatggacccagggagaggtgcagatctgggagggagatgatcagggtgtgcagtaagtccccagggcaaagggctttcagagagagattgggttggggatgggagaatttgtgctttggactggggaagaggggagtgaggctgaggcagagaggaaggcaggtcttggaggcagcagagctcaagaaagaaggagcaggcaggtggggggcagagaggtggggcctttgacttcactcatttgaagtgaccaagagctctttctggggacaggctgagtgggcagagtgaggaggaaggagatgaagacatgagcacagctgggctgcagagggctgttgggcaggttgtgcactgcacacag

SEQ ID NO: 16817 - DNA, 762 bp, Artificial sequence
  DNA replication origin
ttccatcggcgagaatcgggggcagccagatccaataacttgccgcaggctgggctggcactgcgtgctgcgcctcctctgagcctagcactctggcctcacagtcggtgctcgtagcatttcagctgtatgactctaacagcaattacagtcatggccttcgccgccgccaccattcccgttccggttggagaacacaatgcaccgcgcacaggctgtgccaaagtccacaggcacccttcggcctccatcatcgcgccctcttcacagatgagcaaacggaggccagacgtcaccggcaggcggcgctgcggtgcgcgaggcctcgcacctgcacgggaagcagcggagaggacgcaggtaaggtaaagccaggcagacccgaacctggacgcgcacctgcgggggagggggtatgcgcggggcgggttgccgcccctcccgggagtacgggcggaggcaggggcgggcgggggctttcagcagctcgtccgcggaacatttgcatgtaatttgggagcgggtcacatgtgggagtcatcaggcagaggaaaggctcaatcagggcctaatcactgtctgtttggaggggtctgggcccaagtgaaaaatgaaaacggggctattttgcttgagtgacagccatcagtggccacctttgacctccccactcgggctgggtctgcccgaggtttaaaaaccaatcatcagggaaggggtgggaggggctccctctcctcggctctcccctcccccatcctt

SEQ ID NO: 16818 - DNA, 1410 bp, Artificial sequence
  DNA replication origin
cttcatctggagggggaagtgaagttgtgactggttgccgggtccctccgtgtgtcctcgggttacagggtttgtggtcactgacccaggaggggctggcagtgctgaggccaaccctgggctggggtctgaggaccagtgtggacactcctggagcccggcaccctcctggccattagccgtgaagcccaggctgtccctcttgggtgggcaccctggtgtactgagcacacagcccggggagcggcggcgctacggggaagcaaaggattgcacaaatcgggccatgcagtgctgccagcatgcaaacagggggaggcggcgtgacacggagggggtgatcaacccacgtgggtcgagcctggagcctagcggagggcggggcggggccgctggggggcaggatccagcaggggcgtctgtccccaggccctaaggcaggagccggggcggtgcggagggccggggcagcgcggcgagcctggagctaagtcgctggggaggtgggaaagggcccgggcatccaggcctgaggcctgagagggcagcggtcgggaccctcgggcaatgagagcaaggtagagtccatccgagaggacacgtccgcggtttgctgcaaaaagccccctttggctgctgcgtggagggaggctccggagagcgtggaatcagaggtgtggaggcgtggcaggggctgccagggggcggtggctgaggggactgagagcatggacaggctcctgagtgctgggtggtcccgcggaaagtgcctggggctctgcagggctctcaagagaccgcgtgcggcctgggggcctggctctgggggctgccatccgggatcagaaaatgtcccagaggagaggttggggtgtgccaacacagagtgagccgtgcactggcttgggactgaaggaacttgaggtgcctttgatactcgtatgtggagatgccaagaaggtgtccattgggcttccaggacctgcccggctgtgcacttggtgctgggggctccaaacccaaacgagtaagacaaacgcttagcaacttggcaaaagtctattggagccttgaatgcgtggttacatccaccctgagcctcagtttccacggctataaaatggggtaatcgcaggggaggaagaaactacaggctgtgggtttggggatccctgatgtcccctttcttgcccaggacctgtggcatctgcccactactggctgcggagcttggccatcctggcatgttttgatcctccctctacaaccctctggggcagactgtttgctatgaaggatgcagaggtgagtctccaacagctgaagtcacagtgaccagaatagtggccctttgtggacagaaccttgtcagggcccccatcccggagtcgcctctgtcccctgctccca

SEQ ID NO: 16819 - DNA, 840 bp, Artificial sequence
  DNA replication origin
cctcaaggaacttaattctgccaataaggatgagctgggaagcggatttttccccagagcctccagatgaggactcagcctggctggcacctcaattcagccttgtgagaccctgagaagtgaacccagacatgccaggccaggcttctgagctgcggacctgtgcgctgactgacggtggtgtttaaagtggctaaatatgtggtagttttatgcagcaatggaaaatgaatacagaggccagctccaggccaaatgccatctgacccacagatgggtccagcaaggtcagtggagactagaagaactggctgaccagtagactcatgagcaaaagtagacttgtggatttcagccacaaagtgctggggtaacttgttacacagcaggagctaactgctacggcttgtcaacaaccacaaactgtgagggaaagaaagcctaggaggtgccgcacaggcagctctgggaggttgggggtggcaggttggaggtcaggaggctccacagggatgcctggggctgaggcaggaaggaaggtggaaaggaaggcatgggccttcggggacgtggtgacatgttgggagggcagtggagggagaggagtctgcaaggctgagctggggcaggacctcggagggccctgggtgactttgtcctgggggtactagggagctgtgaaggacttgagcaggatgagggtgtggtcatgctggggtttgggaattctcctctggtgtctgggctgatggaggggaagggaagggagtagggcagtgagaccagtcagaagcatttgggtgctcatcctgggagcctccccttcagggtaaatggagg

SEQ ID NO: 16820 - DNA, 867 bp, Artificial sequence
  DNA replication origin
gggttatggcttcattcgcaatatttaaacaacgtttctttctcaatgcttcaggaaataatcgtgcatctgacatcagtggcagcatggactggctgatatgtatcaagctcttatgtcagcccttcattcctttaacaagcacttattgagtatggcagacaattcctagcgctagggacagaaccccccccccatttcttctgaattactttatcgatccagggacaccccagtaagctaggtgctcctgctcccattttccagaagataaagctcacagatgttaggcaacttgcccaggaacacaaagtcattagcaacgaactggatctgatttcagcttggttagtctccactgcccctcactcagcagcctcaaggtccagcttggagtgccccacatgccttagagtctccaaagcccctgcctgcctggaataagtctcactcatttgttcaccaatttgttcaacatgccctctgcgtgccagacactgtgctggggaggggtggacagacggtgaagaagccacaattaaatccacaagatgatttcagagagtggtcgttgtcatgtggaaaatgcagcaggtgatagaagatgagtggggtgggggctttagtcagggtggtctgggaagattggtctcaggaagtgacccttcagtggagacctgagtgaccaggaggaagggtctgtgttgtgaaaagcgcctggggatgagcgaaaccaagtgcaaggtccggaggcggttatgagcctagcggagggaggtggtgcagtgggaggccagggtgtccggaacgagcaaggagaggtggaagagtgggagagagcaggcaaggatgtgggcccaggcgcca

SEQ ID NO: 16821 - DNA, 942 bp, Artificial sequence
  DNA replication origin
tcaccatcaagcccgggctaggcacggcgggcggctcggtggctgcaggatcctaggaatcgcttccactctgggcgtgaggggccagtctgaactccacctcctctcccttgccagccagagagtcgctggcaggagcggtctggccgcaccgcgggtgcccaaaggagcgggagccagaggtccgccgcagagctcgctccggaagtggcccggacagagagccgcctcggttgttgtttcggtttcctgggacttgaaggaccagttcgtgcggtccttgagatggtcttcaccaaccctttatgaggcggatgggaagtcgaggacgcaaggtttggacagagcccccccaccagcgcggtagcccgcccgcgggtccttgcagcagcaatggctccccagagttctcacattttccgcaggatactcagggcggcggcgcctgggctgctgagttccacctctgggcagtgagggcacctggccgacggagagagaggactcagctgacaccggcctagggagggtggtcccttgcagggacacagcttggttgcatgtgctctcaggtgcccccttctcatggaggtctcagttgccttcccgcagtctaggctgggctcagggctgcctgtgggttcctgtccttgtgcttcctgaagctgggggtggggaggatgaccagaggtggggatggagcgatgaccactttactggttaaagctcaggaagactatgaaacttggccattcagagttcctgaagccaggtccttccagactcaaacaggaaaagagatttaggtacaacaataacaacaacaacaacaacaaaagagattcaggaacaaacaaacaaacaactcagctgcaggctttgtgtttcagaatgtgaaagtgacttcttctggcccccacctattgtggcaacacctttcct

SEQ ID NO: 16822 - DNA, 997 bp, Artificial sequence
  DNA replication origin
tcagaggcagctgaggcctggggaactccaggacagaacacggacagggtcgaggagatactccctcccaaatctggggaacggcaacgttgaggagggtctccatctgcgccaccggcgccgaccggcagggcgtggaggttttgcgctgggaggcactggccaagcgcgagcacccccgcggcacgtggtgcggcagtccctggggcagaggagcgcggccgtagctcacccgggtcctcattctctttcttcgcagccgtgctgaaggccgagcaggcggcggtgttcaagttcccactggcgccgctgggctgttcagggctgagctctgcgttgctggcggcagggcccgggctgcccggcgccgcgggtgcgccacacctgccgctcgagttgcagctccgcgggaagctggaggcggcaggccctggggagccaggcaccaaagccaagaaggggcgtcggagccgcactgtgttcaccgagctgcagctgatgggcctggagaaacgcttcgagaagcagaagtacctttccacgccggacaggtagggcggtacaaggctggggccagcgggctgtgggagtgtggtcacttgccttgctgagggtgcgccctgctctttccagaatagatcttgctgagtccctgggcctgagccagttgcaggtgaagacgtggtaccagaatcggaggatgaagtggaagaaaatagtgagtgtgcctggtggcttcccacccctcagcttcctgggccatgccccggtgcatgcagagctgctctcctctttctccccactgagactctgcccaaccccccgattccctcggtgcctggtacgcaccggaatcctctcagttttttctgccccttgggtaagccaacatttcgtcctttcccgcggcaccttcaggcctcctggcagtcttatgctccccaggccgggccgctccccaggcggcatttggacaaatggccgccatttcccggga

SEQ ID NO: 16823 - DNA, 1346 bp, Artificial sequence
  DNA replication origin
gcgggagacagcgagctgaaccgcgggggcgccccgagcctcctccggcatcgaagcagccccgggaagctgctctgggagcgcaggttctgggaccgtctctcggagccctccaggcgggaggcggagggtgcaagctccaggcctcacagaaaccaggcctcgtgcccgcgggccgcccggggagggtgttcgctctttccttcactgcttcccttcggcctccagcccggggaccccgagtgagcatccccagtgcaggcgcactgccaggctacggactctcgtgggtggaagcgacctcaggccacgggcgcctgggcttcgccgcagagggatggccgggagtggccgcggctgcccaacccagggaagtcggacctctggggaggaggcctgcgctcccgagggctgggtgctgacgcgggcccaagccggcccggagtccccgggagctccagcgggcgaggaacgcggccttggccgcagtgcggacctgcttcggccttgccttggggccagaggcctgactgtgagcagctgcctggctgtcccttctggtttcaggtcggctgggcctctgcagggcttgaacggcctgcgcagaccttttcagcttctgccctttcttctaatttggcggggcctgctctgccctgatggtgctgtctccatcgcactccaccctcgtcttgtctttccctatctcgctttccaaccgtctgccggtcggcctccctcgcttctctcattggggtcggcctgcctcccatctcccaccttttccctacgggtcctctgccccacatttacctgcgccttgccctgccctttccgactccagccaggctaggactcgcacctcagtgacaggcctgtcggggaagggaggctcctacgctgtagccgggaccccagcccttcaagtcgccttccctgcacccccccacctcctagtcggtgctccctagcctggagacggcagggccagcgcgctccttctaagtccagctgggactcggccattcggctacctttcgtctccatctgctctgttgctactaattcgtttgaagcgggcacacaatcattttaggactgaagaaaatggaaacatctgcatggggaagcgtctgaaaatagaaaacgtgaacaataatttccaggttctcagggtactttggaatttccgggaagcacccaactccggcccagatgactcctggccaccgcatggctgttgtgccacgcacggaagagcaaatgtgcacgctccgtgcatgttctttttctaacgcagcaaggctgatttggttggagcaaacgccatcttcttaggaccagct

SEQ ID NO: 16824 - DNA, 1790 bp, Artificial sequence
  DNA replication origin
aacttcagcagctcgcccgccgcggcagcggcggctgcgggcgcggcgcccttgggcccgggtggctccgtgaggatctcctcaatcatgaagctgcgatagcggtgcggccggtggtccgcgcagccctcgggcgggccgaagcgcgcggcgcccggctcccccggccgctgcatcgcggcgcccactgctgcgcccgcggtttggcggcggcggcggcgacggcttggctccggcgcggggcccgcgcggggctctaggccggcccgcagctcggggcggcgcgcgggcgccggctcatgccccctcccccgccggccggccgggcggaggcgcagggcgcgggcggggcgcgcggggctcggccggtcgaacccgggactgcgccccctccccacgccgccgcgcctcttgcccggccagccccgcgtcaccgccccgccccgccccgccccgcgccgccgcccccaacccctaggctgagccggagggagggacccagaagggagggaggcggaagggaggccaaaaaggagggggccacgtgaaagaggccggccgaccgagaccgagggagactgagcggagcgcacgccctggaaggagagagccggagagttcgggaggcaagacccccagagacgagagtcggagggatcaaacgacacaggtgagagaaggggcagaggcagacggcgtgggccaaacaagattccagacagtgatgtgagggcaccagagacgccaccgagatgtgcgcagagagaccaaaagaggcgtgagagccagcgggctgtgacgtgacggagggcacagaggcaggcggggcagaggaagggggcggtaaagaaatgggaacagctagaaaaccggcggcttgatcggcttttaggtagccccggaaaggtcgggaggaggaggggcaaaggccgcgctcctcagctgggaaggaggtggtctcaagcagcctccagtcccgggctcaacaccgccaacccggcaagggtgaggcagcgttcagggatgcaaggggcagagcggtagcggcacctgtgcacccctcccacctctgcctcagtttaccatgtacggcctcatttctctccgggctgccctgagagaaaaatgttctccagccgagatttgcttgaattggaaattcaagtgatccatggacacatcctccttgacagcccccagaagactgtaggctggttacatccccctagttagaaaaggaaaaggattcgaggagaagggaaggatgcagctttgccttttcccagctttggggcatcaagaaactgttactgggcggagttggggccagggggccagtgggtgctctgagagtgtaaagaccaaactctggtgggacctggctccattgcggagcctcaaaagctccaacatggtggaggaagttggcagtaccttctctagatctttctttccatccttagaagagtataagcccaagccgtggagtgaacaaccccaaagctaccctacgctgaactcctctctttggtcctgccactactggtgaaaccactgaccctttctgggcctgtttccttacctgtcctgaggagatgctgacctttggctccagagagactgtgagaactcagtgagggggtcctgcactccgagggtcctgcaccctgggagcccttaggtctgtttggagagaaaacagttcctccaggcaagaggggagaagtgtccccaggaggttgggggaggagcatctgccctcctccttctcaggaatcacagggcctacc

SEQ ID NO: 16825 - DNA, 1870 bp, Artificial sequence
  DNA replication origin
ggattcggttgtgggaatgaggtggtcccctccctgtcccgcagcctccaaaggggctgtagggtctgaggggcagaacatgggtggggagggggccggttctgcgctccgagggcccctcatccagcgaccgggcggcgccgaggaacccctgccgcccggagcccctcgccgcccggctgctagggagggcggctggcccggggcgctgaggtcaccttttccactgcgcccgccgcgagcaggacggtttccgggattttcgcggcggcggctagaggcctcgggagggggtgtgtcccaggcgttgggctggcagctgcgcccctggggtggggactgcaatcccagactgcaccccactggggaggaggcttcccctctctgggcctcggtgtcctcgacagggagggggttccccttctctgggaccctcttttttcggccgccaacgcggcagtgcctgagcagaggaggccccgccgccgccgccgtttttgtgtaattttcgcctaaaaggggtttatctgctggtttgccctggggtcgggcgacggggaggctgtgtctatcaagagccgggggatcagggacagacctacaagggaggtgttttgggcgaccgggggcaggaccctggctctctcagcccctggagccagctgcggtctcccaaagttccctaggcgctgggcattctccttccagccctcagggcctcattcccaaagccaccctctgctcatgctgcagggctggcctggggctgcaggaaatggtcctggccagagtccaaggagctgggggtgcacacctgtggaatggggtgagggctgggctgcactactcttttgactccccaaaatctagagatgaggcctccatcctgaaaatgacccccttccccacaagctgaccaagaagctaccccagggggatggctcatagtaaaataagtttagtgacagctgatgaacagtgtgatccccaaatccttggatctggaatctggggacccattttgaggatgtgagaccctcaggtcttgagcatggggcagagatggttcaaatttgggtagcttctgttagggcccaaataacaggggatgggacagaggctagctgggcctactcaggggagaaaccaccactaggctatgcccttagggagatgcagaagccagggggtgaggaaggggcaggggccctgctaagatgggggaggtgagggaggaagccggaaaaaggagcttgatatggctctgtacaagaagcaatagtaaaccagccctactcactggagtccctgcaccagggctgcctcttgctgggcctcagtttcccatctgaaaaaggagatggttggattgagtgatactattgcactcatctagggagggttctctgagtctacccgttgatagggggagcctgactgggctgccccagcctcccaggagacactggcttgtttctatttgccaggtaggatgtcagtggctgcttggccaacagcgacagggccagcttcctggtctcttggtctctcaggaggaggcctgctcagtgtgggatactgttgctcttagtgcgcccctctccaccctttccaaagaaccatgtaggctcacagcaccactctccgagggagtccgaagcaactggcggccattgaggccaccttctttcagtcccaatggtaactctgagttcagaaagtcatgcaacaactgggaaggagagacagtgggctcttgggactgggatcttaccagagtaaggtagtctttgtcctcactccaggccctacagacaaaggatctgggccacttcctagtccccacctgccccccacccccactcccgag

SEQ ID NO: 16826 - DNA, 1383 bp, Artificial sequence
  DNA replication origin
ggtgctctcccggcagcgacgggcgcgagggccggggcattcccacggccgcgacggccctctccgcgagcgcgaggtgggtatggcggacgcggcagcgagcgcgggtccgtcgccattttatttcgcggagactcgcggcagcgggtgggcagaatgggagagccgtgcgccggcccgcgcctgtccggctaacgcgggctgggactggtggggcggcctgccccctccagcgggcgggtggccccggggggccggcgggctgctagcggaagtcgcgggcgctcggggcacgggggaggggtgccgcgtggccgccgcggggccggctccaaccccctccgcttcccgcccagctcctcaccgacagggcgggggagggggggtcattcttcacattccttaccccgcccttccccccgcttcaatcaaacttggggcgggcggaaggcccgccttccggccggcgcctgttggccggcgccgcctctgactgtggcgtgactggttgtaggcgccgccaggtgcctctgacgtcacttccgctatcaagtttgtgggccggggagaccttggccttgggggttgggatgaaggagggaaggtaggaagtgcgaggggcggggggacagggcgggaaggcgcgggcggggagggcgggagagtcgtggctggctgcatgcccctgctccccgcggccaagtgcagcctcccttcctgaagcagctgctgcggctggaggtccgctgcggcagccgtccttggcgagggggaggggaacgcgggagcgggaggaaatcgtatcccgggggacggggcttggagatttgcgactcggtgtcaccggaaacagcgctggccttttgagtcgacgctgcaaactcttggaaccgagtgcctctcagaaggcttgctaataaacttcccgggcgggctctagtgtgaggaatgtggtaacctgtatgtccttggccagtaatgcccttcggtctttcaactttttacagtagattctgtgtcagaggtaatggtatgtattcttcaacttaccggtttttaaaaaattgactaacgagagggcgggcagacaggaaaaaggcagggaagacagtgaatgttaaaattttgaggtaaatcaggagactggttgagttttgctttttaacttcattgataatactgctttcttggcatacagttcctaaagttaaagcatcatgtggcattcctttgcatttatttctgttggcctgaagtataagaacattgaatgtcaaattccaaatttatgtgtagtttaggaaataattgtttatatccagaattcttttggtgtttggcggggtctggttttatttactgtatattcgggaagtatgtgta

SEQ ID NO: 16827 - DNA, 1175 bp, Artificial sequence
  DNA replication origin
actctgaagagcctggaatggcctaactccgccttagcatgctttatataccgaggttcctggactacatgttctgatgggatgagaagtcttaggataaccaatcacaacatgataataaagtccaatcagaataggcttagaggttttctctcatccaatcagaacatgggtggccacgagggagacggaagtgtggccaaagtggtaagatggcagcaaggcagccagacatgctccatgccctgctacaggaagagaaaagggagcccgcctgccacaggctggaggctggagcctgcgacactatggctcacctcgctgaggttggtggcagccacggagactgcgtcataccagccggagtggtagaaaggcgacaacagggtaagtgcatatcagcggctgcactgcctggcgatggggagcgggttgggggtgctatttgggtgtcactgcctgcagcggggagcgggttggggccctatccagggctgcgctgcccacagtggggggcgggttggggcactatcctgggcatcacttccgccacagggggcaggttgggggcgctacagggtgctgcagtgtccaaggtggggaggggttacgggcgctatgggggatacactgctggcaagtggggggtgtgtttggggcactactgggggatacactgccggcgtcaggttaggggcgctttcaggctgcactgtagatagcagaggtggctgccacagtggtggtctccaaggaaggagctggactccagactcctgatcactgcaggacccccacacccactgtggttcctggatctgcgtcctctcactctgtgtggcggacagacaacctgggacccccaggcatggagtagcaggtaccacgggtggaggccctgtgggtggaggcgtcaggaacagaaaccggcacctgggtggtggggggaggtgtctgggtctgagtttctgctattcctgctccctgaggagtgcagccccggtgcccagcagttcctgtggaatggatagccagccactgtggagtctccagtccccaccccaggccccagttcctggcccgttgggccagaggagaagctggactttggagggtgtgagtgccttcactgaaaccagcccctcccacccagtggccagcctgacaaggtgagg

SEQ ID NO: 16828 - DNA, 2483 bp, Artificial sequence
  DNA replication origin
catgccggttcctagactgcatgttctgattggatgagagcaagtcttaagacaaccaatcacagcatgaaaataaagtccaatcagagtaggcctagaggtttttctctcatccaatcagaacatgtagtccagggtctcctaacctcagtatataaagcatgctgaggcagcggcgcgtcatttctggcacttatgtgtgggtgtggggagctactacgtacccggcttaaagaactggaaggctccgtcacttttcgccccctggagcctggagcttggagcctggagcctggggcactccctccctgttggtggtggtggtgacggagcggtaggagggaggctagcagcgagagcttctcctgccgggctggaagacagaaagaagaggcaccgccgcgtgctggaggctggagccggagcttgcgcctccgcggctcgcctcgctgcggttggtggtgaaatcagagaccgcagctcggccacagtggtagaaatgtggtagggtaggtgagttatccagggctgcactgccctcttctgggggtaagggttgggtgtactataggggctcactgccaaaggctacactgcctgtggcattggactgtttgggggcactctctggggttgcattgctggtggtggaatggggggctacactgcccgaggtggcaggggtggtcgggagaggcaggttgtgtacactaacgtgtactgccagtggcggtggatggcttaggggcgttgtcttctgctgcactgtccgtggcaggggcgggttgggtggagttatctggggctacaatgctggcagtggggggtggtttaagggcgtggtccggtgctgcactgcctgtgactgggggtgcgctatcaggagctgcactgcccatggcggggtgagggtggggcgggtttggggcgctgtctagtgcagcaatacccgtggctgcgtcaggtgggcactatcgggtgctaacactgcctgcggccgaggagttgggatggtttgggggggtattggttacattgcctgcagctgttgggtgtgctatcccagggttacagggggcaggttaggggtgctatcgggggctatactgccagtggggttggtgggctgcagaggcagcagcggcagcgacagctgtggcctccttcctctttctggtggcctccatggaaggatggagttcttctcttcccggactccagactctagagggtgatctcttcgtgctcatgcaatcttgagcaccgcagggctctcacacccactgtggttccctggcccgcgccctcacgcacgctctgtgttgtggagaccatctgggactaccgggcagggaatagagggcaccacgggggagggagggggacagggcactgtgggtggaggcgtgaggaatgggaaccagcacttgggtggagagggctggctgggtctgagtttctcctacgcgggctccccgaagagcgcagtgccgatgggcccagcaattcctggccagctggacttggccaggagccggtttcagtgaaggcactcacacccagcccaggccccagttcctggccagcttttgccagaaagagaggctggactttggaaggtgggtgtgagtgcctttaatgaaatggtccctgccgcccagtggccagcgtgacaaggtgaagctctaacacttccactccctgcatcctgttctaggtttctctggctttgcctgcgcaactgctcccagccaggctggaggaggaggaggagtcacctgtggtatgctggagcctgtagatggcgtggctctgcagcttgcctcatgaggttggtggcagcaacagagactgcagcttgaccagagtggtaggagggcacccgtgggggccaagtgataggagccttgtagggtgggctggtgcattgagggcaacagcggttgtactggcatcggcgctagcgttggtagcagcggcaagtctgggggctgggaaggggagtaggagcgctcacttgcccatcctgtcctggggtggggacgaaccttaaggtgctataatgcgggcctcagtggcagtggtggaggtgcatgtagggtaaggaggagtcttcctccttgtcctgcaatctctggagggtgccctcctcctgctggcgcctgagccaggcatgagtggcagcattgtctaattcttaacaaaattcagggggtgactttttgtgtatcttttcgcttgttttttgttgtgatactcttggacttaactcaaatttcatgaatcgaggaaaggataaaaggtataataggccttctaattcacgcacctgttctttttcctttcttccagtctgtattttcttcttcttgttcctcttcattttcttttgctgctgctgcttctatttgatgtttctattcttgtttctcctctttttgttttctttatgccaagcaatgaccttaaacaacaagcccaaa

SEQ ID NO: 16829 - DNA, 2395 bp, Artificial sequence
  DNA replication origin
tgccccaggctccaggctccaagctccaggctccagggggcgaaaagtgacggagccttccagttctttaagccgggtacgtagtagctccccacacccacacataagtgccagaaatgacgcgccgctgcctcagcatgctttatatactgaggttaggagaccctggactacatgttctgattggatgagagaaaaacctctaggcctactctgattggactttattttcatgctgtgattggttgtcttaagacttgctctcatccaatcagaacatgcagtctaggaaccggcatgcgcataacctcaggatataaataatgctgaagcagagttacgttttttttgttgttgttttttttgtttttgtttttttaggtttccgtgtgtttctattgagctgctcagtgcccggcttagaagaccaggaaaaggagtcacaggtcgtatgctggaggcttgagccgcggcaccgtggcgcggctcgcctcgctgcggttggtggtggcggtggacattgcagcgcggctggaggggtaggaagaagaagatagttttgggatagatagaggtgggtaaagagtgtggttagtgccaaagggaaaaaaggatagcgaggaggagaaggcgttgcaaaaagacgatggggaaaagatggtggggaaaaaagtttttgggtagatggaggtggaaaaacagggtgcagagagggagggaaggaaggttttgcagaaagacggtgggtagaaagtttatgggtggatgaagggggaaaagaaggtggcaattgggaagaggaaagagtggtgagggggggaaaatgggcgagcagtagggagagaaggttttgtgaaaagatggtggggagagaagtttttgggtagaggagcaaaagaagatagcaagtgggagaaggaaaaagagggtaaccagcgggaggaagacaaggttttgcgaaaaaacagtggcagaaaagaaagatggtggagaaaagatggtaggtaaaaagtgtttgggtagatggaggagggaaagagggtgacaaggaggaggagaaaagagggtggcgagagggagcagggaaagaagtttggggaaaagacgggaaaatagtttggggtagatggaaggcaaaaaggagggtggcaagcagtataggggagagaagagaacgagtgggaagcaggggcagactttgtgaaaagatggggaaattttggggggtagatggggaaaagagggaggtgagcaggagtggggaaaaggctttgagaaaagatggtggggaaatgtttttgggtagatggagaagggaaggagagtggcaaggaggagccgggggaaagacgatgaggaaaacagtttttgggtagataaagggggaaaagagggtggtgagcagcagtagggaaaaggctttgggaaaagacgggggaaaatgtttttgcttatatgaaggagcaaaagggcgtgatgacagcgggagggggaaaaagagggtggccagggagaagggggaaaatacggtgggaaaaaaaatacggtgggagaaagtgtttgggtagatggatggggaaaagcgtggtgagcgggagagtagagaaggctttgcgaaatgacggtagggagaaaacggtgaaaaagtttggggtagatggaggaagagaaagggtggtgagagggagagggccaaatgcggtcaggaaaagaaggtggggaaatggtgggggacaaaggttttgggtagatttttaaaaataagattatttgtattttcacttttgagtagtttgaattctttagatgttttgtgtattaacctcttgcctgatgcatagtttgcaaatactttcttccattctctgggttctgtcttcattatactgattgcttcctctgctttggaaaaggctttaagtttaacgtaattacatctttgcttttgttgcttgtgctgttgatgtctatttgaaaattccttgtcctaaccaatttcatgaagcattttatcctatgttttcttctctggtagtttcatagtttcaggtcctgcatttaaatctttattttgagtagatttttgtatatggtaaggtaatggcctagatgtattcttgtacatgtgggtgttgggttttcctggtacagtttattgaagagattgtccttcccgaatgtgtgttcttggggcctttgttaaaaatgagttgaccgtaaacgcgtgaatttatttctgatttctctattctgtttcacttgtctatgtctgtctgtctcattcgttcatctctctgtctctcccctgccccttttattgatagtaccatactgttttgatagtaccatgcttaccatagatttgtagtatattttgaaatcaggtagtgtgatg

SEQ ID NO: 16830 - DNA, 1269 bp, Artificial sequence
  DNA replication origin
gcattcagattccatatcgaaccaaggcctgtgtttgtggtcccctgaaactcagatgcagtcagcctagttttgttgctgctgttgcttgcttgcttttgtcttgaccaggaggcacagtctttggggtgaggctgctaggagtgttttccaagacagctgactgctcacgtcatggttcctcagacaccaaatgatgtgctgtgggtgggggttggtgttggggggtgaggtgggggtgctgttcagggaagagggtgggaaatgagtttgcccccagcttaaggtagatcagtggttctcaaccctggctacctgttagaaccacctgagatttccttcaacaaataaatagcattcacatcagtaggcaaaggaaattcctttcttgccatcctttcctcataactcagtgagcagacatggagcatgggctgtgtgtctgggcactgcagaaacagacagaaggatggatcctgccctctgcaagcaggtcatgcagcaggaagccagtccgtgagtgtggtgaacactgaggagggatgatggggtgtttctggtgtgtggggcccacttgagaggaccagggaggcgtcccagagaggaaaaggaggaatagcaggaagaaagccgggcagagagcactgctgtggtgggaacaccattagtgaaggcgagaaggaccagagccgcttgctgggtgctggcccagggacatctgcggctgttggaacgtgagagggtggcggggtggctgagccttgctgtagtggtgcagggtggacacatgaaggatacggcttccctcagaatggaaaaaaaaatcctgccattgtggaagctcacagacaataaacaggacctagatggtggtcagggcagaggagaaaatgcatcgagtaagatgttggggaccagggaatgctgctccaaacagacggccagagaaggcactactgagagatgatccttgagccaaagcttgactggggtggccgtcacatggctcttgaggaagagtgtcccaggtggggcagcaaggccactgggcagtcagtcacaaggcaggtgtgtgccttggaggtttcagaggctggggctgaccctgtgaggatgagagagacgggcagccatgccaacccgggcgcagagattccacggtggtgcctgacacccacttgcggggacttggattttgcctctgggtaagactgggggcactttaggaggacccctcctgctggtgtgttgagaaccccctgaaggggc

SEQ ID NO: 16831 - DNA, 1054 bp, Artificial sequence
  DNA replication origin
gaatttccaagatgtgagtctcgcccggaagtttcccggaaaacggtcgctgacacagagtcctcggctaccacacaaaggccagagggctccaccgcccgcatcctgaccccctggtagccacaatgctgcaattgatgtgctgattcacgaaacaacacctattgagcacctgctgtgctgaacactgtcctaccttccaggggtggagcctgatccaaacagacaaaactcctgcccttttcgagtgtacgttttcacagagaaacagtaaaaataaatatataaacaatagattagtttgttacataagccataagtaccatagagagaaacgaaatagaaaaggaagacacggaatgtggaggggagaagagggtgagcagaggcctcagtaaaagcttctctgagaaagggatatgtgagcaaagaggtgaaggatgcaacgcgccggtggagatgggaaggagagcggtttcctcaccgggagagccagtgcacaggccctggggtaggagaccatgtttcaggttcagggaatggccaggagaccggtggagctgaaatagagctagcaagggtcagaggtggaggagataaggccagcgggaggatgcagaggtgaggtctagagggccaagtgaggtttgactttgactaggaggaacccactggagagtttggagaagaagagaggcatggtctaccctgtgtcttcatactgcggctactgtgtgaagatcagactgaagacagtgccctccaggttactaggagatagtgagccaggtgttagcagtggaggtggtggattctggacatattttgaaggtagagctgatgggattcgttgacagatgagatatgtgagagacaggagtctcggatgattctaaggtttgaggcctgagaaactagaagaatgcagttgtcctcgactgcgatggggaacaccgagaggggcgtgtgctggaggcaggactgacaattaggagctaagtgtgggacctgctaagtttgaaatgccttctagacatccaaggcaatgtcaaat

SEQ ID NO: 16832 - DNA, 985 bp, Artificial sequence
  DNA replication origin
caccatgcaaaggccctgcacagggagggcgccatgtggctggagcagaaacagggaagcaggggcagctggtgggacatggaagatgacactggagaggctggggggccagatggtgcagggtctgtaggccagggttaatattttagcccttattcaaaacacacacaaccaaagtcatgtgtgtgtgtgtgttctcagctatttcaaaatgttgctttggctgcagcaaagagaatgggctggagagtgcaggatagatatgaaagagccacgaggaggcctctgctatagtctgggaggaggatgactgacagcttgggccggaatggtgccagaggagaagggagaactggacctgttcaaagacatcaggaaaacacaaattatggggggtggggtgggctgaatatggagcggggggcggggaatgaaggagaaacttgggggtgggctggatatggagggtgaggggggctgtcaaagaaaaatcctagacttctggctgattggtaacgtcatcacccaagaaataaaatattggacaaagatctggcttggtgtggaaggtcaggaaagaccatgaattcagtcttgtgtgtgacatgacttttgagacatcgagatacagaaatcaagaagcagctggatatggggatttggagctccaaggggagagctgagctggtgatgtgagtttcacagccattagaaaacaaatggtaattaaagccatgggctggccccggaagactgcccagccagagagtccatgaagaaccccagagagctaaaggcagagcaggagagtgtgggacaaaaagcaaaggagtgtggcaagaaaaagggagtagcccacagtgtctgatgccctgagaagtcaggaggggaactgggaagtgtctgttgcatttagcaacatggaagtcatcagtgaccctggcaagcatcctttcaatgggccacagaggtcaaagctgcctgg

SEQ ID NO: 16833 - DNA, 1031 bp, Artificial sequence
  DNA replication origin
gcccaggccccgcgcccgccgcccgcgccgcgcctgaggtgatgcggaccccgggcgggcgcagggcgcgggctccggcgccgccgctgcgtcctccccggccgcgggcgaggtacggggcgggcacgccgagttagcgggcgcggggcagggaggccggggccgctcccgcggtaaacttgactgtgtcctcttcccccgcagccgctgcagagggagcgtcgcgccggggcggagtgcgggcttgcgcggcaagtgcgcgccgaggtgagtgcgggcggcgcggtccctgcgccccggtggcgccggcgcgagaccgcggctggcgagaggccctggctctgcgctgcggcgcgcgggtgcggggactacccgccaggctccggctcgggcgcggggagcggccgtgacgaaggtcgcggcccctgcggtgaggcgcccggcgagttccgcgggcgggcgcgggtggcctcccgaggtgcggggaagaccaggtcgcgaggccgggggtctctgctttctcgcgctgggggatggccgtcaggaccctgtcgccttctttgaaatgctgtggtttttgaacctcaggtcacgaaatggattggagtgaaccggagaccccgaaaacggaagcgcagggagaaggaagaggtgtttgaaaaggtaggggttcccgagacggtactcggtgcaggtcttggtaaatccgcttctgccccgtgaggacctggtcatgacaatagagtagtgtttaatttaaaaagtttttgttataataaaccatagatttaatatatggggaaattctacagaaatattggtcgataaggctaatgatcatttatatagtctcattaggagagagtagcccatgaaatttgtttcatgctcattaaatacagcaatcggacttaagtgggttccattattattttagatcagcagtgtttattatctcagtgttaaggtacctctgaaaaatgaaaagtgttccgaataaatcgcccacagtattaggtttccatgctgta

SEQ ID NO: 16834 - DNA, 1110 bp, Artificial sequence
  DNA replication origin
agactgtgggtaacatgtgttcctgtctacaaggccattgcaaagtcaactgagataacacgtgcgaagttctctgggagaaaagcaccatctgcatttgcataaagcagagctgccgaggttaagctgtcaacagcttcctagggaaaatgtccctgaaacagataagacatttacctgtaatggttttctttgcctgtgaaattaatggtacaaggcttaaaaaaagtattatcttttaatttgtcttttaaagttgattctattttaacatattttcatcatttagttgctaagaatcactgctaatgggcacaaatggaaacttagatcctgctacaagaaggttacattaattcaaaactggctccgctggatgcaggtgggggtgggagtgaggggggattaaaagtaaagacatcccagacctgcaaggagctcagaaatgggagcatcatgcgcagcagcactccgataattctgttgtatggcagaatagcgtaacagcccacgtgaaaatgaatgagagtaaaacccatgaagcaaattctgcatctggaagggtaagattggtgaagggttcttgaaaaacgtgaccccttgaatagtgatttgagtagagggcattccaggcagagggctgagaaggctgcagaaaggtttgttgaagggctgaggagtggactgggactggaaatgagcatagtgacctgcacacatagggcatacatgtcactgtttcagtccccagccagagagaagtgcagggtgggagtcagggaacccacctggtggtaaggcagggctggtgtgcccctagggcctgcactagagaggcgctggcagtgggggaagggggagagtggagagcttacttggcacctgtagtttacatttgagggttacatttggtaggatcatgggttgcgtcagtccctctcggcacacatctcaggctgtgcagagttggtgttgaaggaacgtggggaagagggtggcccattttatattcatgctcagaaacaggggtctttagccagaaagggcgcgccaaggacggtgctgtttcctgacaccctggagagttgggcgtcacagcgcttgtgccca

SEQ ID NO: 16835 - DNA, 974 bp, Artificial sequence
  DNA replication origin
atatccatgaaaaattatagagaagctataacacgaaaaatgcttcagatttgataaagtttttttaaagatacaaaattagacatcccctattaatatcatataaaacactgaagaaaaacggagcagacacagaaataatgatgattgttagagaaaaaaaatctcacagctatcctaacaaaaccttgtgtactaccgctaggttgctttaatagtgtagaaacccatactgagcaactaactgctaggaagtaaatctaacaggttaattccaggcacaattaacagaggaagtgatttaaataatctaggactccaatagaagccaggggagaaattccgctccaacacaacaaagcaaaaagtaggacctgccctcaagacacagggtcatggaggccatatgccacgtgtgctgtgtgcgccgcgggtgctgtgtggtgcgtgcactgtgtgtgccacatgtgctctgtgtggtgcgtgcggtgtgtgctgtgtgtgccgcaggtgctctgtgtggtgcacgcgctgtgtgtggtgtgtgtgctgcatgcagtgtgcgcgctacgtgtggtgcatgtgctgtgtgtgctctgtgttgtgcatgcgctgtgtgtggtgtgtgtgccgcgtgtactctgcgtggtgtgtgtgctgtgggtgctccaggtgctctgtgtggtgtgtgtgctgcgtgtgccgcgtgtgctctgtgtggtgcgtgcgctgtttggtgtgtatgctgcatgtgccgtgtgtgctctgcgtggtgcgtgcgctgtgtgtgctgtgtgtgccgcgtgtgctctgtgtggtgcgtgcgctgtgtggtgtgtgctgtgcgtgctctgtgtggtgcgtcctctggtgtgtgtgtgctgcatgcagtgtgtgtgctacgtgtggtgcatgtgctgtgtgtgctgcgtgtgcctggagagcctcctgccagccgatgaccaggcgtggac

SEQ ID NO: 16836 - DNA, 1228 bp, Artificial sequence
  DNA replication origin
cgggggctccggctgtagcccaggcacgtgccagtgtgtccctgggcgtctgtattgctatcacttggtttttactcagaaatgacaggcacatagtgctgatggccttcggtagatgcagcctgtccttcatcaaggaaacaatgtgagcctgctgtggacccctttcagttaatataccacccagaccctgagcgggaggactgtcccccgctcaggggctggccatgcccatgctgatgggcttggccatgtctgaagaaaggccgagttgtcattacaaatccaaccttgcatcttccttacacaccaacactcctgggtgggccccttcccagctctctagtcacatgcaaaaattcgcagccctgcagccgcctggaaaacctgcctccctgctggccttggctggtgcaccaagagtgggttcaattcattttgagttcaacgactacagaattgaactctgcatctcggaatctagctaacttttgctgttgttgctgtggcccagcagcaggaggcaggagaaggagaagtgtgaatccaggacaggacaggaggtggagccccaggggtggactccatgcagtcctctgctctgtgccggcctcctgcaggcacaagtgagggagcaagtggacggctggggcaaggcagaggagtgcctggcgagaggccaggagccagagaggcaggagaaccgcagggacgttgggcagggcctcatggatggcgttctggggaaaatcggagggccgaggtcagagaagaggattccgggacagccggggagtgggcctccaggtgcctggagaagagcccactgcgcagagctcactgcagaggccacacaggaggcaggctgtgggcagatggggctgcaggaccagtgcgtcctttaggtcagatggagccactcgctcaagccatctccaagagggtgcaagggctctgaagagagatagtggcctttgccttgagctggcactgctctccaaatctggatgccaagatagagggcagagcctgggaccagctgggaggtggctgcgctcgtgctaggtcctgagggtggagagacccaagctgtaggagggaaaggccgtcccaccaaagcaaccatctggccaccacctgctcgtgggccaagcagacccggctctttccaaggtgctgtcggcagaggaactgacaaaggccaggagaggcaggggtggtgggaggg

SEQ ID NO: 16837 - DNA, 733 bp, Artificial sequence
  DNA replication origin
cgggagcgcgcggggccgctagccaggccccagaatgcactgctgacacgtgtgcgcgcgcgcggctccactgccgggcgaccgcgggaaaattccaaaaaaactcaaaaagccaatacgaggcaaagccaaattttcaagccacagatcccgggcggtggcttcctttccgccactgcccaaactgctgaagcagctcccgcgaggaccacccggtaagcggcaggccgcagaacgcagcgagggcggaggcttccctcgggggtctggccgacacgtcagcggcgagagcgggaggaggaggcgaggggcaagagggaaggctcgcgagagcgggtgggccaggcgcgccttgcggtgggcgagaggggttcccgccggcgcagggctgtggctaaggctgaggcgggaggcgggaggcgggaggcggaaggtggcgggcggtgccagcccgcggggcggggccagggcggggaaagcgggggcgggagccggcgctggggtcgcgcggaagggagcccccggagaggcgggagccgggtgttggcgttttggttctttttgttcattgagcgcaggcagctatgtcttcttcaaaggagaggagcaaaggtgaatttctctgcctcggactcgtgggagccgtgaaaagctcgcccctttgagccggtcgccctctacagctggcctcgtcctccccgtccctcacacccctgcccccaaaccccattcg

SEQ ID NO: 16838 - DNA, 1901 bp, Artificial sequence
  DNA replication origin
caaggagtgccgcggaagcgcccgaaggacaggctcgctcggcgcgccggctctcgctcttccgcgaactggatgtgggcagcggcggccgcagagacctcgggacccccgcgcaatgtggcaatggaaggcgcagggtctgactccccggcagcggccgcggccgcagcggcagcagcgcccgccgtgtgagcagcagcagcggctggtctgtcaaccggagcccgagcccgagcagcctgcggccagcagcgtcctcgcaagccgagcgcccaggcgcgccaggagcccgcagcagcggcagcagcgcgccgggccgcccgggaagcctccgtccccgcggcggcggcggcggcggcggcaacatggcctcggctggtaacgccgccgagccccaggaccgcggcggcggcggcagcggctgtatcggtgccccgggacggccggctggaggcgggaggcgcagacggacgggggggctgcgccgtgctgccgcgccggaccgggactatctgcaccggcccagctactgcgacgccgccttcgctctggagcagatttccaaggtgcatttcagactctctcctcccactttctcttccctcctctaactctttgggatcgcccccgccacacacaaacacacacactctcttcctctctctctcacacacacacacacactcactcacacctctccaggaaaagcagcagacaaatggggattgaaaaattcaaaccctccctctggtcctgggaggaaagggctgtctgaggtccgcagggggtggaggtgtgtgtgtgtgcgtgtgtgtgtgtgtatacacacgccctccctggtgtgccttttccggagcactggaaagccgtccacggcggaccacctcaagggcggccgcggcactgtcctgccccgtgccccctgccctgaacttcttcctcctgcgcccctgcccctatttgcagcctaaactcctgtacggctgccacatttcttaacatcttggagggggaggcggagtggagagaggcggagagaggaaggggggagggagccgaaataaaggtggtttccttttttggcagccagttttggttttgttgagcatgaaatctctgctcccttaaaaaattattctcggaaaaagatatcccccccgttttccaggttttgagccgcctctccttagggcctggtcgggggaggaaaagttgtaaacaaattgccaccttaaattcgcggtgcgagtctgcggagctgccgggttcattgtgtttacgaggctcgctgaaatgtgtggaatccagggaaggcgagcacccagacgggggcccgccggggccgcggccagcgccggggaaatgccgcgccggggagcagcctgcgccggcctgagcccttccctttgcactcggctgttttttacgtttaaccagaaaggaagggagaggagggaaagatccatgtggctgccctcttccgatcacaaatattgtcgtaagttgcagctggctgccccacttcctaattcagctcacacagcctctccccacgctatggaaatgcgtcgggagtgaactccggcggccgcgctcaccacgtggatccccacttactaccattctcggcgggggtccagttgggggaacccgcaatatgttgttccaaagagcgctcgcccctagcgcccgtccccgagggtgatggacagagcaggactggtttgctggctcctgaaccttgggctccatcgctgggattacgcagcccctcccttctcagctctggggtgaatattgtctgtgtcgagtggtttctctcctctctacctcggcttcctcttctgtattgcagccccagtgccccaagtcgctcagggatcccgcgggtgggggcgccc

SEQ ID NO: 16839 - DNA, 816 bp, Artificial sequence
  DNA replication origin
ttcactgcagaaagagccagcgaatccccgctgctcccgccggccgcgctggctctctcggcgcctcccgggtcgcccgagcggccgcggagggcaagcgcagagccgccgccgccgcggggtccgagggtgcccggcgggtctcagcgctgccgggcccgggcagccgcagctgccgctgctcccgcggtggctgctgctggcggtggcggctccaggagctgctgctcgggctgctcgggctctggctgctgggttcgcggtggctgctcggtcccggactctgctttcttgtgctcctcggcaacccgctggaccattctgtccccgtgcagcgcgcctctctcgctcccgggacctggggactccgctctgtgtgtgtgcagcgggcagcggccgcagcagctccttgattcaatagatgagatggaagaagaaaaaaaagaactctctccatttggagaaagaagaggaggaggggaggggagggggtggagggggagagagcgagcgaaagagaaaaaggctggagctcccgcccccggggctgtcagatggcttgggtttctgcgacgcgattggctcgcggagggcagaaattactcagcaaacatgactattattagctgcttagcaacagctcaccaaagtagagagaccacccaggtaggcaacccagtgtgtgcatcctcggcttcggggcagcctctgagagcgccaaccttctcgcatgcaatacttccattaaggaatgctccccctcctttctctcttattccttttcttttcaacagtgtcttctttttgtgggatgcc

SEQ ID NO: 16840 - DNA, 966 bp, Artificial sequence
  DNA replication origin
cgcggggacacggggacgcgggacgccccgcgcggcggacggaggagcgagccccgagcgccgggcaggaggggcgggccgcgcgccggggccgtggagccgggtgggctgcgccgcctgggcgcgggagcgcgggtcccgcgcctccacgctcgctcgcacgcccgggcccccgcccccgaggccagccccgcgtggcggggagggggctggccgcggcgggccccggctgaggaacggctccggggggaattctcacggagggggtcgccggagctcccattttcacgcctgaaagggtcgccaccttggcttccgctcatcagcctggtggtggctactgactcgccagcggaggcagagctggtgatggaagggctggtgcggagagtgacagcgccgaggggagggggctcagagcgcgcgcgcggaagccgctgccgccagctcgcgggagcagccgcagccgcagggaagggcacgctcgcgccccgcagacccgctctcgagcccgcacgcacgcctaggggtgcgggacacccgggctagaagagacgcaccttacccacctcccctcccatgctgcgggaaaagggccagagaggcttttggagttctggaaggggcggtgggtaagagaggtggtgtgtgtgactcttatgcccaccgattcaggcgcttgggtggctgccacccttacagagatgggcgaccagcccagtgcttagagtgcagagtgcggcctcaggggagcccgggggcgggccggaccgattctcactttacaggcccgggcccagcgctgaaccccaagacccccagaaactgtgcctctgggtgacatgcgctgtgtctccacgtatttagtacgttcatgtttaaaatgatgctagcgtgtggatgagcacactctcagggaaactgatctgtttccatcacctaagaagaaccatatgggtgggcggc

SEQ ID NO: 16841 - DNA, 1162 bp, Artificial sequence
  DNA replication origin
aaaccgagggccagcagggccggaacagcgcatctccgcggacggctccccataggcccggccagcgcggagccaggagggtggcgtccaggggcagtggacgcgcacgacaggaggaagcctgggctctcctctctgacctcacgcctgccctccccgcagatgggaatgtccttgtcccgcatgagcggcggagccggaggggaccccggcctctgactcctgcccgcagccccctttcagctgccagggtttctctgccttagctgcacatgagaaccccctggggcctttgaaaaactacgaatgccctggcaccaacccaaccccgttacatcagcatctctgagggaggggcctgagtgcgaacgtacattgtgtaaagttcccaggtgacctagcgcgcagccagcactgcagactccggggccgccccagccgccgccccgccgcggccccccaccccacgggctgccctctggttcggtgcctctgcctgattctgaagggctgcatcctcccttctcctcaccacctatcgcgagcggtgactgtctctggaggtgtcatttggggggctgtagtgggttgagtggtggctctccagaagacacgtccatgtccgggaacctaatttgtaaagagggtttttgaggattaaatcaagtaaaggtttttgagaggagatcatcctggagttaggctgagccctagatccaatgacaagtgtctttataagaggcacggggggtcggggggacaaagtaggagaaggccatgtggagaggcaggcagagattggagtcacaaaccaagcaatgcccagagctacccacagctgggagaggcagggaaagattctcctctaaagccttggtggggagcatggccctgcccacaccttgatcttggacttccagcctccagagctgtgagagggcccatttctgttgtttagtccaccaggtctgtggtcttcggtgatctgtggtcattggttggcagccctgggaagctggtagaggcaccctctcaagctgctgttttctgcttggttgtatctagggctgaaagccatccagttcaacacgcttcctttggactcacttaacgaactcaccaaagctggccttttcttattatatttagagcgtttggggct

SEQ ID NO: 16842 - DNA, 1357 bp, Artificial sequence
  DNA replication origin
tacttaaaaaaattattacttgctttaaaaaatgccccaaacaataagagcgctcatttagtgctgaggtttacgctccttttcacactcacacaatcagcgccaatcacactttccagaatatggaatgcctccactttgttttggtaaaattagtgcctcacaacgtcttcccacctcctggtcccccttctcacagagggggaccggccattgtgctcttggaagtagcacaggatgttgttacacttggctacgcagttgcataatggcctccgaaattaggcccggtgctagttgaagcccttgtttgcccttcagatactgaccacagatcagcacagtgggctcactgcctgggaagtcagcactcgcaggtgtgtttgtgtatttgtgtggtgtgtatgtgtagcatctatggtgtgtacagggtgtgggtgcgtagtgtgtatgtgtggtgtatgtagtgtgtgtatggtatgggtgtgtgacgtgtgtgtgtagtgtgtatgtgtggtgtgtgagcggtgttgggtggtgtgtgtgtgatgtgtgttgtgtgtatgtgtagtgcatgcagtgtgtatgcatggtatgtggtatgtgtggtatatgtggtgcgtgtagggtacagggtggtgggtggtttgtgtggtgtgtgtgtgctgtgtatgtgtggtgtatgtgtatgtgtggcacatgtggtgtgcatatggtatgggatagtgtgtggcatatatgaggtgtgtgggaggtgttgggtggtgtgtgtttaatgtgtatggtatgtgtggtctatgtggtgtgtgtgtattgtagatgtagtgtgtgtgtggtgtgtgatgtgtatgtatgcggtgtgtgtagtgtgtgtgtgatgtgtggtctatggggcgtgtggggggcatgtggtggttgtggcatctgttgtgcagtgtgtctgttgtgtggtgtatgtgtagtgtgtggagggtgtgtggtgtgtgtgatatgtgtattatgtgtggtctatgaggagtgtggggggcatgtggtagtgtctgttgtgtggtgtgtgtctgttgtgtggtgtgtgtctgttgtgtggtgcaggtgtagtgtgtgcagtgcgtgtggtgtgtgtgtgatgtgtgtaggatgcatggtctatggggcatgtgggggtcatgtggtggtgtgtgttgtgtgttgtgtgtctgttgtgtggtgtgtgtgtaatgtgtgcaagatgtgtgatgtgtgtagtatgagtctatgaggtgtggggggcatgtactggtgtgtggcgtctgttgtgttgggtgtctgtggtgttgtgtggggtgtgtatggacatcattgctcctggcgctggccc

SEQ ID NO: 16843 - DNA, 1049 bp, Artificial sequence
  DNA replication origin
tgatgcaagagactgtgggaatgcagaggacagcctgggggcggtgccatggtctgtgggactcagaggacagcctgggggtggtgccatcatctgtgggacacaggagagagcctgggggcagtaccttcgtctgtgggatgcagaggacagcctgggggtggtgccatcgtctgtggggacgcagaggacagcttgggggctgtgccatcgtctgtgggacgcagaggacagcctgggggcggtgccatcgtctgtgggacgcagaggacagcctgggggtggtgccatcgtctgtgggatgcagaggacagcctgggggcggtgccatcgtctgtgggacacagaggacagcctgggggcggtggcatcgtctgcgggacgcagaggacagcctgggggcggtggcatcgtctgtgggatgcagaggacagcctgggggcggtgccatcatctgtggggatgccgaggacagcctgagggtggtgccatcgtctgtgggacgcagaggacagcctgggggtggtgccatcgtctgtgggatgcagaggacagcctgggggcggtggcatcgtctgtgggatgcagaggacagcctgggggtagtgccattgttgtgggatgcagaagacagcctgggggctgtgccatcgtctgtggggtgcagaggatagcctgggggcggtgccatcatctgtggggatgccgaggacagcctgagggtggtgccattgtctgtgggacgcagaggacagcctggggtggtgccatcgtctgtggagatgcaggggacagcctggggcggtgccatcgtctgtggggacgcggaggacagcctggggggcggtgccatcatctgtggggactcggaggacagcctgggggtagtgccatcgtccgtggggatgagaagagatggaacctgagggtaggaggtggacagagaaagagaagcaggaaggcaccaaaaaccagcttggcctacatgggaatctgcttacagcaggtctctccactccttccttctttgagagagatgaggaaaccat

SEQ ID NO: 16844 - DNA, 1315 bp, Artificial sequence
  DNA replication origin
ggcgcggatggagatgaagctgcgaagaatgctgagaaagagcggccgggggccttggagggaagctagggaaacgctgcgggggcagccgaggccgtcggcgccccgggagaaggtgcatgtggagtggcgccggggggacgggtgggcgctgggcggcggcggcgccggcctggaggtgcggcctgggctccttccggacccgcccggccggcgcaggggctgcagcctccacgcgggggccttcggttccgcctcaactttccaaccgggccgccttctcccagggcgggtgactgagccgggcacacgcagcctctcccgcgccgggctgccccggccagggtctttcctccctcgcccagtcgctgccctctcctttcccgcagcccgcggggcctgggctctccctgccagctcctcctgtgtccacttcagccttcccggttccccaggcagcctgtcctgccggtcactccgtctcccacctgctttgccgggaactagagcacacaccacacaggaggcgggaggggggcgcaagaggtgggtgttggaggcgggggtgtggtgtggctgtggtgtgatgtgtggtgtgtggtgtgtgtgtgtgtggtgtggtgcatgtggggtgtgtgtagtgtgttgtgtgtggtgtgtgtggtgtgtgtagtgtgtggggtggtgggtatgtgtgtggggtatgtggtgtgtgtggtgtgtgtagtgtgtggggtggtgggtatgtgtgtggggtatgtggtgtgtgtagtgtgtgtgtgtagtgtggtgtgtgtgtggtgtgtttgtgcggtgtggtgtgtttggtgtagtgtgttgtatgtgtggggtgtgtgcgtgtggtgtgtttggtgtagtgtgtgttgtggtatgtgtggtgtgtggggtctgtgtggtgtgtttgtgtggtgtggggcgtgtttggtgcgtgtggtgagtttggtgtgtgttgtggtatgtgtgtggggtgtgtgtggtgtttgtgtgtggtgtgtttgtagtgtgtgtgggctgtgtgtgtggtgtggtgtgtttggtgtgtggggtgtgtgtggcgtttgtgtgtagtgtggtgtgtgtggtgtgctgtgtgtggtgtgtttgtgtgtggtgtgtttgtgtgtgtggtgtgtatagtgtggtgtgtgtagtgtgtttgtgtgtgtggtgcggtgtgtatgcggtgggcgtgtgcagaaacaacaagcccctgctccgcatggggtgtggagcagatgctgcggaagccgcctggcctgtgggcgttggcagtggggaccagctgacccagaga

SEQ ID NO: 16845 - DNA, 1048 bp, Artificial sequence
  DNA replication origin
tgagacagtccagacaatgggaaagcaggatacagcaggaagagggggcaagcaggcagtcttctcaggtgggaatggccaccctccagggcctctggccactagggagaccttactaaagagaggcagggagggagagagggaggaagggagggagggggagaaaaaatgaaaggcaaaagagagcaagaaagagggggaaataaagcaaggaagaaaagaaagaagggagagagggggaaaggaaggaagcaaggaaggaaggagagagagagggagggagggaggaaaagaaaggaaggaagaaaggaaggaaagaaagaaaaagaaaggagggcgggagggagggagggggagagaaggaggaagggagggggagggaagggagagaagaaggaaggaaggggaaggaaggaaggaaggaggggaggggagggagggagggaaaataatcgaaaagaaaagaagaggaaaaaaagaaaaagagaaaaggctggtttagccaagcatagaatcagcttgaacaactggccagggaacaggcctcaggcacacagaaaggggcagaaaggtccaggtgtggtgggggaagacaggctcatgtctagcagacatctaggaggggccaaccagacagctgggaggtcagtgcaggacaacgtgaagccacgacctccttctcgagagctaactgtgtgccaggccccgttctaggtgcctgggatagggcagtgagccaagcacatgtggcccctccctcactgggctcacatcctagtgtggggatccacacagtaacagagaaaggaaggaaaagatttcatttcaggtggtggtggatgctgtgcagacgctggggggctggagtgggctgctgcttagtggggtggttggtgggtggttaggggcagcctctctgatggggtggaagggactacccagtacagggagcagtgaccagaaacaaaatcactggaaccactggaagatactccttccccagccacagagccagggctcaggagcaggaggattcaaggggttgccg

SEQ ID NO: 16846 - DNA, 912 bp, Artificial sequence
  DNA replication origin
atcagaatccttaacttcacggagctgcatccttgtggaccaataaatgagccagtaacatttacattatgtcagatgtgaccaaggtgctggggaaaaaataaaacaggaaagggagtgagggagagagggaggggagagtatgcagtgtgagcgtgatcagtggagcctcagaaggaggtggcattggagccaagaccagagtgaggtggggacataagccacactgggggacgggggaagagcattccaggcctggaggagtgaagagtttgaatgggaatggtagcagatggggtctgagagtaatggattgctggcctgtgtggggccttgggaggccaccgccagggctctggcatcagctctgaatgagatgggagccacgcaaggtgtcaggcaggggaattacatgatctaaatcactgtggctgctgtgttgagagccgacatctggggaccagggtggaaggatgagactggataaatagttgtagtttcatgctaaatgcaattagaagtcccttggaaggttttgacatgggagtgacctgacacaatttgtgtgattaaaaagatctctctggctggcaggcgggtggagaactgacagtactggcatcagggagaggggctggaagccactgcagggctgcaggtaaagacggcgtggactgggcagggcatagcagcggaggtaaaaggaagggatggatttgggatattttttggtgatcctgtggccgtcagtattcttggcaaggtctctccagtgtgttgcagcctgctgcctggtgtccatggaaaacacagccctgcctcaaggaaatgaacatggacatactgtacctaaacctggagcatttgacatggaagctaatgaaggaaaaagaaaacttaaacacttaggat

SEQ ID NO: 16847 - DNA, 1409 bp, Artificial sequence
  DNA replication origin
ggagccggagccgccgccgccgctcatccccaccagccccggcttcagcgacttcatggtgtacccgtggcgctggggcgagaacgcacacaacgtgacgctcagccctggggccgcgggggccgccgcctcggccgccctgcctgcagccgcagccgccgagcactcggggcttcgtggccggggcgcgcccccgcccgccgcctcggcctccgccgccgcctcgggaggtgaggacgaggaggaagcgagcagcccagacagcggccacctcaaggtgagcggcgcgggcgggcgggcgggcgggacgtggggcagccggggcccgttaacggtgcggcgggcggggcggagttgaaaacgcgaggtcgatccggctacggcgggggctgcggctgacaggatgctgacgtcactgccgcgcgccaaaaaccggccccagtcggggggggcctgtcacgtgacaggcgggagcggcgcgggagaccgtccttgcggcaggtgcagtgggcgggagcgcggcccggggtcgctggggaggccgggtcaacggccactgacatcctcccggcgggctgccgagtcctcagttccgagaggaaacgagagggatgagggccttgagttgttccaccgactgcgagagggcagggagcgcacagtgtttgctccattactgcagatcgccctcgccctgttaaaagatgccctgcagagacagccgaagagcaagaaaggacttctgggcctgttctgcggctgaagttgtgccttcgctgcctttcatttatccagcatactacttgctaggtgttgagagcacatagtggaatgggacgctaaaattgcttgcagtctccgactgcttaaagctgggaaggtcgttaccactggttcaaacctattttacagatcaggcagctggggcttacagtgattagtgaggcgaccttcccacgatggcacagctcagtagtggaagagcggggactaggtcgaggttttgtggcttttagtcctgcatgtgtttggggtgactttctgctgacttatactgaactctgtagactgtaagctccaggtgagccaggagtatttctatctagaagactatatgactttactaccttacattctgtaaatgctcaataaaggtgctcaaaaaatatttgtgtaatgaatgaatggtgctaacagaagggtaatatccaggttccatttgttaagtggctgtataagataagcaatttgcaagagataacaagtaaatcacatagtggataactgcatctgtatcagcacataatgtataagttgaaacgagtttgatcattttacatgcagtcacaaggatgttgaaactacattgtttgggttttgaggaaattgatatattttatgtggcatta

SEQ ID NO: 16848 - DNA, 1318 bp, Artificial sequence
  DNA replication origin
cgccggcgctcggcctcgcgcaggatgtcgaacgggtccgactcgtcgtccagcagctgatggaagcggttggccaccacgcagccgaaactctcctgcatcgcggcgccagcggcagccacgggactccccagagcgcccttcatgccgccgcgaccactgcgggcccgggagggcagcccacgcgagcgcgtctcagcgaagccggcggccaggacccatgccgcccgctccgccgccaccgccctccgggccctaccctgtccggcccctaccggcgcccgcccccgcggcgccgccgccgtccgccccgctgcgccagacagccagtcagcgcgcgcgggtgcgccccctttccgacacggcgcgcctggagacccaatcaccgaccggctgctgtcacgtcacgcgacctctgggccccgccccgttcgctcagcagggaggggcggggcccaggggcggagctactggctggtccaggcggcgccgacgaagcggtggggtctcggctgtgtgtgctttctcccgggactgcgaccgtatttgctatgggccactctgctttgaagcttatgtatacatttagccgtgcaacagctacatattgcgcacttaccgtgtgccaggcattatgttgtaggaaatactagctccgtgttgtcacagatctgagtctgtagatggagaaaaagtgccctgaaggacaggcgcagagctctctacgggctgcagcaaagggatctgacctaattgggaaatgacagttaagccgagggagaggggtgacaaggggttggaggaggaacagcaagtgcagcagtcttgaggtgggatgtgcacagcctattcaagctcaaagtggtctctattctaagagcagtgggaagcaagttttgagcatgagcagatttgggtttgaaaaggccaccctacctgcactgtgaactaatagtttggagggaaatacaaatggatgctgggaagccaaacatgattgttgcaaagctccagggaagagttgatagtgactgggattaggatggtggcggtggaggcgaagagagtagatggattcaaagacttggtgatgcgctagaggtggtgatgagggagaagaagatacggtgactcttattttcctggctccagcatctgaatgatagtattagttaccactggaagacactactttaacgggaatcattaattcagtctgggacacgttgaggtttggatatttgttttcttttgagatattcagttgaggcctggagcttagagaacgccggactggacttcctccaggaaatctttg

SEQ ID NO: 16849 - DNA, 836 bp, Artificial sequence
  DNA replication origin
catgggtcctggccgccggcttcgctgagacgcgctcgcgtgggctgccctcccgggcccgcagtggtcgcggcggcatgaagggcgctctggggagtcccgtggctgccgctggcgccgcgatgcaggagagtttcggctgcgtggtggccaaccgcttccatcagctgctggacgacgagtcggacccgttcgacatcctgcgcgaggccgagcgccggcgccagcagcagctgcagcgcaagaggcgcgacgaggcggcggcggcggccggggccggtccccgcggcggcaggagcccagccggggcctcgggccacagagccggcgcgggcggccggagggagtcgcagaaggagcgcaagagcctcccggcgcccgtcgctcagcggcccgatagccccgggggcggcctgcaggcgccgggtacgcggggacagcggggttagcggaccacggctcggcccgctgtgagactggggtcccgggggccggtttcaggaggaggggcccgggaacagtagggagagttgagggtcctggtggccgccgaaggtaggaggagaggggcaggggtcacaccccttccagctctcgccagcctcgtgcggggctccgggggaaacgctggcttggggtgggatagggccctcgaaccctggcactgaggctctacggcaagttggacgaagttgagggaggttgtctgggtggcgtgtgggggcgaacggctgaggtcgctaccccggggctcccacatccagacctggcggggaccttcatcttccagcccagcctctgcaagattgaggtcggagccacccgagagcgcggtg

SEQ ID NO: 16850 - DNA, 1001 bp, Artificial sequence
  DNA replication origin
gccggtttcaggaggaggggcccgggaacagtagggagagttgagggtcctggtggccgccgaaggtaggaggagaggggcaggggtcacaccccttccagctctcgccagcctcgtgcggggctccgggggaaacgctggcttggggtgggatagggccctcgaaccctggcactgaggctctacggcaagttggacgaagttgagggaggttgtctgggtggcgtgtgggggcgaacggctgaggtcgctaccccggggctcccacatccagacctggcggggaccttcatcttccagcccagcctctgcaagattgaggtcggagccacccgagagcgcggtggggaggaggagggcgcctggtcccggggctgggggcctctgtgatgccggaggcctgggcgaccgcggggcggcctgtgacgtcggggcccgggcgggggtccccggcgcggtccggcctggcgccttcgccccttctccgtccggtagcttccaggaggcagccggcatcgtatttcagtacttcgtgtggtgttgatgggatgtgcaacttataaatagctcaaggctgctttaagaaaagcgtttttaacctttccagcaagaatattcggagttccccactccctatttagcaagaaaaaccggtgcgcagcgtggtgtcctgctgcctgtggacggggagggtgcttcagagttcattctctcaccgaactgcgtcagtggcagagccagcaacactccacctgtgtttcctgttttcttgaaatgaggcagcggtcccaaggtttgcagagtgttaggattaagatgtgtaggttgaccattcctgccgacgtttgccagtgtgttcaacttggctttattggtttgttccttgcttgataaaaattgtgcatcgcagccctgaggaaacgtctcaggtttaagtattagggctttgatgtgcagctgggtaatgtttacctttatttgtgaaaagctaaatccagagt

SEQ ID NO: 16851 - DNA, 1283 bp, Artificial sequence
  DNA replication origin
gcaattgttttgaatacagctttcacaatcatcaatcactgtggcctttcactcttgaagtaagtaacaataataagagcagatactgataaagcactagctacatgccaggcaccactctaggacacagatataaacgcacgcacacacacaaaatctttacaagaaccctataatgtaggtacgttattattcccattttacagatgaagaaaactgagccactgaaaaagaaattaaataacttgcccaactagtaagtggcagagctgggatttcaactcatcacactggttcaatgtctgtgctcttaaccactagacaccctgccttttggcagctgaaggatgagtaagagacagataggcgaagagtaaagggggtttgggaaaacaaagaaacaacacttgtgaaagctgtatggcaagtgtgagggcaggggtgggataaaagtacatttgagaacatgaaataaaggcctcatggtgaacccagagaaggcacaggaatgtctgaacttgagggttttgcaggggccagaccacacaggactctgcaggtcagaacaggggacagaaaaaggacaggaagacattggagggtcttaagcaaggggtgggggcatgacaatcagaatgcggtgtgaacaccaccttggcgtaggtgaggatgcagggagccctgtgaggggctccagtggtggtccagataacaatggcttagacgacgctggtgagtggtgatgctcggtatttaggggtacaatcaccagagcagagggaaggactgggttttggaaagaggagggtcaagaagacagaagttccaaggatgactcgtaggtttctggtttgtacagttggatggaaacactgagtgaggaccagaggtgtggggaggagtcagctcagtctcggtcaggctgggcacaggagcatctgggatgtcccagggaaagtgtccagtaggcagatggagccacaggcctggagcccacattgaagttaagagccagagatacatattccagagttagtgtgtaaacgacaatttaagtcacagaagtgcataagatcctataaagaaactctacagaaagagaaggcctaaggcagggccctgaagaacttaacattttaaaagacccgaaagacaaggatgagcctgcaaaggagatgctgagaggcagaaggaaaagaagagcagagtgatcacagaaaccaacaggagagcacgtttacgaagaaatcaataaagtcaaatgcttctgagaggtcaagaaa

SEQ ID NO: 16852 - DNA, 1131 bp, Artificial sequence
  DNA replication origin
gggtttatgtacaagttgatgccacatggcaggcactccttaccttacaaatggctttgagctcccaaagttatgtaattcagccctctgggattgggcacagttttgtaaagaaagtgttcaggccaggcgcggtggctcacgcctgtaatcccagcactttgggaggctgaggcaggtggatcatgaggtcaggagatcgagcccatcctggctaacacggtgaaaccccgtctctactaaaaatacaaaaaattagccgggcgtggtggcaggtacctgtagtcccagctacttgggaggctgaggcaggagaatggcatgaacccgggagacagagcttgcagtgagccgagatcgcgccactgcactgcagcctgggcgacagagcgagactccgacaaaaaagaaaggggaggggaggggaggggagacgggatgggacgggacgagactggacaggacgggaggggacgggaggggggaggggacgggaggggaggggaggaagaaaaggaagggaaagaaaggaaaggaaaggaagaaagaaagaaagaaaagagtgctcagatggcagtggttccctgattttccccacagaggactgattggcccaaggcgtagctgtggggggtgtgagagcctttgcaatctggtttgggaaattcctgtcatctagagtccaaggaaactttgtggccaggcagagagctttccaggagcaacaggagatgtgcagaaaagctgggctgggcaaagcaggcaggagccgctaggcctttaggcctagggagccaagttttagtcccatccggtttacatggagaatacctgagcgtgggccctctgcactgctgcagtgtgcagtaccctgctaggcaccatggccatcgccacatggctcagagtggctgagcacagaggcaaacactccatgtctcctttcatcccctgcctgaggtacaggcatcccttttcctgtcccctctcctaacagctttgcccaagggactagtcctttcactggaaatttcaggagtgtgtagaaaggatgtggggctcagggactgaatctggtttcagtttctaccttccctaatagtagccaggtagcaagaaagacagcgtcct

SEQ ID NO: 16853 - DNA, 1071 bp, Artificial sequence
  DNA replication origin
ccgtgttagccaggatgggctcgatctcctgacctcatgatccacctgcctcagcctcccaaagtgctgggattacaggcgtgagccaccgcgcctggcctgaacactttctttacaaaactgtgcccaatcccagagggctgaattacataactttgggagctcaaagccatttgtaaggtaaggagtgcctgccatgtggcatcaacttgtacataaacccacaggaggcttctgagagtctcaaatgttctcagacactgaggcagggtaagacatttctcaagaaccaccaccctgcaaagggactgagggcgccttcagcaaggctgccctttctgggcacccatgtgtgctgcccccccccgccccccgcccctgcccaggaacttggctcacattgacttcagtgtgcctggcactccctggagttgtgcgatgaacaacctgcacaactgtactggcggcccacatggatactggccacgggtcttgcgtcagagcaacagtgaggaaaacgtttcaagtatctgagacaagttctaagcaaactgaccacaacttgcatgttttgctggtgagaggatagagctggagccagcggtgatgctggggaagttttcaggaagagggaaggtggatagaaagacagcaggagaaatgggaacgccgtgtggcctatgagggacatgcttggggaactgggttgctgtgaccaaggtagaaagatgccctgggaatttttactgaggctccccggcaggcccaggcagggtgaggctgcgtgggtgttgctgattgatgaatagaccctgccatcactgcatatctccgggggtgccttccacacggcatctgtacaaacagcacacctggggtgtgtggccacagccagcaagtcactaagttgacccatcgatgcagccttcaaaaatttggtgcgaacttttctggggagatggaggggcctcagcttccatcagatcatcgcacaggggctcctagcctaagaaagtgtcagcagcactgccctgctgcgcctggaatgggcctcctaccatcccagggtgg

SEQ ID NO: 16854 - DNA, 869 bp, Artificial sequence
  DNA replication origin
tttctctgtgttaaacgacgtcttttcaggcggggccgttctccctggcgtgggactccggggaatgcagcgtgtctggcgtcctggcacccgcctactcggtgccaccggacggtccaggcccccatgcgtttccctggccccgggctgttgctgcccccagctgggaacggctcactcgcttccaatgccgcttgtcctgggcagtacacaggacagagaagccgcctcggtgctctcgggccggcgggcagaggaaggagctggaggaaggggcttctcggagggagggcgcgggacgggctccccgggagcgggtccgctgcacctcctccagcggggacttcagggtggcctgggcggtggagccagcggggtctcccttgcctgcgcctggattgcggggtcagccgggacccagccggagggagacgcacggagcgccccggcaggaccgcggttggcgtgtccttaagtagccgcggagtgtccactcagcactcactggccaggctggagggtaacggctgacggccgttctgggccccaacccaagtttgccttgcggttgagagttagcggcccaggaagctagtccttgccgtccacacaaactcaagccctgagacaggccctgtggtggtggtggtggtggtaagtacagcgctgtccatctcctcccttttccagcgatggttggctgtcccaggctgtcacctttctagaccggcttctgatctggctcgggatccacaaggactagacctgcggggaaggtctctcctggacacgcccgttgcccactgcaagttctctccaggtgcaattgaagcctctcagcaggtgcgtctgcctcattcttccactgg

SEQ ID NO: 16855 - DNA, 902 bp, Artificial sequence
  DNA replication origin
cctggctcctgaggagcgccccccgccccgagtttctagctgcgtgggctgcgagctttaactttagcttgtgcaccctcctccaccagcaagatggaccgagggtcacctttctaagttgcgggcgtcagcccggcgcctcgaacctgcagctcctccccgcgggctgcttctgagttcctgtggattccgccttcagggattgcgagcccggttggccctcgcgcgagtcacaacctctgaatcagcccctgaggattccccgagcgcgctgaacgcgcctggcacgggagctgcccctttttggcgttggccaaacccccgctgctccgtagccttgggaccctgggcgccgcgttgcccgtccggcgcgtaagcccgagcccctctcctgggcctcccgcgccctgccccctagcgcgccccccgaacgcctccgcctcccggggtccgctccccgccggggcctcgagaaggaaggtgtcacgttggtggcattcgagccagccggcaagacgaatgtccgggttgtcacttttgagaaatcccagccagccagagcaggtagccaagcagcccttcgatagctgttctgttagtgctgattcgactgttcttggagactcataaatccaatttggcagctgttaggtttgctgggattgacagtgacgcgtgtgaaggcattaaatgtgatgatgtatgtggcaacgctgtgtaaacagcagagctgtccacgattttgagggaattggcagtctgttttcagtggcggggaatgtgtcaacctcggtgcgtggcgttattaaaaactgtttccagcccctagcctttgataaaccaggtaagctggagtggcgagaacattaagtggaagtgtttagacaaacacagacgtttag

SEQ ID NO: 16856 - DNA, 1869 bp, Artificial sequence
  DNA replication origin
cagcacttttctgcctctatctaaacatgacctaaaaacaaaatataaatagggtttaaaactttaatgtgtatactcagcacacagacttcctattcacaagaagggaagatactttcgcgtaattacaaagtgtagtcctatactttgtctgttcctactatacaaagcataaaattatatacttgcaaagtatgaaaatatttaaatggtataattatctgtatttatgacacttttttttttttttttctgagacggagtctagctctgtcacccaggctggagtgcaatggcacgatctcggctcactgcaacctctgcctcctgacatttaaacaaattactctcaaaagatcataatgtcatggaggtagtttctctgtacttccagggagccacacggaccactctcctgtaatatctattcaaaacaagacccactcatttaaaatccctggtagtctgggaaactgggtggctttccaatgctgagcccctaggccggtctgaaaggtctcctcctcctcctccaggtcaaaacaaaggactgtgaccctaccgtttctgctctctaaaacttacttgcgcagcgccgcacagcctcccacgtctctagcttctttgctgcccctacagacagacatgtagatcattttaaatttaaggccttcactgatttccttaggggaaacagaggaagagtgaacaggagaaccaaccttaagaaaaagtgcttacagagttgctgatctctagcttcagacacagcccccctacttccttatttagccgtgcttaaggtaaaagcccacaacaatagaagtcaaagagccccttcctgaggtgctctatgaaaatttgcatttctgagaggcttccaaggggactgactcaaattcatctttcttttccccaggctggcagttaactgcggaactgcaggataaaacgttcaagtgctggtgaaaaatagggacagcttgcagatgttgtaaaatttggggccgtgaaatcttaacactgccctccaatcttctcacccttttagatgctaccatggacgtttgtttaaaggccctccaaaatgacagtttttggttaagttccaggaagatagggcattattttaatccagtagaaaaagaagaggatatgaccctacagtgtgccagataaagaagtttaaggacaaaacttgccccttgcttcaatacttcatgatataatcggacctgtcgacacctcagtatacacagcaatgagtgtataaacttactgaattaatgtgggcgctggattccgagatgagaaactctgaggtgcaaacaaccacggtatattgtggttccacggaagtttcatcgggtccttaagaagcccttgcttggcctgtttgaatgctgggcataggtcgataaatagagcgtagttgtttaaatagttttacttaagttctgaaatcaactctactttaaatctatatagctgcaggtaatgtaatcaggccatcctcttccaagctggcagccatggcaaaagtccctttctcttggcgcgaattacaaggaaattcaagaaatactttaagatatatatatgccaaagacctggagttaagttactagggtggggctgtgtaaatgtttggtgactcactaaagaaagttgggatctggggtgctggcacctggaggacacagaagaaacaaaagttggggggctggcgaaggtcgctagcacactttatctctgattggcggaagccctcagagttttctttatggcgtcaccgagtacctgcctgtagaaaggccccgtctccgtgacgtcacgccgcattggccaatgaaaggcctcagtctgcgg

SEQ ID NO: 16857 - DNA, 1032 bp, Artificial sequence
  DNA replication origin
cgcggccatgacgcggggcggccgagggcctgggtccgctctgtcagcgcggaccggggcggggcgcgcagaggttgggcgcggggggcggggcggggcgtgcagaggtggggcctggcaagtcacggtttccgcggcgcggcgcgggcctgggagctgtcggagtgaaccccacgggcggttctgactcagctctcagggtaggggacagagagagaaagtaaggtccgtccacggcgagcaagcattattgaggaagaaagccgcccgcgccctccatggccacctgagcggatgttctcacctattcgagaactaatgggtgtatgtgtaaaaggtgggctagggccaggcccacgttttgtaaacacacaggccgggcctgtaatcctagcgacttgggaggccgaggcgggaagatcacttgaggccaggagttcgagaccagcctgggtaggtaacagagggcaacgccatctccgttttttaaaaaaataaataataaaaataaagaaataaaaggtgagctgggtgggatgaggatgatgaagttagatgacttagcagctgttttgtagaaatcccacacttccaattcagtttctcctggggtgggtaggcaggcatagggaaatctggggatctcagcctttgtgagaccaaactggccctggatttagaggttcatctttctctggggtttctcatgggtgctaactgtgtgtccaagatttccagagcaggaccagataacattcaggctctttgtcttcataagtttactcactcttgtgtatggatttggggttcagaaagtacatcctttatctatggcctttgttgagctgaagaatatttctggggcggagtgctaggcaggtctatgtgactgatgtgactctgccacaaagtgcaggaaagggggatgctgcatcctctggctttcacctgtgtgaagattttatactttattgagcacacattaagtgctctgtttgagaagctctgcagcgtgtttacaaaattttaagc

SEQ ID NO: 16858 - DNA, 948 bp, Artificial sequence
  DNA replication origin
ataaatatacatcgtgtgtgtcggccccccgcccggccagccgccccgtccgggagggaggtggggggggtcagcccccctgcccggccagccgccccgtccgggaggtgaggggcgcctctgcccggctgcccctactgggaagtgaggagcccctctgcccggccagccgccccgtccgggagggaggtgggggtgtcagccccccgcccggccagccgccccgtccgggagggaggtgggggggggtcagcccccccgcccggccagccgccccatccgggaggtgaggggcgcctctgcccggccgcccctactgggaagtgaggagcccctctgcccggccagccgccccgtccgggagggaggtggggggggtcagcccccccgccaggccagccgccccgtccgggaggtgaggggcgcctctgcccggccgcccctactgggaagtgaggagcccctctgcccggccaccaccccgtctgggaggtgtgcccaacagctcattgagaacgggccaggatgacaatggcggctttgtggaatagaaaggcaggaaaggtggggaaaagattgagaaatcggatggttgccgtgtctgtgtagaaagaagtagacgtgggagacttttcattttgttctgcactaagaaaaattcctctgccttgggatcctgttgatctgtgaccttacccccaaccctgtgctctctgaaacatgtgctgtgtccactcagggttaaatggattaagggcggtgcaagatgtgctttgttaaacagatgcttgaaggcagcatgctcgttaagagtcatcaccaatccctaatctcaagtaatcagggacacaaacactgcggaaggccgcagggtcctctgcctaggaaaaccagagacctttgttcacttgtttatctgctgaccttccctccactattgtcccatga

SEQ ID NO: 16859 - DNA, 1134 bp, Artificial sequence
  DNA replication origin
cctgagtggacacagtacatgtttcagagagcacagggttggggggtaaggtcacagatcaataggatcccaaggcagaagaatttttcttagtacagaacaaaatggagtctcctatgtctacttttttctacacagacacagtaacaatctgatctctctcttttccccacatttcccccttttctattcgacaaaaccgccatcgtcatcatggcccgttgtcagtgagctgctgggtacacctcctagatggggtggcggccgggcagaggggcccctcacttcccagacggggcggccgggcgggggctgccccccacctccccctcggacggggcggctgccaggcagagacgctcttcacttcccagacggggcggctgccgggcggaggggctcctcacttcccagatggggcggctgccgggcggaggggctcctcacttctcagacggggcggccgggcagagatgctcctcacctcccagacggggtggcggtcgggcagagacactcctcagttcccagacggggtcgcggctgggcagaggtgctcctcacatcccagacggggcagcggggcagaggcgctcctcacatcccagatggggcggcggggcagaggcgctccccacattgcagaggatgggcggctgggcagagatgctcctcacttcctagacgggatggcggccgggcagaggcgctcctcacttcccagactgggcggctgggcagaggggctcctcacatcccagatgatgggcggccaggcagagacgctcctcacttcccagacggggtggcggccgggcagaggctgcaatctcggcactttgggaggccaaggcaggcggctgggaggtggaggttgtagggagccgaggtcagccactgcactccagcctgggcaagattgagcactgagtgagcgagtctccgtctgcaatcccggcaccttgggaggctgaggctgacagatcactcgaggtcaggagctggagaccagcccggccaacacagcgaaaccccgtctccaccaaaaaatacaaaaaccagtcaggcgtggcggcgcgtgtctgcaatcccaggcactcggcaggctgaggcaggagaatcaggcagggaggt

SEQ ID NO: 16860 - DNA, 1107 bp, Artificial sequence
  DNA replication origin
ttacaggagtcgtccggccgggccttggcctgggagggagccaggctgccctctccatgagccccttgtggccatggcccagcgttccctggggacacgatgggggccacctgggcagccggtggtggtggtggaagaggaaggccatgggaccagcctccctcacaggcctgggtgcccccaaccacctgggcagaggtaacgggcaccccaggagcagctgccaggagtaggggaggtggacacatgacacctccacagagggtgcctggagcctgccagacgaggggggcctgagttaggatcaaggtctgtgcctgagggggcttcacaggccccacttctgtcctcatctggacaaagacgttggaagccccagccccacttgggccgcggccatcctgtcctgccactagaggggtgctggggaaggcagagagcaccagagggccggctggaggaaccactgcagtcacgaggggcggcctgtgtgttgggccgggagagggtgtggcaaagggcagagccgtgaacacagacagggaggtgccagggttcacggtcacgccgggtcccagcactgggtatgctgtggagacaaaggaaagaggtgaatgagctggcgtctccaggtccactctagtcactggggaatcaggggagtcccaacagctgagggcatgtgacagggaaactctgcagcttgcaagtgtccctgagtgtgcatcagatgctctgttcctccacggcagagtcgctccactagagagcctggcgccagtcaccaagactccctgacccttgtctgccaagaagaaacagccaagcctttgctgtctctgagggtctccctcgggtgtccctggcagactgcaccagcctcacaggcatctcccaagccgtgggtcagggatgagtctctcggtggcttggtggctctcagtgtgctcagcagcaggtgaggggcctaccccagggcagtgctcggcattcagaaggccgacaggaaaccagaagtttccgaatattatggccccatctcctcttcagtcttcctttccctgaagctcttgtaaacccctttctttcctagctcaacacaacaaa

SEQ ID NO: 16861 - DNA, 1827 bp, Artificial sequence
  DNA replication origin
cggagagcccaggagtgctcctgcccgagccccgctgcccctgccctgtggctcccacgagtgctgcccatctccatccttgcgcccaacctgctcctgcgcccacggggcagggctgagggcccgcagctgggctcccctcctctctcttctggagctccccggggctgacccggatccagccggtcccgggactggctgcgcggggcagggggccgtctcggagaggccaggtggtggtggtcagcccccgtctggatcgcttcctccgggcctagtgcctcatcctcgctgcgggcaccaagggggcggctctgggctgagaaagctgaggagtcactgtcctcggagtaggagcggggatgcggcgggcagctgatcccagggcctgggagcctcggcacctgctttatgctttgtaagcgaataggggtcacctagggcccggagcgccggcgctctctcgaggggaccaggctaccagggcaggggctaggggtgggcgacaccctctgcggggacagggtgcggaccctcgacgggggcgggcagtgggtagtggaggagcggcagcgcgggtcctgacggtccaggtagcgctccagcgggtcgccacacccacgcgcgccgtcacgcggctcccccgcaccagcacagagaccaacaggccggagtctcccacgcggaacttcccctccgaggcctttatcttggggagctgagcgggtgcagagtcccagtgtctcccttgccagctcgcggagcacttcggagtcgcccagatccgtgcgccactggccgatgaaggtggccggactgtcgcgggccacgaagaagcccagcgccagccaccctgtgggcctggaaggtcacacttcgggatgcgcggacagcctcatgggttcccatacacgggccagccgagccactgtgggcgggggtacaaaccaggatcgctgtgaggacccggcaggcgctcagtgcagactaagccgcagagcactgcaccggcctgtcactcaggccaaatgtctggtttacctgctggcgctgagaaacctcagtgcctcagtttcctcatctgcgaaatgggtacagtaaattacctgcttggtaggattcaatgggataatttttaataagcaacttagcgtccataaatactggctacacagccttttttttttttttttggagatggctggggcctccgtcacaggcagggaagtgcccactgtgaagggctgggacctggagagatgaagacaacggctgggacccccagtggataggaagggaacccaggtcccgacctcagggtgggtgacctccatggttcagggctgtgcccagcccacctcctgcgggaaggtccgggcttctcccttgatcccccttccctaagggctgagccatcaaaaaaacgacgtagcagcagtaatggtatcagtaacagcaatgcagtggctagggctgagtgcatggtgatattatctccattttacagatgaggaaactgaggcgcggaaagggtaagagctcgctggaggtctcagagctgtgggtggagccagggcgtccaggctgcgccgcgcggcctatctcggcgatccagcagccgagccgcgaaagccagaaccccctcagccaagaagctccccagaaccccaggccgtcgtttgtgggtcagaactgatggcccaggcccagagggggtgcagagccgctcaaggtcacacagctccaggtaacagaggctgctaacgctgctgtctggccccgggcagggagtactgggggtctccccgctttcctggctcatccacc

SEQ ID NO: 16862 - DNA, 1055 bp, Artificial sequence
  DNA replication origin
tggtgaccatgtcctcatcagtgaggcccttgtcagtggggccctggtcagggcagcctagtcagtggaacctaatcagtgggggcctgttcagagagagcttggtcagtggtggcttttgtagcactggtctatggggtgacctggtgagcagggatctgagcagtgggtgccaattcagtggggcctgctcactagggtcacagtcaggggcatctggtcaccaaggcctggttaatacgggcctggtcagtggcagcctgttccctggaggcctggtcagtggggcctcatctgtggtgccaggcaatgggatcattgtccagtaagggtcaccctactgcctgtggtgccaggcagtggggtcactgaccagtaaggacctggtcgtgaggccttgtcagtaaggacctggtcggtgaggccttgtcagtaagaacctggtcggtgaggccttgtcagtaaggacctggtcaatgaggccttgtcagtaaggacctggtcagtgaggccttgttagtaaggaccttgtcagtggggcctggtcagtaaggtcctggtcagtggggtcctggtcattgtgggcctggcagcaggggcctggttagtggggcctggtcatggggttctaatcaatgagggtgtgttctgggaggacctgatgtgtgggatatggtcagcagggacctggtcagtgggggctgctgagcactgctgggagatgtcaggtgcaatgcacgttatggagggccctgtggatagttgggatggcccagtagtgcccaaagtcccagtcaaaagtggacaaagcaggtgtttggatggacctaggagatcttgctcagagatattgaaaggacaaaggtaaaggaagggccagagtggccagatagatggtcacagtctatcagctgcacaggatagaggaagccagggaacaggcagggtgggcagctggggtgcagggagaggcaggtgcatgctgggaggtcagaccttgtgagggctgtgggggtgtcaggtggggtgggctccaggtgcaccctcagtgcact

SEQ ID NO: 16863 - DNA, 1254 bp, Artificial sequence
  DNA replication origin
ggaagggagaggtcagatgggtctgtagaaaaggaagattagaaagactcagcaacacttggggttggtactgaggggacaggcgggagggaaagaaggaagatttgggacgagttgcactgggcacagagactaggaagggactgatgtgtaaaagaatgcctggacgtcaggcacctcagaccgtttgcctattttatgacaagaattatttagatcttgcaggatggaaaaattcaaagtgccattttctggctatttggaactactgtcgagtttgtattggggtcaagcggcattgcagaagaaaataaggcatttaggttttaggtcaggtgtgagttgaagaggttttaagtttttgagaacacaggctaagggagaagaaggaggaatggaaggtggaagcttacctttagtgaaggaggcaagcatagagaaaagagtagagacacggagaaggggtggggggttcttgccctccagaaaagcagagaaggggttggggcacagaaataagggattggggcacagagataagaggtcagggtgcagaaataagggattgaagcacagagataagaggttggggtgcggaaataagtgattgggggttcttgcctcctaggaaagcgggacttgctgctaagggtgaaggagaaggggttgggggtacttgcccctgccccaggaaagcgggacttgccgctgagggtgaaggggaaggggttggggtacttgcccctgccccaggaaagcgggacttgccgctgagggtgaaggggaaggggttgaggggtacttgcccctgccccaggaaagcgggacttgccgctgagggtgaaggggaaggggttgaggggtacttgcccttgccactaagggtgaaggaccaaggcaggtgtccctgcgtggtctgacacccttgaaacgtgagtgtataatcagagaggcgtctctgcaatgattaaacaccaagggaaggctgccttcctagtccatgaccggcgctggagttttgggttcacggataaaacatgtctcttttgtctctaccagaaaatgaaaggaattgaaattaagagaagggagagattgaagtgtggcgccaagattgaaaggagaaagaggttgagggatagtgagggaggtcggagaagagagtaaaaagaggccgcttaccggatttgaaattggtgagatgtttcttgggctggtcggtctgaggacccgaggtcgtaggtggatctttct

SEQ ID NO: 16864 - DNA, 998 bp, Artificial sequence
  DNA replication origin
tctggcgggctctcaggccaggggcactcgcgatccagaggccgcccaggccatgctccaccacctgggcgcccagctacaggcgccaggcaactcccaagctggctggcgcgcccagcctcgcagaaccggggctagatgtcgctgtggctgcggccaagccaggcggtctgcccgcggcggctgcaccggggcaggaaccgaccctcagccccatccccggtggctgcggagagcccctgccagcggccccatctctcttcggaggaggagaggagcgggagtcacggccaggcgggccctcaggcgggaagggatgcgcgcctgcgattccgggatgtcctgcgcgagcccaggagaacccgcaagccagcggcgcctgcgcccgagctgcagccgccctctgccgtccacgcgagctcgagagcggctcccggagtccgggctagcgccgagctgcaggcgcgcgcctaaccgctttgctgggctcacgcggtctgagaggtcggagcgcccaactgctggcacgcgagtaacggcttagttaagctcactcggtctgagaggtcggaggctgcgagtgtcgctgctgaaggctgtggtggaccgggctggatcgcggattctgagctacatcgcggggttgggggtggatcttgggtttgggggtggattgctggtttggtggtggatcttggatttaggggtggatagcggggtggggagggggatcgcggatttggaacttggtcggggtggaaaggccacgaggagccgcggcggctcagtagcgggtggttggcgtctgagaagtcgccaccatgaggaaactcttcagtttcgggagacgcctgggccaggcgctcctgagctccatggaccaagagtacgcgggtcgggggtaccacatcggggactgggaactgcggaagatccacagggtggccatcaagggcgacgccgcggaggtggagcgctgcctgactcgcaggttccgg

SEQ ID NO: 16865 - DNA, 1063 bp, Artificial sequence
  DNA replication origin
gggcggcggccgcggcggggcccctggcggagacggcggcaggagctgggcccagagacgcggggacgggccgtgggcccccggaacgaggtgagtgcaggtcctgcgggctccgggcgcgacaggtgccgggcgacgtcggacgagatttcgggcgggcgcggcgcacctgggtcaccggtgggaccgcggccagggccgggggctccaacaggctcggggccttttccctgcagccgcaggggattgcccccgccccgacgcctgggaaccgggctgggcgccgggggagttggagttccagagcgttgtgttttaaatctctgaagggaccctgctccgggccgggcgttcacgcgggagtcggacggagcctcctgccgcctcggaagctctgcgccgtgggggaaatgcagcagcggggtgtggacgcgggcgggagatgcggaccaggaagtggttcccgctaccggcgcgacaggccgcagccgccgcccccagcgagggatgtccgcgctcccctatttgaacccaagtattttacaccacgaacttctcttgaaggtctctataatctggagacgagccccaggcaggccgcttaagtaatgcaggacacacatccccatttctctcaaacgaggagcacccagtgggtacagagcacccagctgggagggaaacatggatccgtgagtaagttgtctctcaactttcagtagcatcccctcagcagggtcagactctcagcttcagcttgctaggagggagcttggagccggcatatctttctgctcccattcacttgagaggtatatttccattaatagctaaaggtaccattctcaaataatttctaagagcagggaagggaaacaaccacattagaacaagtcctggcccagaagaattctgatcaccgcccatccaaaccaaaccaaaccaaaaaaccacagatctagttcattaaccctcctaccaacacctctctgctctccaatcgtgccggtgaaaaaaatgcagagaaatgttctctctagagagataggcaacagcttaatag

SEQ ID NO: 16866 - DNA, 1093 bp, Artificial sequence
  DNA replication origin
gcaaggcagaagaatttttcttagtacagaacaaaatggagtctcccatgtctacttctttctacacagacacagcaacaatctgatttctctttcctttccccacacttcccccgcttccactcgacaaaaccgccatcgtcatcatggcccgttctcaatgagctgctgggtacacttcccagatggggtggcggccgggcagaggggcccccccacctcccagacagggcggctgggcagaggcgcccccccacctccctcccggacggggcggctggccgggcgggggctgccccccacctcctggagggggcgtctgctgggcggagacgctcctcacttcccagatggggcggctgccaggcggaggggctcctcacttctcagacggggcggctgggcagagacgctcctcacctcccagacggggtggtggtcgggcagagacactcctcagtttccagacggggtcgcggcggggcagaggcgcttctcacatcccagacggggcagtggggcagaggcgctccccacatctcagacgatgggcggccgggcagagacgctcctcacttcctagacgggatggcggccgggaagaggcgctcctcacttcccagactgggctgctgggcagaggggctcctcacatcctagacgatgggtggccaggcagagatgctcctcacttcccagacggggtggcggccgggcagaggctgcaatctcggcactttgggaggccaaggcaggcggctgggaggtggaggttatagcgagccgagatcacgccactgcactccagcctgggcaacattgagcactgagtgagcgagactccgtctgcaatcccggcacctcgggaggccgaggctagcagatcactcgtggttaggagctggagaccagcccggccaacatggcgaaaccccatctccaccaaaaaaatacgaaaaccagtcaggcgtggcggcgtgcgcctgcaatcccaggcactcggcaggctgaagcaggagaatcaggcagggaggttgcagtgagccgagatggcggcactacagtccagcctccgctgggcatcagagggaga

SEQ ID NO: 16867 - DNA, 1092 bp, Artificial sequence
  DNA replication origin
ccaccaaaaaaatacgaaaaccagtcaggcgtggcggcgtgcgcctgcaatcccaggcactcggcaggctgaagcaggagaatcaggcagggaggttgcagtgagccgagatggcggcactacagtccagcctccgctgggcatcagagggagaccgtggagagagagggagagggagagggagactgtggggagagggagagggggagggggagggggaggagtccattactttttaaaataaagcaatagattgtttcttgatgtaaccacaaaattagtgctaagtcagtgtgacacaaacaaatgaaatgtgaatgaacccttcctcataccatattcaaaagtcaattccagatggattgaaaacctaaacattggccgggcatggtggctcatgcctgtaatcccagcactttgaggtgggcggatcacttaaggccaggagtttgagaccagcctgggcaacgtggcaaaaccctgtctttaccaaaaaattagctggatgtggtggtgcacaactgtagttctagctattcaggaggctgaggtgggaggatcacctgagcctgggaggcagaggttgtagtgagccgagatcgcgccactgcactccagcctggatgacagagaccctgtctcaaaaaaaaaaaacaaacaaacaaaaaaaaaaaacaaaaaactaaacatgaggctgggcacagtggctcgcgcctgtaataccagcactttgggaggctgaggcgggaggattgcttgagcataggagtttcagaccagcctgggcaatatagcaagtcccctatctctacaaaaaacatttttttaaatagctgggcatggtggctcatgcctgtaatcccagcactttgaggggctgatgtgggggttaaggggttggcttgagcccaggaggttgaggctgcaatgagccgtgatcacaccactttactccagcctggccaacaaagcgcaagactctatctcaaaaacaaaaacaaaaacaaacaaacaaaaaacctaaacatgaaaggctaaggtgggaagataacataggaagataactttataacccaggaacaggaaagagtt

SEQ ID NO: 16868 - DNA, 1765 bp, Artificial sequence
  DNA replication origin
caaaccatttgggaagagaggatagagggaaaacagacagagggcctctggtttctttggcttgggaggctcactaagggcttgatttttacaactttgcactttgcctgcagttggctcagtgagccggctttgaggggtcacccttgtatatcgcatatttgccccatgccctccatcttcatatgtgtttccatatgatcttcaaaaactacccccaaaactccagaaggtggcctgatattcagagccctttgccccactccctgcctcccccgacttctctgctgctcctgtctagtttctgtcccactgctgtggtgttccatccccacaggaaggtcaggctctggccacatccggcaccttgtgcactccctccccacctactgtgctctctgatccagggagtgggtgggtttttattctgcaggcttggagactgctaatcatagcccaggtgatggcaggagggtgggcggggtggggaaaggctcgaggcaggtgggcaggggagagggtagaaggggatgcctgtgactgattggctgtgagagtgaggtagaagagtgaagcagggtaacctcagacactaagtggtgtcggtgccattagtgatggatggcaagggaggagcaggaagaggggagatacagagttcagtttacaacctgtggcacttgaggcacctgtgggccacccaagtagggtcagttgtataggaagttctggagtgctacaggaggttcccattcaagatagagatttgggcatcattagtgttgtcaagctccagaaagaatacatggcccttgtagaagcctttggtggtgggggttgggggcgggggtgcaaatcgtgggaatggggcaaagctggaatgtggatcagttagccacaaataggctgagaaccaaaggccaaatcaagatgggcagaattggatgcaggagccacagagacagagtgagggttcagggctggccaggagactcagaggcatgtaagcccagaggccacggcggaggtgggagggcaccagcaccagcaccagggacttgacaggccacagctgccttctgcgacttgtgagtagtgttgtgcatgactttggtgacattcgttcaggggtgggggagccactgggggatgtgcaggggcagtgagaagactcaactatacacaaggggcactctgggtggtgacaggtgaagccaggtctgggggacctgaggagtgaatgcggaaagccagtgtgtagatcccaagtccagacagccctttcctcaggagacagggaatttgaaggacaaagggcaatggcttgaagggtattgggactgagagagaatggttttccctttcactatgaagtacagaagcagtgagtgcttcacccagctgggaaggtagcacttaactccggaacctagtttgctagggcagggatttattctgtcagaagccacacgagtcacagtagatcctccattgagcccgtatattatacatcacacttcaaccaaaccatctccccgaagtcccttgaggtcgggttaatctgtgaggcagggaggtggctgatgccttggtgcggcatctccacatggactggggctgtttttaccctggactttctcctccaatcacgcttcatgacgtcactcccctcattaggcagctcaaagggattatcaaatgactgccggcgcctgcggttcctgtgccaggtcagagctgcaactctgtgctacgtttctgtgtg

SEQ ID NO: 16869 - DNA, 1298 bp, Artificial sequence
  DNA replication origin
acagaggaacgctctgtggtcgtggacaggacgctttgacaaggcggctggctgggcggattccctctccgactcggggagaatctgcacacatacgccagcggagttgacgcgacccccgggccccgggactcggcttgcacgagccagtctggggaccggggaggcggggagagggaaggggaaagcgcggacgcggcccaaacctccagtagccgcagccgccgtcgccgagtagggccgggcagccagccgggcctggcgcagcatcagtgcccgctgccgcttccgctcgatactcgcccgcaccgaggcaggcagctccgcgggttgctctaaagccgccgcctccggcaaagccccgtcggccgccgccatctctggcccactccgaggacctagctcccagctccacgcacgcgcactgcacgccgaggcgagccagccgccctgcaccgcctctgcgctccccgcacccagcggcctttctgagtgagagcgcctgcgcagttaaggggctcggggtggcctgcccgggcgctgggcggagtctgggtatgcgcggacacggagtacccgcctaactacctgctctcttgtcatccgggagaagggtccgtgctgagatcatatctcacgacctggtcacctttaaaataggtctcgcttggtgattcagagtataggctttggagtcaggcctgggttaagtctgagctcttgacagttaaagtctgtgtgaccttgggcaagttatttaaccagagttcagtttcttcagtggtaaaatgaggataattatggaaccatttaccgagtctttgggaggattagattgccaggacaataacctggcacgtagaagacctcaaaaaatggtaacagtgagtagtagtagtgccagtcatagagcccaacagatgatagtcctgattttatgttggatacacggcctagagacacagccttagatttaaaatgagaagacctgggttgaaactcccagttaacttgctgtgtgacctcaggcaaatgcaggacttgctccaaggctgatatgcataaggttggctatctttcccatggaatattccttcagtgaggatgagctactgccaggtagacagtgggtttggatctgggccaaatatcctgacttcccaaaagtgtggctagtgtaacaaaagaaacatagcaggctttcccaaaaatgtatgctttccctttgttacaaataatgcttaattgaaaccagaaaacattaacttctaattactacatgtaccatttaggactgg

SEQ ID NO: 16870 - DNA, 1363 bp, Artificial sequence
  DNA replication origin
cccggacagggcggctggccgggcagggggctgacccccccacctccctcccggacggggcgggtggccgggcggggggctgacccccccacctccctcctggatggggcggctggccgggcagaggggctcctcacctcccagtaggggtggccgggcagaggcgcccctcacctcccagatggggcggctggccgggcggggggctgacccccccacctccctcccgcatggggcggctggccgggcggggggctgacacccccacctccctcccggacgaggcggctgacccccccacctccctcccggacggggtggctgccgggcggagacgctcctcacttcccagacggggtggctgccgggcagaggggctcctcacttctcagacggggcggctgccaggcggaggggctcctcacctctcagacggggcggccgggcagagacgctcctcacatcccggacggggcggcagggcagaggcgctccccacatcccagacgatgggcggcccggcagagacactcctcacttcctagatgggatggcggcagggaagaggcgctcctcacttcccagacgggatggcggccgggcagagatgctcctcaccttccagactgggcagccggacagaggggctcctcacatcccagacgatgggcggccgggcagaggggctcctcacatcccagacgatgggcggccaggcagagacgctccccacctcccagacggggtggcggccgggcagaggctgcaatctcggcactctgggaggccaaggcaggcggctgggaggtggaggttgcagcgagccgagatcacgccactgcactccagcctgggcaccattgagcactgagtgaacgagactctgtctgcaatcccggcacctcgggaggccgaggctggcggatcactcccggttaggagctggagaccagcccggccaacacagcgaaaccccgtctccaccaaaaaaatacgaaaaccagtcaggcatggcggcacgcgcctgcaattgcaggcactcggcagtctgaggcaggagaatcaggcctctcattaatgttactgcttggtcccagtttcatcataaacagtgcaaacatgaacactgtgatggtgaatttggtgtgtcaacttgactgggttctggggtgcccagatatttagtcaaatattctgcgtgtttctgcaagggtggttttggatgagattaacatttacatcaacggactgagcaaagcagattgccctccctgatgttggtgggtctcaccaaatcagttgacacttcactagaaaaaaggctgactcttccttgagtaacagaggattcttcctgcctgac

SEQ ID NO: 16871 - DNA, 945 bp, Artificial sequence
  DNA replication origin
cccctctgcccggcagccaccccgtctgggaagtgaggagcgtctccgcccggcagccaccccgtccgggagggaggtgggggggtcagccgcctcgtccgggagggaggtgggggtgtcagccccccgcccggccagccgccccatgcgggagggaggtgggggggtcagccccccgcccggccagccgccccatctgggaggtgaggggcgcctctgcccggccacccctactgggaggtgaggagcccctctgcccggccagccgccccatccaggagggaggtgggggggtcagccccccgcccggccacccgccccgtccgggagggaggtgggggggtcagccccctgcccggccagccgccctgtccgggagggaggtggggtggtcagccccccgcccggccagccgccccatccgggaggtgaggggcgcctctgcccggccacccctactgggaagtgaggagctcctctgcccagccaccaccccgtctgggaggtgtacccaacagctcactgagaacgggccatgatgacaatggcggttttgtggaatagaaagaggggaaaggtggggaaaagattgagaaatcggatggttgccgtgtctgtgtagaaagaggtagatatgggagacttttcattttgttctgtactaagagaaattcttctgccttgggatcctgttgatcggtgaccttacccccaaccctgtgctctctgaaacatgtgctgtgtccactcagggttgaatggattaagggcggtgcaagatgtgctttgttaaacagatgcttgaaggcagcatgctcgttaagagtcatcaccactccctaatctcaagtacccagggacacaaacactgtggaaggccgcagggtcctctgcctaggaaaaccagagacctttgttcacttgtttgtctgctgaccttccctt

SEQ ID NO: 16872 - DNA, 1064 bp, Artificial sequence
  DNA replication origin
aaatcactgcctcttcctgtgcctctagtggttgaactagaatcctggctagctcatctcgcttttgaagggggaaggggagtaatcatcggctcttttgagattgtcttgcaaaccatggactctctccccagaaatgaacacccacaatctagtgtgtaaatttcaggtttccaagtgttccaaagccgcgcacaaatttcggaaccagaccaagaatcctggactctagacgttgcctgggggccgatcctgcgcccagggtcccagaatctaactgaaatgcgcctgcgggccgccaccttcgccccgggccacggctttgccaggaatgcccgccgccacagctgaactcccgcccgcccgcctgggtcggatcagacgcgggtagtggcttgcgcttcgtggtcctcgggtccggaacgcagggaaagcgcgtggagccaacctagagcgggagcagggtctggcttgactctgtccccgattcgttgtgcgcagtgggacaagtccgcgccgtccggagccgacttccccttctcgttgtggccgtaaagctgctggacctccaagccggctcctgcgctccccgctgctctgagaacactgagtgtcccgggcccgcgcagactgggttgggagagggctctgtgggagggcttgcggggagcggggtaagaaaggctaggtgcttcttacctacgtaagaaacgttggtggcgggatctaagcaaacggggaggtgggaagcagaaggttccccttcctgggccccagttcctccatcctgtcccctgggtgacagtgattcgctgttcatagtgtttaagtggaccaacttaaagggagagagcgcttgccgagctctgggaaaccgaaagggtccacgcccgcgggagcctcggagactcaaaatcccccgctagaccgcagaaaatgttacactttaatcaaccgctacttcttccgtggagaggggcggtgggtgggggtgtgcgcatctcatcgcggcctgtgagtggaacaggctagaattatccccagcgtcttttttccatgtccaa

SEQ ID NO: 16873 - DNA, 1369 bp, Artificial sequence
  DNA replication origin
ctgcctaggttgtgcgcgcagaagaggcttcgggctcgaaggccagagcgagggcagttagtactggcgctgggcgatctggcgggggccgcccatgccctgcccccgaggccaaggtggccgtaagcgccacgggcagagaggcgaggcgggggcagcgaggtcggggcgcgggcccaggcggggcgacctgaggctggtcctctccacggcgtgggtctccagccctgcggaccgctggcgaggcgctcccctgcacacaccggaccggctcctccctccgccggcttcccctccttaaaggggccacgaagcgtggggcggcaccggttccctgcccgccccccgactgcccgccccccggggcccgggcgcacctccccaggtaggagcagctgtggcggcgcggtaggagccccacagcgtcagggcggggagggcgcttggagatcccccgggtcggccccctccgcaccccgatcgactgaggcccggagagttcaggaaccggctcgggagacctcagcgcccgaactcggagttttcggacttttcaggcctctgccaagggcttggactcgcaggtgaaaggacgggctcatctcacttttttgtcctgagagggtgagaattggccgagagggcgcttggtttttgtgggaatggggagggagaagttccaggagactggctccccgggcctttcaggatggtttccaaaccccaatcgtggctgccacagccactcggcactccagtccccccatctttcgaatgagtattcctaggcccgaaagggaaggtgacttgccatggccccactgcggcttctccgcttagcggagtctccaacctgcgtctcctttaggactgcgcttcccaactgtgtggtagaggtagccgctttccctttttgggccccaggtccctcgactgtaccggggtctggatctctcaagagtccttgcgtggtagatatttagggataggccaatcaccacccccaatcatccgtctttgagaggcccaggatctgtctctatttgatggatagtggtgcacggattaaagacgacgcaggataggtaacctcctcctccaatcccccgggaccagggtagctctgaagacccccagaggcagccaagcagccccttcccgcagcggggagtgagggctgcgggtaatgggggagtgggaagagagcggtggccgggtgggcgcgtctccgggggaaggggcgggcagtcgggacacgtttgcttcatgggtgtccaatttctgagttcctttcctgctgtccctgagccggaacttggtcctaacctgagatcctcgcggcgcggcccctctggcccgggttcgttcc

SEQ ID NO: 16874 - DNA, 756 bp, Artificial sequence
  DNA replication origin
agatgccgcccagcgtgaggcggcgctcgggcgcgtgcgcgatggccatggcgatgagcgcgatgtagctgtagggcggcttcccgcgctgcagggggcgcttgcggcgccgcccgcccgccccgcggcccgtggcctcccctgggaccccggcccctgctgccgtctcgccgcgctcttccttcacggtagccagcacctccggctgcggcggcggcggcccgctctcggcagtcatggcgcgggcgtcccgcacccccgggctctggatccccgcggctgtcggggggcgggggcgggcctggcgtccccggaacggacgctcggcccttctgcggagagctcaggggatcgtcgcgggctggccccgagagcccagcggcccaggctggcacgcgctggaggctcagcgtccgtggtctggggctggcgcggtgcagacagaggctcgggagtgacccgctagccgacggctcagcccgcgtggtgcttctcgaggcgggcagcggcggtggcctcgtgaccgggactggactctggtctccggctgaagggtcccttgcgcgctggtgccgggcggtcgaggggtccggaagtgatccctgggttggggtggctgcagctggtctgtggtgcccgctagtttaggattactgcctaggttgtgcgcgcagaagaggcttcgggctcgaaggccagagcgagggcagttagtactggcgctgggcgatctggcgggggccgcccatgccctgc

SEQ ID NO: 16875 - DNA, 1134 bp, Artificial sequence
  DNA replication origin
ctccacctacccggcttacatgcacgacgcggcggctgccgcagccgccgccgccgccgccgccgccgccgccgccatcttcccaggcgcggtgcccgccgcgcgccccccctacccgggcgccgtctatgcaggctacgcgccgccgtcgctggccgcgccgcctccagtctactaccccgcggcgtcgcccggcccttgccgcgtcttcggcctggttcctgagcggccgctcagcccagagctggggcccgcaccgtcggggcccggcggctcttgcgcctttgcctccgccggcgcccccgctaccaccaccggctaccagcccgcaggctgcaccggggcccggccggccaacccctccgcctatgcggctgcctacgcgggccccgacggcgcgtacccgcagggcgccggcagtgcgatctttgccgctgctggccgcctggcgggacccgcttcgcccccagcgggcggcagcagtggcggcgtggagaccacggtggacttctacgggcgcacgtcgcccggccagttcggagcgctgggagcctgctacaaccctggcgggcagctcggaggggccagtgcaggcgcctaccatgctcgccatgctgccgcttatcccggtgggatagatcggttcgtgtccgccatgtgagccagcgtagggacgaaaactcatagacacatcggctgttcacacgttccccgcaatctgagaacgaacaggaatggagagaggactcaactgggacccacgtggaaaagaccgagcaggccacagaggctcggtctccccgcgcacagcgtaggcacccggtgtactctgtaaacgggaggaggtggggcgaggcagccagagcccttggactggcacagggaccctcgatggagcgaagccctcaaacgggatgctttctggtattctatcggggagggtccttggcggtaaccagagggcagcgtagtgtcaacaccagagaccaggatccaaattgtggggaatcagtttcagccttccatgtgctgccggaactcgggcctttttacgcggttcgtcctctagtgcctttaactgcgttactacaataaaaggctgcggcagcgcctttcttcttaaagtgaggagga

SEQ ID NO: 16876 - DNA, 1045 bp, Artificial sequence
  DNA replication origin
ccatttggactgaaccaagttcacatgtcttcgtgaacaggatagtgcagtcccaaaaataaaaaataaaaattaccaatggttttcatacaatcttctttttcacaccccagcccttccctgttaagtttatacagaaagaggctgagtttctcttgccataactcacttgctcaaagatttttattaaaacagtccatctgaacactccagtttatctgaaagctgtgaatggagcctctgaaatatttaatgctgaaagtttttgctccagaatcgaaacttaaagatttctcaagggaaagggggagagttattggactttctctaattttagtgagcctgctacttaagcaagatacaaaatgaagttaaaattccagtttctttctaaagctcactttactgactgccctaacttaatttttctctttcctttttgcatgggggaggctgctgaggtgtagcagggggtgctggggatggaagagccctccccagctactgaaaggcgtcaccaacgggctccttgaatcctctcatctccttaaactttagttcaccctttgggtccagggctgcgtgatgacaagaaacagtggacaaatgaacgaatgtacttctctctgccttataatggaaaagcagatttatgactgggcagtaacagccatgaaattaccagcacgtcctgctcaaaagttcaataagttatgatataattgctgcctggagccaatcctgggactttaggttagacgcttggccatgaactcttttccgttccctagaacagcggctaggctttgggtggctactcagaggccctgggtggcccaccattgctgccaaatacgcagggcagcatccaagatgatggggccctgaatgataacccgggggcggtggatagagtcctgcagccctctagtgtaacagatgggggagactgaaggttcaggtgatgggactggagtgctgacgcacagttcaactcggagctaggtctcaagttctcagagacagggaaaaccagcccaggtca

SEQ ID NO: 16877 - DNA, 1537 bp, Artificial sequence
  DNA replication origin
accacctcccggcctgggcgggcagagggagcaccctgctggtcggaggatgctccgaggcccgacgctgctcccggcgggctgtcatcctcctaggggtcggccggccggcctggagccgccccgcccacggccgaggtttcggtttcccttgggagccccgccctgtgtcccggggagccggaggaggtggagatgaatggcgggcgcggcgaccgggagccggacccctgggaggtcggagcttgtcgagggatgcggctggcgctgcccggagcatggcgaccgcgtggctgagctcttctgtcgccgctgccgccgctgcgtgtgcgcgctttgcccggtgctgggcgcgcaccgtggccaccctgtgggcctggcgctggaggcagcggtgcacgtgcaggtggggacgatggggacggggttcgccgcgcgggagttgggggagccagcccaggcataacggccgaggagggggcgtgcctggccgtggccagtggcgggttacaacctggaaaccaaaggtgccccagagggcgtctaagcggtcgaccgaaagttcagagcgggagcctgagacccaaggaagggcaaaggcgagccaaagccatcagttgagcttcagaaaaggtgggtttaggagtgagaggttgggagcccaggctggtacccagatgtccttgaccgtgtccaccatggccgatccgccacactgccattgggctggaagacagtctgccttttagttaacagaggtacaaactctccctcttaataaacagccctgtgtagctcagaaagccacacagacatctcaggtttacttaatctgcagtccacagaaagggcctgtgaactttgagctgaggacggcctgactgccctgggagcagcctcagctgtcactacctacctcctctcccctccccggccacacagacactcccattcctgctcatagcagccctgggtgagccattattattacagccattttataggccacaagaggaaggctctggaggcaggggcaggccttgaacccaggactccattagccagatgcccccaacagggccattgtcaccgtggaacccttacccatgcataatcctaacagtgccccaggggctctgggctcctgctccagcttcccagctgactttttctgtggcttctctcaaatccttctctctctctgggtttcatgaagcctgggtgaggtaggccctcatgtctgacagctgttgatcctaccacttgtctccaagaagtcttctgtgatgaattcagccccatcgtgagcctttctccggtactgcatgactccagaccaccacactgtgacaaccttggaactccaaggtgaaaaggggatcatgggggacaatccagtggagtcgtgggctcaagacctgtccctgccaccagacccttcctttttttaacgtatgaaatggctgtaattataataatggctccttgaaaaactgttattcagaattaacaaggctgctttccacagatctggctc

SEQ ID NO: 16878 - DNA, 900 bp, Artificial sequence
  DNA replication origin
gacccacaaatcagccctcactctgcctgcctcagggacctggggcccagagtcagttcagccaacatcattggtgcccactctgagcctgatgccatgctgggcactgtaggggagatgcatgggcagacccagacagcgtcacttatgggggagctcagaggatgggggaggcccccatgtaaccagcaagctcaattcagggtcatcagggctaaagccagcgctgcaagttgcagcagggagatggaaatctgggaagtcagggagggcccccgggaggatacgactgagctgagctttcaaggccaagtagagcaagcccagcagaggagggaaggggaggcatggggtggaaggcgctgtgctaggtcatgcctgtctgtggtgtgcggagatggagccaggagcttgcagcgcgggggtggggaggctgggtctgagcaaatgcaggccagcaatggggctgccgctgggagaggtgctgggggcgcagtgctgaggagggggcacctgagacagtggggaggcatcaaagtgtgtaactgggggtgtgacatggtcagagccgaaatagacttaacccctgcaattaggaagtcaggacattgagcctgggaaacgatttctttcctcaactttgggctggtatcgaaggaagaaataagtgggtttcatttcatgtccagctccagtgggctggaggggttgcggaaccccatgaggaggagggagagaattctgaggccttccgtgcttggactcaggaggaaaagggtgtgactgccctgggacaagagtccccagatatgactgaaggcctgcctgctcctgcagatgctggaagccccacaccccacttctgagctcggcacccccaccccacttctgagctcagcc

SEQ ID NO: 16879 - DNA, 1709 bp, Artificial sequence
  DNA replication origin
aaatatgatcattttcatgataacaggctgccaggttgctctgcaaaattaaatgccacaggcgaatccctatagccttgccagcacagagtttcatctttttatttttatttttgctaattttacaggaataaatacagactgctttcatttattatatgttatgtgtttttttggagaaaaaaaggcactccaatcttggaatcaggatccctgggctcggttgctggtttgctgtgtgacctttgcccagtcacatcccctctggcgacaggggatgcctatctgtaaaatgagggggttgaatgagacgacgtctgaaggctcctttcagctcagacattccatgattccatggtgcatttaaaaagtattagcaattaaagtcatagcatgactttttaataaccagaatctgccatgctcctaaatcaggccaaaaaggcttgaattaggcaagcaggaaaacagggcccagattatacatgtgtcgagatgacaggagacccaggtagcacttaagcctgtgcgtcggagctgggctcatgggccagcacatatactttgcctgcttttacgaggggataataacactcatttgtggtccagctcccagtcctgtgcagctccaccatggccgcagggcaaggtcataggcactacttcagccctagaattccatagactttcagtccaaggtagctcacccccaggttctgcttgaatacctgtgatgacaaagagctcactacctgtccaggggcctcctgccctcttttggctgttaagaaaatccctgggtgcagggcaggtcatgaaggggacaagaaagaccaggaggctgagaagtgattcctagaaactgctccctcaaacagggcaggcatcagggaggtggagaagaggccccatggggcaggaaaggcctgcagaggggctccggctctcctcactccggacctctcagacggtccccaggaggggcaggaagctggggagacacattccagtcctgatgcacaggtgggttctgaacaagccccaggaaagcggaggccccacagcctgctccagggcagacacctcggctccctcttcttgccttggctccctgggatctgatgggagaaactgctgggcctggggctgctgggtctggagatgagcatatttaagggacctgaccactgccccagggtgagggaggaagggtcagaggttgtttgtgtgtccagagcaggaccagcaggagaggcagtgactgggtagcagattccagcttggtttacaactagtgagattcctatcacaaggagtgtgcaagggggcagcaagaccttccagaggggatcttacagaggggctgggccagatgccataggtcttctttacctagggagcctgggaccacagtccctcagacctgtgctctgccccatcccttaatgccacgcggacacagcaccttggcactgtcacccctctgaggtccaggcgtggccgccagtcaccccttgtcacaccagctagtgtgtgtcacaccttatcacacactagctctgggacacagagctaggcaccagcacctggcccgggtggggaaggggaaggagctatcctataccactctctaaatcgaggtgcctacgtggggctggtccaggcagtcgtgccgccaggagtccagccacctccaacctagggctcct

SEQ ID NO: 16880 - DNA, 1342 bp, Artificial sequence
  DNA replication origin
cacgtcccgcccgacgcccccatcgcgcagaccgggaaggcacggccggcggcgcagggccgccctaccttgatgactgccgcgcaggtggcggtggcggcggcggcgtccagctccggctccgcgctcctcgccgcccgccgactcccggcgcccagagccgccgccgcctccccctgcagcccggcgggcggggccggagggcggggcgggggcctggcccaaggtccgcccttttgcccgccccgcgggtccgccctggccacccttttccgcccccacgaccccgaccgcgctcctggctccccggggcgggtctcggggcgcgcacacgtgctgggaacaggcgcgcacacgccgcagtgattggggcgggctgccggccaccaggcggaggctggggacaggcagagccgcgggccccacgtcgcgccgtgccctcgctgcgtggtgtgggatgaggaacctgacctcccggagcctcagtttcccccgttgtgaaatggagacagtaaccgcgtcggcctcttaaggctgtttgagccctggatgtgacgatcccggccgggtacagtgcgcgcgccgagcccggccagggaagcgctcctttccccgagcagttacagcggttaccgaggcttccccgtccgcagggaggagaggagccgggagcgccgctgggaaccgaggaggacgcccttccttctctcgggaccagccgggggcgctgctgccagcctcgctggctggagagccctgaggacactagacaatggggaggccctacctttgggtaccacccccacctaacactactgagccacgcactcctctaagcgccttctgtgcattacctcgcttcactgtcacacaggcctatgaggttgataccattactcacctatttaacacaaaagagctgaggcacagagatattaagtacctaggttaagatcacccggctagtcatgcaaccccaggcagtatggctcccacggctactaagctaacagccactccactccacaccacgtctgtgaagagctcttggttttgttcagtagagacgggttatcttgagggccttgaactgctccgtggcacatagtaaccactcaatatatagttgtggagtggataacagagtacactgttactactttacatatctgtatcgtttcttctaagcttctaataatagtggctttatttagccactattattacctccattttacagataagaaaactgaggcttggagtggcaaggtacttagggagctcttgattctctccttagaatgtgactcagcttccatagtccactgtaccacccccctgc

SEQ ID NO: 16881 - DNA, 935 bp, Artificial sequence
  DNA replication origin
ccactgcagagcccagtgccccagtccagaggactctggcctatattaggagcagcggagtgatatgatgctgtacctgactcccagctagactggcccctggctccccgaggtgtctcctgggcaggaaaggacctgcccagagcagcttcaggattgtgtgtggactgactgggtaggaaggctgggcagggagggaggcagccctacgctggggctgcagatgacaggccctctcgctggcttccaggtggaccagcgggtgctccaggacctgctctcggagaagctgcccaggctgatggcccatctggggcagcaccacgtggatctctccctcgtcaccttcaactggttcctcgtggtctttgcggacagtctcattagcaacatcctccttcgggtctgggatgccttcctgtacgaggggacgaaggtagggtgcagccaggggatgggcagggggcccctgagcaagtcccttcacccatctgcgtcttgactctgcccctggagaatgggaagacaatgcttacttgtcagagctgttgaacgtctcctgagagcattgtcaactgcaaaatgctttgcatgtatgagaagtagtggttctgcctctgaagttgggggatttcctttccgtggagaggaggtgtgagcatgatcagagaggcacatccctatgctgtccttgccccctagtcacctgggccctccttttcttcctcctgtttggactaaaccttggattaagagatcggagctcaggtctggacccagctctgtactgaccttgcccagagaccttgggcaggtcccccaactcagccctagtttacacctcagtttacaaagcacccacagatttctcatttctttctttctttttttttttttttgagatggagccttgctctgtcaccaaggctgtagtg

SEQ ID NO: 16882 - DNA, 1349 bp, Artificial sequence
  DNA replication origin
aggcactcctaggccaggcaggaactatggggaagagggctgcccttgccagctcagggccacaatcaagtctaatttatggcagggctttccatcctctttcacatcacagcacacaatattagcacagcaccctggtgaccacagagcctgctcgtggctggcagtgcctggcctatccatgtgccccaaggcaggcggaggagagcactgtcgtggggcccttctacccagtcccgccacaccatgaccagggcacactgttggaagatctagattagtggtttagagaaaaggtttcaagaggagttaggcggacctgggttcaagtcacagttccactccccttcactcctgtgtaacgtggagcgggtcactcagccttacggagcctcgtttaatgtcccctaaaatggtgtggtgctggcgctcgtgtctgcggtggttgattgattgggtgaaatgggacagtgtatataacactcagcacagaatctggcccacagtgagcagttagtaaatgtgagggggtcagaggaagtacagatgacaggggtgggggcgatagcggaacaggaaagagtccaacacagatacctctaacacagactaagtcctcccgaaaaagacaggaaggaagatgttttgggcagtggatgtgggaggagcccagaggcctggaggaatggatgcgaacttcaccgtcctatgaagaagggtatcccagggcaaggaaaccccacaataagggcaccaggaggagagatgatggactgtgtcataggaggagagatgatggactgactcatggctgagactgggggatggggaacaaggctggacgggtatgggggggtcagatcatggagggggatgggagccaggatcatggggcccggatgtctttactgcagtctggggagtcactgaaggtcttggagcatggaattagcacggcgcggatgatcacttggaggcaacatagaggaggaatgggttgggaagagacaggagaccaggtcctgaccgagggcaagagcctggggcaggagggaaggcaaaggggagagaacttcacacaggtgcattcacctgcatgtgacaggcggctggatgttggagccagggtgggcattgaagaatgagaaaggctggagagacgccaggttctggtctcacctgggcagacagtgggctgctttctgagctagccaacccagaggaacagcaggtttaagggagaaggcaataaattcagactgggagaggctaggcaggagtagagggtgcccctggtgccccctctgggccagcccagagggcctggaagcagaggaccaaataggatc

SEQ ID NO: 16883 - DNA, 1480 bp, Artificial sequence
  DNA replication origin
gcaaacagtactgtgctttttacgcatgaggtttttgtggtagggttaatagcctttttgtttaatgccctttcacctcattcccatgttttcagtaataaaaaatggtggcaggccagggagtgggtgtccactgaacagagcagagtcaaactactcttagaaacatggccctcagaccccagcagcacaatgtagaaatccttgaattcaccctcttttgcaataattttgattccagttaattcattcgcttgcatgaattaacttctactaccaactccttgagggtagggtctttctgagatttatctctgttttcagtttctagcacatggcctggactataattgaagttagtgaacagatacatcagagagacttttatcatccctgtcccctacttcttgaatgtctcctcagggttttacacataatagatacacaggaaggctggttgaatgtatgggcagatgggtagagtggtggagacatgggttgggggatgggtggaggggtgggaatgtgagtagatagttggatggctgagtggaaggagtgaatggcgaatgagtgatgaatatgtgggtaggtgtatagatatagatggatggatggatggatggatggatggatggatggatggatggataggtagatggatatagatggagggataacgtgtgggtaggtaaatatggatggataaatgggtggatggatggatggatggatggatagatgtgtggacaggtggatggatacagatgggtggatggatgaatggatacgtgggtaggtggatagatgtggatggatggttggataaatgaatgagtatgtgggtagatggatgcatgggtgaatgaatgaatggatgagcatttaggtagatggatggatgggtatgtgggtggtgggtaggtggatggatggataggtgcatagatagatggacggatggatggatagatgtgtggacagcggatggatacagatgggtggatggatggacgtgtgggtaggtcaatagctataggtgcatggatggataaatggatgagtatgtaggtggatggatggatggatggatatatgggtggatgggtgggtggatggatggatggatagttatgtgaatagatatatgcacagatggatgtgtgggtagatggatggattaacaggaagatggcaggtgggcagataagaggacagacatagatgaatgagtggatgagtttgtgggtggatggatggatgaaaggatagatgtgtagataggtggatggatatagaggagtggatgtgtgtatggatgtgtgggtaggtggatggatatagatgaatggatggatagatggatgattatgtgagtagattgatggacaggtgggtgggtggatggatggagggatggatggatagacggtggttgtattgatagatgatagcaggtggatagctaggcaggtttgtg

SEQ ID NO: 16884 - DNA, 1289 bp, Artificial sequence
  DNA replication origin
ggctggagcgcgcggagcgggtctggaggagcgatcgctggccgcgcaaggtcgggtttgcgagtttttccggaccgagcgagcccctgtgctccgaccgcagcgtctgagacgcggcctgaagggggcagtgatttcctgtgcagtacgctcggttggcgcctcttccatcgcgcggaacggggccgaggcgctgggcttgatcctggcttcctgggactctccgggcgcttctgctggagtccaggtgcagaacccttttgggaggagggtcgcgctactgctctggtggtgcaatctgggcttcccctcctccttggtcggaccctctttatgtccccagagaaagagcagaatctagattgtatcttattccctgcctcccccgcttcaccggtgaaccagcttgctctgcgctgtaaataaaaggtgaaggaaccggtggcagttggcagcggtacgcgcaggctgctgcaggcggagaggcgtcctctgccccagaggatgcaagctggctggctgtgcagggctaacccggtgtgaaatcatttccgaatgacattcctatcgccctcgtctttgcctgagcatctcaagttctgtgggggtacttgtctggcacacataaatggagacagcaatgcagttacacggaggcatatcttcttgacagtttctctgttgctactgcacatattcttctggaggggtcactgcaaagccggtcttttggggacaaacacatttttagatagggcagccctgcttgcatcatcaccaagtattgtcagctgcataatgttttcatcatcagtttcttccctttagaaagcttccctgaaagagatttcatactggcctgtttgtggcagcaaagagatgggtgcttcgtttcagggtgtgggttgaagcctttacattttatttttcgagtgtgtcttgatgactttctgagtgaaaggacccaaagtcaagaggatgagacagtcagaagactcttcaattcgtgggaatatttagaaaacagtgggaaggaagacagaagataattttagcttcgtgcaaacagagaagtgtctctagccttttgaaggggcccagagccagggctttggggtaggtggggcctgggttttagtgagaaactggttactttccaccctggatgaccttgagctgggtatttaatctctctaagcctaggtgggaatattatgtgtactctgcaggtgacacacagcttaaggaagataacaggccagggtagaagatgccctgagctggcaggc

SEQ ID NO: 16885 - DNA, 1056 bp, Artificial sequence
  DNA replication origin
ggtgcggggcggccgcgctggagagaggcgcgcgcggagacgccggcccccctctccgcgtttgctcgcttgctccccgcctcccgcactccgctcgctcccaccccttcccggcgtgattgatccgtcacgggcgccgccgctgccgccgccgccgccgcggccgttctgagccgagccggaaccctagcccgagacggagccggggcccgggccggcgccattgcgcgggcgccgcgggaagaccttggcgcggggcggcgggccgggccaggccatgcgggccgagtgagccggcgcccgcagcccgcggcgcggcatggcttccccgcggagctccgggcagcccgggccgccgccgccgccgccaccgccgcccgcgcgcctgctactgctactgctgctgccgctgctgctgcctctggcgcccggggcctggggctgggcgcggggcgccccccggccgccgcccagcagcccgccgctctccatcatgggcctcatgccgctcaccaaggaggtggccaagggcagcatcgggcgcggtgtgctccccgccgtggaactggccatcgagcagatccgcaacgagtcactcctgcgcccctacttcctcgacctgcggctctatgacacggaggtgagtgtccggctgcccctgccgtcggggcttcggggggcattggggtgggtggtttggacacaggcaacctccggcctttggtcagatccccgattgaccggcccgcgcctgccgagggcagagagggctggtgcccagtgttcacccccgcggtcctgctgggcttggctggcacagctggtaacatttgccaagcaccccctcctctggtcttatgtgtgtatgtgtgtgtggggaggggtgggggtgggatagaagactggggtctcttttgaccagagaaaaaggagtggagaaggtgggggctggacccccaaaggcctacattgattgtccctgtccaggtcccgctcatggggctgcgaggtaccgagtgggaggaacaggcgcattgactgcaaactgggccaccc

SEQ ID NO: 16886 - DNA, 863 bp, Artificial sequence
  DNA replication origin
gccgggaaggggtgggagcgagcggagtgcgggaggcggggagcaagcgagcaaacgcggagaggggggccggcgtctccgcgcgcgcctctctccagcgcggccgccccgcaccgggccgcctccgcccgcccccgtgcgcgctctgaaccgctctcccgccgggagctgctaggcggcagcccctggagctcggccgggggagggcggacggcaggaaacgcgggaggcgaaggcgaggctgctcaggggcggctcgggccgcctccagggacggggacgagccgtgcgcgccgggggagggggaggcgctggcgctgcggcggccgcggggagggccaccttcccagcacacgcacacacgcgcccccggccctccgctgcgccagctgccgctgcccgccgaccgctgacctccaggcaccagagcgcccggggacagcgatctgggaaccgggaccgcgcgctggcacacgcagtggccgccgccgctccgccgagcgctgcctgtagcacctgcacggtggtttggaaccgcttctcggaggtctggccgggaaggtctgggcaggagaatgttccacgaaggcgtcccagaggcatctgcagcctacgctctcccgttcttttctggcgcccacgagcccctgaccgagtcccgggggtcgctgaagacgcccacgggtgctcgaacgcccgttggtgccaggctgcccggcctttagggccttggctgaggacacccctttcctccccaccagacggagcgaccgccctttgccaaccccaagcaaagctggggtcccaaccttacgtgcgctaccgccccctccaggcatttgacctccccgcgtccccattct

SEQ ID NO: 16887 - DNA, 828 bp, Artificial sequence
  DNA replication origin
ctccgccgagcgctgcctgtagcacctgcacggtggtttggaaccgcttctcggaggtctggccgggaaggtctgggcaggagaatgttccacgaaggcgtcccagaggcatctgcagcctacgctctcccgttcttttctggcgcccacgagcccctgaccgagtcccgggggtcgctgaagacgcccacgggtgctcgaacgcccgttggtgccaggctgcccggcctttagggccttggctgaggacacccctttcctccccaccagacggagcgaccgccctttgccaaccccaagcaaagctggggtcccaaccttacgtgcgctaccgccccctccaggcatttgacctccccgcgtccccattcttgatgggccccgccctagaagtctcccggggtgggagcactatcctcaggccagggcggggccgcgcgcccctggacttggccctctctctgccaggtcgcactggccaatcttagccaaagcagtcccgagccagatgtacccgagtgagctgacctaagaccttgggttccttgtgcctctgcatacttcaagaataggaaacgtgatcattaatctataaagtcccaggggctgattaatgcgaggaacacagtaggacatcaaatcacaaaacatacttgagcctgaaccagggactgtggaagatatcgacgaccttgtaacaagaatggaagtttgaccttcgctgagtacttactgtgtgccttatgatgtaatccccacaactgccctgtaagcatactgtgttactcacccttactttacaggcgaatacactggtgctcagagagg

SEQ ID NO: 16888 - DNA, 1439 bp, Artificial sequence
  DNA replication origin
ccgggggccacgaaccgctggtgcgcttcctgctgcgccgcggtgcctcggtcaacagccgcaaccactacggctggagcgcgctcatgcaggcggccaggtgaggcggcggggcccgggggcccgggaccagagtggtgcccggcgctggcccgagacgcggtccccggcggccggatgccccgggaggtgaagagttaaggactccttagagttggaatggtaaactttgagtagtcttttgtaaactttgagcatagacgtggaaacacttttgaattaacataaaatcagattcttagaaattttggcctttcagaatagaatctggagacagcgaatagaattgtagagacttagaaccttagagatttaattcatttcttattgcagtaagagtttcctcagaacctgccttcccttcctggcttggcgttgagggtgctgcgagacccaggcagagtccccacccagggcattggtgggcaggccaggcaaaggaacgagcttgaccggaaaggtttgagtagctgtggggcaggtgacccattttggagacgtgggggaaggtttctggtagaaaagatgtttatatccacgtggagacctgcggatacctgagaattagccaggacattacaagtgggctgtgggaaggcatgatgggaggcccatgcaaaggcttgggtgcacgagctggtaggactggtagaatgaggtatgcgtagaatgtatgagtagaatgatgtactagtcctccctggagagaaggcagatgccagggagttgggggagtgtgggagctgagaaacgctagctatcctagggtgctagggagtcatggaaggtgctagggagtcatggaaggttctaggcagaatgagtgacaggatgagagttacgttttggaaaaattactttccttgaagtgtgagaatagattagatactctagggtaagctagagtcaaaaaggctggttaggtagagtttgctgcagtctgagtgagaggtgatggtggcctagaccagaatggagacagcggagggagggcacccagatgaatttgtgatatattcagggagtagatcagcaggagttgacgactggcccttggggaggggttaagagagacagcaaggatggcatctagagatctggcttctgtgaagcctgccatgatatctccctgttctctggtccctccgcagcagaaaggcctctgtggtagcatccatcacaccatgttaatgctgactggcttcctcagtacccaaacctggccacacatcagaatcaccaggatgcttgtctaagtgcagattcctgagttccttttctggagattgtgatttagaaggcccagggcagtgaggggagtaagagacagggactctgtgtgagaagaggctccccagtgattctcttgtatggtaggt

SEQ ID NO: 16889 - DNA, 1260 bp, Artificial sequence
  DNA replication origin
agcaagggtatggaatcaacctaagtgcccatcaacagtagattggataaagaacatgtggtacagagccagatgtgatggctcacacctgtaatcctggcactttgggaggccacagcaggtgaatcacttgagctcaggactttgagaccagccggacaacatggtaaaaccctttctcaaccaaaaatacaaaaaattagccgggtgtggtggcacttgcctgcagtcctagctactcggtaggctgaggtgggaggattgcttgagcctgggaggcagaggttgtggtgagtagagattgcaccattgcactccagcctggatgacagagcaagaccctgtcaaaagagagagagagagagagagagagagggagaaagggagggagggagggaggaaggaagggggatagggagggagggagggaagagagggaaggaatgaaagaaatgtggtgcatatacacgatagaatatgatggaatactacggaatactatgcagccataagaatgaacgaaatcatgccctttgcagcaacatggataaagctggaggccattatcctaagcgacctaaaaagaacagaaaaccaaatactgcatgttctcacttataagtgggagctaaacattgagtacacatggacacaaagatgggaacaacaaacgctggggatcgctaggccagggagggatggaggggactctgggctgaagaacctcttggtgggtattatgcttactgcctgggtgacgggatcgttgggaccacaagcttcagcgtcgcgcaatttacccatgtaacaatttacccatgtaacaaacctgtaccctttaatctataataatagttgaaataaaaggtgggggagagagagagaacaggaggcgcttttagccccagcagcctggcccagatgaaggagcgacattaagggcaccgcaggacactgtgaggaaacaatccgttcgttccttaattcagccgcttccttattctagaagggcaggttcagtgccaggggctgcggtggggtcagcggagcccgctagtaaagtcaaggcccacgcagctgcggactcagacccgggcccagggccctgaccacagcgtgaagaggggatggcgtggccgctcccacctctgccctgacaggaagtttctggagccccgggacagggcggcgagagggcgccgaagaggcaaaagggaacacgcgggtctgcggcgggcgctcctctgagcgtccctggac

SEQ ID NO: 16890 - DNA, 1315 bp, Artificial sequence
  DNA replication origin
atctggtgcagccgcacgctctcctcctgcagccgcagctcctcgccctgcagctgcagccgcaccgcctcgccccgcgcgcccagcgcgttcgccggcaccggcggccgcggcatgaccggctcgcgccgcccggggcgcggggtgcgcgggggtcccggctcggcagccccggccccggccccacgctgcgcccgcagcaccgagcccagcccggccaacgccagtagcgccaggagcaccaacagcgcctcccggccgcgccgcagttcccgcgggcagcgccgccgcgccgtgcgcccccacatgcgcccgccaactgcagccagcgatctgcgcgccccaaggcggcggtggaggccaggacccggatcccggaaccgccgtgccgccccgcccccggcccgccccacctgcgcgccgccccctttccgtccagccccgcgccagcccaagcgcagcccccggggtggctcatttcggcagggtcttcaagtgggctggctgagacttgcatcttccttcttgggctatggtgcattattaaagagatagtggtggtaaaacccttagcgcctggcatattgtaggcgctaagtgttggctgaatacaccctgcagggtgttatgaattctactgccattatctcatctgatctttacacagtccaataaaacaaccatcaactaggattacgagctcccttttacagatgaggagatggaggtgcgatgagatcaacagacaccacgctgccccactgacttctgcaggcccagcctctgccatactctttggagtccttgaatagcaaaccctcgcctggctcgcctcgtgatagctctgtgacctctgaggctaggagcaaaaggccatgaaggctgtacatgatagttcacacctgtaatcccaggccgagataggaggatcacttgaagccaggagcttaaaacgagactggtcaacatagcaagactcccatctctacagaaaaatttcagaattagccatgcatggtggcacgtgcctatagtgccagctactcaggatgctgaagcaggaggattgtgtgagcccaggaattggaggttaccgtgaactatgcgccactgcgctgcagcctggatgacaaagcgagatcctgtttctattaaacaacaaccaaaaaaggccatgaagctgccgccctgttcatgagatcactgctgtgggagccttgagctgccagggacgaagtaagtctaatggagtagacaaatattaaaaagataattagaattgtgttaagtattttgaagaagaattacagggcgc

SEQ ID NO: 16891 - DNA, 1784 bp, Artificial sequence
  DNA replication origin
gcaggtggggcgggccgggggcggggcggcacggcggttccgggatccgggtcctggcctccaccgccgccttggggcgcgcagatcgctggctgcagttggcgggcgcatgtgggggcgcacggcgcggcggcgctgcccgcgggaactgcggcgcggccgggaggcgctgttggtgctcctggcgctactggcgttggccgggctgggctcggtgctgcgggcgcagcgtggggccggggccggggctgccgagccgggacccccgcgcaccccgcgccccgggcggcgcgagccggtcatgccgcggccgccggtgccggcgaacgcgctgggcgcgcggggcgaggcggtgcggctgcagctgcagggcgaggagctgcggctgcaggaggagagcgtgcggctgcaccagattaacatctacctcagcgaccgcatctcactgcaccgccgcctgcccgagcgctggaacccgctgtgagtgcacagctctggggaggaagcccgccctcagagccccgggcctcagtttctccatcagagcagtggcagggcggggagctggggtctccaggatggcgcgtcttattgagtctttctccgaagacgatagtgtaagagctcacatgggggcggggaggcaagaaagtaaaaaagacgaaagtagaaaaaaaattaccagaaattggcaagtctgttagtgatctcttagctcccttctccttgagaagttatcatctccctgaaaaggtgagggtcagggctaagcagaagggtttaaggcgaggaccccccagcacccaaaggacaaccccgctctgcccgcctcgcagtgcctccgcgaaactgacaactcctccgggcggtgaccggctccattcattctctgtgtgtgccagggcctaagggacaaacaagatgcgagggagcgccccacaggtgaagcgaaagatggctgtaaggccccctcagcgctagaaagcctccttgtgctctccctgggcattggatttctgagctttgggtggaggaaggcgggaaggggcacggggtgggaagggctccttctggccgtgatccaccccagctcactcctgtgggtggtgctggactggagccagcgtggtcagaggcctagttcctgttggagctactggctgggcaggttgcgcccctgcctaggtggggatccagggcacacgctggcagcaggaggaaggacaggtggctgctgccacctttgccgctgggcctcccgggctctcactttttcttcgaagtgtcagggatcttccaagtccttttttgagccccttccttacagactttgaggaaaagaggactcagagagggggttcccattggagctggtggtggcagcctgccgtgtgcaccaggcacctgccactcctctccccttcaagccattcctgctttacaggtgtggaaataggttcggaaaggataggtgacccacccaaggcccctcagctggaatgtggtaggactggtctggagggactatggcccttctggcccacttggcaccatgctgatctcaggattttaggggcctgctccatggtaccttggccagagagaccatgaatgatggaatgaggatgccccacctctgccccactgtttccactgtcttccctgttttggggatctcctcatgcctagcctcatgcttctgcctgaggcatttttcactgttagtctttttgaataaaactttgttgggattgatagtagttcctccactcaccagcctaacg

SEQ ID NO: 16892 - DNA, 1263 bp, Artificial sequence
  DNA replication origin
gcaagatgtgcccgagggagaaaaggtgaggcgggcaagagtattggaggggcccgggacgcgaggaagcagagaagcgggtcttaccttggtgccatctcgcgggtctgcggagccccggaaggcgcgcggctagtcgagcagagcgttggagcttagcggaggacgaagggtcgctgagcgctggccgccgcgctcgcccttcctgcagggaacaaaggcggcgctcggcagcggcggcggcgggcagaatcccggctcccggcccgcgccccgagtcacccgcgctctgaaacccgactccgccgcgccctgcgctcccccgcgcgctgcgcactcacgcccgggggataccggccgccccggccgcctccccacgcccctttccccctcgacggacgtgcgctcgcctctgctgcctccacccgcggctgccttatgtaacctgcgaggaaagccccgcgcccgcgttcgttggggcaagcgggatgggctccctcccgcccttaagtctgtcctgtcggggctgacccgcaagaaagcactctttcacagccgctgagggaatcctctccacagcccaggaaggctggaatcagtgatttccttatatgatggacaaggagactgaggctcagagaggtggagcgtatgtcccaaagtcccaagctgcactgagctcctagatgctgtgacccaccctgcacgcctgacacatggaccgacttgaatgcccaggagtggacctgcctgggggccataagggatacatacaactaaatgcagcagagataatcctaataaaagtttttaatgtactggattccagggctttcctccctatgtataccttgcctgcccccttcatcagaatgtaagctccaggagggcttatctgtgctttgttccctgcctaaaacagctcaggtagtaggagatgccaataaacgctggatgaatgaaggagcacagtcttgggtgaggcatcacaccaggccctgtgatgagatgtgggggtcatgaaccaggctctgcctccgaaagccctcagtgggagtgaggcggttcagggcagactaacccatctgtgcagagcttatcgcagggcactgggtaaaccctcaatggtcgctttttattaagattaccacccggcacatagtgtgagatcttggagtgagaagaggcaccgctgaagttggctgagacctggacagctctgaagccaggtaaacactagaaacctctcttcctgaagcacca

SEQ ID NO: 16893 - DNA, 984 bp, Artificial sequence
  DNA replication origin
caatttcacaggcatcaggtaatctccccatgctaaaacaaggaaatggcacccgttctaccagctcctgcccatctcctacctctaggctgtgtaagaaaccatacaggactcattttggggttgagtgcctggagagcaagaattcctttggaaagaattttcagtgtactgcggttcttctcctcccctctactcactccaaaccatttggtgagctgggtatgtatttcctggaatttgggaggctcagggactggtgtctgattttctccagggagacaaaaggtgaaaggagggagccctttagattcagagttgggagagagggacaaaggaagagaggggaaggggagaggagaggagggggaggtgagggagaaagagaaaaggagggaagtgggaagaggaggggaggggagaaaaggggagaggagaggagaggagaggaagggagggaataaaaggagagaggagggaaggaggaggtgagagggaaaggggagaggaggggagggggatggagaagggaggggtatttgtcctgcagttgttttgctggagatagacaagataaaatctctccaaagggagctggctgaaatgggctgtactcaaagagccacgcagaagatctgggcaacctgtatggggtggaagcccgggcagaagttacaaggcaaactatggaattttgatcctaggtcccctgcaggaagacctcccaggaaccacaaaagcccccataagagagagttccaacaatcaggcatcttccacaccaaaagcccagatcacaatttgaccagccaagtacaactgtgtccatttctccaggtgggccagcccctgcagatgttaaaaatagctctagaggatggggagatcatgaggataaggaggagagagaagtaagaaaatagagaggaaacccctaaccatgcttccctttcctggcagtttcctagtctacagtaggcctga

SEQ ID NO: 16894 - DNA, 1322 bp, Artificial sequence
  DNA replication origin
ggtgcccatcagcactgctggagaagcagaggccagcagtgtgcccaccgggggaccaaccctctctatgtccacggagaacccagaggaaggggtcactccagtaagtagctcagagcgcaagctccccttcacctgtgtctggggttgtgggttgtgttgggtgggagcagtcactggctttccctatgtgtctgtgaaacacagtgacagtctcatgggggcagtctgtcggagtaagcactaaatagcattgacccattcagtggcggtgtgcagagccctacactgtgctgggcactaggcctggtttcagggatggatagtaaataggatagacgtgattcctgaagacagggtggtaagaggggctgtggtcagtggtaggtgaagcacaggatgccctgggagcactgaaaaaggggcccagagcccagactcgggggcacagaagtttcctggggaaaggatgctgaaggcgggcctgagagggtaagtagaagtcgcctagcagagggggtggaacaggtgtttcagcaaggtgggctggcaggagcaaaggcctgaagcctgaagaagggcagcatacctgtggggtcaagcgtgagccaggggtcggggagaaatggctggagaggctctaaggacacagagaagattcagcagaagtggggagtcactgaagggtaagaaacaaggaatggatgtagccagattagaattccagaaagatcactctgactactgagaggagaaagggtggggaagcaaacttggagaaagaggccgggcttgggggctgtgttggagtttgggtgagtggtggtgccagcctgccctgggatgtggccaacaatgtcagatcctcccagaagtcccagtgagcaaggggctgagaaacatccattgaatttgtccattcacggtgagtggccttggggagagcagcttcagggctatcggagcggtggaagccagatggcactgggctaggaagagagtgggacagggagtggtccacgagggtagactactgcttcaacaagaaagctgtggagtctgaggacctagacttttgtttcaacacagtgacttaagcaccagtagaagctgcactctctgattaggggacacagcttggaagggctattggtgagcacatgcccctcggggttggcagggagtggctggtggcacaccacacgggtgggatgctggggtggtctcgcagcatgagtggtgtgaggaaccaggcttccatatttctgtctgatgtctcactgtgggtttccatgtgaagtgaggtcttggtgtgcaggtgc

SEQ ID NO: 16895 - DNA, 976 bp, Artificial sequence
  DNA replication origin
gaaggaagccttcacaggtggggaaaatgctcacccagtgactctaaagtagtgcacaaattggcattaatcagaaccattctgattcctgctatcaaggtttatttaattctaagctcaaatgacacagaaaataaaatttcctccttaaaaggttctgcggaaaaatattctctgttctacgtaacagcctccttggctgtgtttgtgtctgaagaaaggactagtctgacaggaagaattacaaatctggagctcattttggcgtcgcagagggaaggtgggtggagcgtctcgcagtaaattaggaattcagaatgaaaacgtagagtttatttgggtttttagtgacacctcaggattattatacagcagtgtcagacacagctcaaagtaatgatgactgctccccctccgccccgcgggagctgggtgctaagaagggggaacccctcctttgaggggttggggtggggatcctccctttccaacctggatcgggaaggggtttgagaggagtgcggcttggatccccatcctggatctgtgctggagggaggcgggaggctatttgggggtgtgtttgggctcaggatctgggtctgacgctgggatctgaggactttctgggtttggaactgggtgggggagctgggtttggggtgaccgctgggagcaggaggaaataggagagtgagtcgcatgtgaagggcactgaggagggatcttcgggggaatgctgaagttgatgcgtggacttggagaggggaagttgaagtggatgcaggggcctggcgctgcagcggatctgggtggcatgtgctgggattgccaatgcggagctgtgaatggggtcagggtggggctgaggcagtaccagatcttccgcgcctagaggaggttagaagaaaagagcgtcgaacggccacagcctttttccgaaagagactcacacagacacacccatcgctctacc

SEQ ID NO: 16896 - DNA, 981 bp, Artificial sequence
  DNA replication origin
cgcggggccgggggcgcaggtggcggcgccggggcccgggccgggctctcgtggcgccgcgcggctcggcggctgccgggcgaaccgcaagcggggagcggaggcggggcaggggcgtgtgtccgggcgcgggcggacgtgtccggctgcccgaggccgccccgctcgggactccccggggaggtggagtcgggcggagtcgtccgaggtccggggctgccctctggggtgtgagtgggcgagggccaggggcggagagtgcgaggccggcggggactggcagagccgtggctgcccgccgccgccccctgggcacggcgtgaccttgttctggggacccccgccccaagagggtccgtgccagaggctgccgaacccggggcggggtttgaggttggggtggaaggcggctcccgggcggggtgtgagctccgagcctctagggcttcgtccagtgggagtcgggggcgacgtgtggtgagacccctgggtccgcaggccgccctgactcccgcccggctcgacccgagccgaccctgctggaaggggctgctcctccagccaggggggctttgtgtgagaagaaggaagcgcggagatgcgcggaatgtttcttctttcgtgcgtctggggagtgttgaagtgagtccagtaaccagacggctacggattgttttcatagtggaaacttgaacgtttgctcattctgcgggttttggaaattttgggaacgactgtgaattgattaaacgctttttatttcctcgaaggaacatcactcacgttgttccttttcttgagtgacagttaatagtttgattcagacatctgtatagctggttttcaaggaagactgttggctggatttttcaaaatagtaaatcaggttggggtaggtggttggtatccacaaagggatgagtgaaaaacttcgttagcagctgaactgagacactagaagctaaaatacacagcctcagt

SEQ ID NO: 16897 - DNA, 1826 bp, Artificial sequence
  DNA replication origin
ggatacattgctgaggcttagatcttctaagaacagcaaaacattgtggtgaggattgaatagcgtatcaataatgcctggcatctaccaggtgcctaaaaaatgccttgttaaaaaaaaaagtaaataaagaaaactatttcacctgggctgggctttgtgtttctgaggtctgagctttctctgatagattcacaagcacacctgtgggagaaaagcaggccatcccaaagtttagtggggttgaagaggtaagtagtctgacccccagtagattcaagaggaggtgattgcagatttcacaatgggtagatgactgaaccagctgtggcattgcatctttggggctatagggcatgagagtacgtgaaaagactgggtactaaaagttatggcctttccttaaaggccagtttcggcttttagacactgggcaagcaagactcttctgcaggaaatagtagcagcactagacagctggtgggatgcatggtatggatcatgctggcactggatggatggtagagactctggatggatggtggggacactgcatagtggggtatactagtagatagaaggggcactggatgggtggtaggggcactgcacagtgggggatactagacagatggagggggcactggataaatgtggggggcactggatggatggtggggtcactggatggacgatgggatcactggatggacgatggggtcactggatggaaggtggggtcactgggtggacggtgaagtcactggatggatggtggggtcactggatggatggtggggtcactggatggatggtgaggtcactggatggatggtggggtcactggatggatgatgaagtcactggatggatggtggggtcactgaatggatggtgaagtcactggatggatgttggggtcactggatggatggtggggttactagatggatggtgagagcaccggaaggatggtgagagcactagatgaacaatgggggttactggatggatggtgggatcactggatggaaggtgaggggcacttggtgaatggtgggagtcactgggtagatagcagggcactatataatgggggatactggataaatgaagggggcactgaatgggtatggggggtattgtatggacagcggagtcactggatggatggtggggacacttggtggatggggagtcactggatggaaggttggggcactggatagatggtgagaacactagatggatgaacggggggatggatggaaggtgaggagtactagatgaatggcaagggtcactggatggatggtaggggcactgcatagtgggggatgctgattaaatggagggggcactgaatgggtgtcgggggcactggatgggcagtgaggtccctggatcaatggttggggcactggatgcatggcgggggactaacttcagtgtccgtgcaggagtagggacagtcatggtcactccagctgagagctgtagggggcttttcctgcctaacaacattttcaaaatgtgtaagcccttgaggtttttgtacgatctgggggaggggagggagtcatgagagtaagatagtgctctcctctgcctttggtggatgggaccaggaaacagttctaatttagtttgcaaaataaatgaaggaggtcttccttgcatccttggaatatggagctctttggactgccaaggtcatctttgcttctccctggccctttctctcatcagtgctctctcttcgccttcctctcagcctcacacctcagtacactccctcttcctcctcctccctgcagactgcaggc

SEQ ID NO: 16898 - DNA, 1463 bp, Artificial sequence
  DNA replication origin
tcccagtgcctagcacaaaggagctgcttcattagcatgtgtggtgcttgaaataagccacagaacagacactttgcagtgcgccaattgagttaaattgtggacctgcagactggaagtagtcacagccccttagagggttagcgatgtcagattgttcccttttcaatcatataagctggttcttgtttttttgcacagttccatcccgtttggggggatgaagtcaaacatgagtgaccccctactttcacacagagtgaaaatgtgtgtgaaaatcaagtcataaactcatactctaaaaggagttgtttccgggtttctgttttccaacactttaaatcccctatcataccaggccctctggctgggctaggggaattctgcaaaccccaataagcgattatccatgtgatgttatggtccctaccccagctatggaccacaccctagctcacacccctacccaggctttcatggagggcctgagaggtggctggaaaatcagggattggggtacagtgagaggtggctggggaatcggggattggggtacggtgagaggtggctggaaattggggatggggtacagtgagaggtggctggggaatcggggatgggggcacagtgagaggtggctggggaatcggggattggggcgcaatgagaggtggctgggaaatcggggattggagcgcagtgagaggtggctggagaatcagggattggagcgcagtgagaggtggctggagaatcagggattggggcgcagtgagaggtggctggagaatgggggattggggcgcagtgagaggtggctggagaatcggggattggggcgcagtgagaggtggctggagaatgggggattggggcgcagtgagaggtggctggagaatgggggattggggcacagtgagaggtggctggaaatcggggatgggggcacagtgagaggtggctggagaattggggattgggcacagtgagaagtcgctggagactcggggatagggacacagtgacaggtggctggagtattggagattggggtgcagtgagaggtggctgggaaatcggggatgggggcaaagtgagaggtggctggggaattggggattgggacacagtgagaggtggctggagaatcggggatgggggcacagagagaggcggctggggaatcggggatgggggcacagtgagaggtggctggaaattggggatgggggcgcagcgagaggtggctggggaatcggggatgggggcgcagtgagaggtggctggaaaatcagggatgggggcacagtgagaggtggctggaaatcggggattggtgcacaagctacaggagcatccacggagaaaacctgtgccaagggaaaaaacaacataaaataatttctattttatataaaattgggggaaagggttaaaataaatttatatgcaagcatagacaa

SEQ ID NO: 16899 - DNA, 1296 bp, Artificial sequence
  DNA replication origin
ggagcattaaccttgagtatgcctttggctccagccacctttttaagagtaaattgctgggcaggtgggggaggtctagtcaccgaacgaaactgtaagccggaccaggtgtgaggaggggaggtgataaaaagattatagggtggaggagcagaggctgaggaagaattgggacctagctcggcctggcgaggagcagcctggggaggaagggagaggtcagatgggtctgtaggaaaggaagattagaaagactcagtgacgcttggggttggtactgaggggacaggtgggagggaaagaaggaagatttgggatgagttgcactgggcacagagactaggaagggactgatgtgtaaaagaatgcctggatgtcaggcacctcagaccatttgcctattttacgacaagattatttagattttgcaggatggaaaaattcaaagtgccattttctggctatttggaactactgtcgagtttgtattggggtcaagcggcattgcagaagaaaataaggcatttaggttttaggtcaggtgtgagttgaagaggttttaagtttttgagaacacaggccaagggagtagatggaggaatggagggtggaaggttgcccacagtgaaggaagcaatcctagagaaaagagagagtagagaaacaaagggaaggagttcgggggttcttaccttccagaaaagtgggaagaggggttgggtcacagagataagaggtcggggtgcggaaataagggattggggtgcagatatataagaggttggggcgcggaaataagggattggggcgcagagatatgaggtcggggcatggaaataagggattgggacacagagataagaggtcggggtgtggaaataagggattggggcacagagataagaggtcagggtgcggaaataagggattggggtgcagagataagaggttggagtgcagaaataagggattggggcacagagataagaggtcagggtgcggaaataagggattggggtgcagagataagaggttggagtgcagaaataagggattggggcacagagataagaggttggggcatggaaataagggattggggcacagagataagaagttgggacatggaaataagggattgggggttcttgccccgtagaaaagcgggacttgccactaagggtgaaggagaaggggttgggggtacttgcccctctcccagaaaagcgggacttgccgctaagggtgaaggagaaggggttgaggggtacttgcccctgccccagaaaagcggga

SEQ ID NO: 16900 - DNA, 900 bp, Artificial sequence
  DNA replication origin
ccgcgccaggatccggccgaaccaaatatagtcgggcctggctatttttagccgggtctcgggcgcgagcccgccgcgtgagggggcgccctgaccccgccgggagtgcggagggggcgggggcggagtcgccatcttggactcggttcgaccaggtctggtgaccggcgacgaggggccgggctcggcgccgggggtcggggtgagtgggtgcgagccgtgggagagagggggggcgctggcggctctcttcgtccggcgcgggctgtgagaagtgagcagggcgaggcgcgggcgacagcggggcgcgaggcccgtgcatgtgtgtgcgcacggaggtggggagacggtgatccccgcccgccctgcggaaggcccggcggttctaccacccggcagctcggccagccccgagtcgcgtgggggcggagctgcccgcggccaccacttcctgagtgccggggatacccttcccggacgtcacggaggagccgaggcggcggtggcggcccggggctcatcctgcacttgcatcacgggtgcagcagcagctgctctgctcctttgtggctttttgccccgttgagtaactgctttgttaactgaaaataccatgacgggccagtgtgatcaccagctccagatctcaaagaaagtgaagctgtcaggcaagaagagggagactcccccagccggctgcgatggtatctggtgggtggatgtgtagagaagcacttgacagtttccacgtattacttcttgcctaactcttcacccccaagaagatttaaaaatacttttatttccatgctgtaaaaatttcatttgtgttctgcacctccctcacccccctaatcctccttcaattaaaactctcatgtagaactggaatcactgtaa

SEQ ID NO: 16901 - DNA, 805 bp, Artificial sequence
  DNA replication origin
ttcagatcagaacctacgggccgctgggctagcaaagccggagccgggcggcaaggtcaggggagggaaccccacactcaaagttgtcaatttcaggagcgacgcttcccagcaagccaacttttttagcaagtccccttattaactgggcgaatctcatacgtacttgagtgctgtggcggttccgtctttagagcgagtttctagagagctgtcccgaaatctgcactgggggggagtcacagctgctgtcccggaagggctgcggtgtacaagcccagcggctcccggaggcggtgagcggctggtgggggatgctgcgatcccgactcatgggagagcacagccgagaggttccgcgggcgtcctggcttgggctgtgaccaggggggaggatgccgccgctgttcccacctccacggccactgccggcaccgtcagcgttgcaaagtgagcccgggaggggcgtccagctgcggcgccgcgctgcaccggcaagggctcagggcaagaggggtgtgagcgcgcgggagagcgaagtgtgtgtgcggagcctgtgtgcgcgcttgtgtctgtgtgtgcgagtgagggagcgggtgtgagcgcgtctgtgtatggggagcggaggaggagcaggagctggaggggtggggggcgggaggcaggagactccgctctcccggctgcgcgttcgctcgctctctcggcacgtcatttatgccacaggagccctagcggcctctccatagagtgcctggaatgcgagacgtcaatgtgacgccatgggacgctacgtcaccctcct

SEQ ID NO: 16902 - DNA, 794 bp, Artificial sequence
  DNA replication origin
ccccccacccctccagctcctgctcctcctccgctccccatacacagacgcgctcacacccgctccctcactcgcacacacagacacaagcgcgcacacaggctccgcacacacacttcgctctcccgcgcgctcacacccctcttgccctgagcccttgccggtgcagcgcggcgccgcagctggacgcccctcccgggctcactttgcaacgctgacggtgccggcagtggccgtggaggtgggaacagcggcggcatcctcccccctggtcacagcccaagccaggacgcccgcggaacctctcggctgtgctctcccatgagtcgggatcgcagcatcccccaccagccgctcaccgcctccgggagccgctgggcttgtacaccgcagcccttccgggacagcagctgtgactcccccccagtgcagatttcgggacagctctctagaaactcgctctaaagacggaaccgccacagcactcaagtacgtatgagattcgcccagttaataaggggacttgctaaaaaagttggcttgctgggaagcgtcgctcctgaaattgacaactttgagtgtggggttccctcccctgaccttgccgcccggctccggctttgctagcccagcggcccgtaggttctgatctgaaacttttcccctgtagtgggcccgcggggatctctggagctcgtgggattcctccccccactcgaagaggcgaaaagcctctaacaaagaggaggaccgggatttgtgctatagcggctccagcgatgtaattcagggta

SEQ ID NO: 16903 - DNA, 1651 bp, Artificial sequence
  DNA replication origin
cgcaggttcgcacgccgtagtgctggcaggcggcgttgtccccgcacacggcacacgtgccctcgccagacgacgagctcctgctgggcggcgacggcaggctgggactctcgcccagcaggctggacgcggtaggggagggcgtgaggccgagaggcgggaaggccagcggggccgccctcttggccagcggcagcccgtacgggtggctctcaagcgcggcggcctggctgcccgcggcggctgcggctcccagcggcaggctgagcgcggcagcggccgtcgggtcgtagccgaggtggtggccgccggccgggctgggcgcggggggatgcggcggcgagggcttgaagtggaagagcgggaagcgcgcgccggccaccgtggggaccgccttcatcggcgggtccagcagcgggccgggtgcgatgcagccgggcgccgagggcagtgcctcgtcccataacgcccccgcctgcggggggaaggccggcgtggtgggggtggacggtggggactgcttgaagtacatggaggtgctgggcagcacctcgtcctccgggctggaggctggaggaatggatggctgctgatgctgctgctggtgatggtggtggtggtggtggtggtggtggtgatggtgatggtagctgggcgcccgcccctcctccactttgatcaagggccgctgcatttggtacacgcaggaaggcttgagttcgtagttgctcgagtagccctccacgaaggtactgatgctgggcagggacgtggtggctgtagccgtgatctcagtgctgccaaggtccatggtcagcttggtgtagtcggggttcatgatctccgtggtgtattccgagctgtatgtctgcgccgcataactggaacctggaggggaagggctatattgggcttggacgcagggcatatctgcagggacagagaaaagggtctctcagaagcaagttaacacttgttttctagccaacaggcagcattgggttcactgttctctaatctgggaaacagagaggaagtgtcatcctctcctccttctggtagcatagacacaaagccccacacttattttcttcatccctagtaaggaagctgaattcctgacaaaggggtgccaaaacctggcctcctgtggactcctgtacctatctttcctcccttgccctgtcctccactagatttgggaaacttgaagtctttcctcataagctcagagatgtttttaaaaagaggctttgaatcctataaactaattggagtgggctcctcagctataacctagggggacaaagagaaagccagtggtttatttgggaggaaagaggccattggtcccccaaggcatacacattgatttgtaaacctgagttaggcaagaaaaactaccctgtgagagatttagtggccaagggagagagttgacattctaacattttatgagtgccaattgaggttgcccacacacgttgtggttgctttctcccacctcatccccactcttccaatagggctagcagcctgcacaaactggacccctgttgataacttcagtcagctaggtggggacataggcccaggaaattgactcgggagagtttgtaccatctgcaaagaaaaagatcagcagctgcaa

SEQ ID NO: 16904 - DNA, 1208 bp, Artificial sequence
  DNA replication origin
cggggtggcggccgggcagaggctgcaatctcagcactttgggaggccaaggcaggcggctgggaggtggaggttgtggcgagccgagatcacgccactgcactccagcctgggcaccattgagcactgagtgaaccagactccgtctgcaatcccggcacctcgggaggccgaggctggcggatcactcgcggttaggagctggagaccagcccggccaacacagcgaaaccccgtctccaccaaaaaaatacgaaaaccagtcaggcgcggcggcgcgcgcctgcagtcgcaggcactgggcaggctgaggcaggagaatcaggcagggaggttgcagtgagccgagatggcagcagtacagtccagcttccgctcggcatcagagggagactgtggaaagagagggagagggagaccgtggggagagggagagggagagggagagcgagagggagagcgagagcgagagcggttgtttggtttttttagagacaggctctcactctgtccagaaatcttataattcttctagtgtttctttataaatgcaggttggttctcacatgaccaagatgggttgcactgatgctataggaaggttgtactactgaacaatttaagggttaaagtggcttcccagtgttattctatacttagtcctatttttcccctctctttgaacttctagttcattatagtgcttctgggaatgtgaatagtgtgagatgtgccttgattgatacccaacttcaaggcccttatagttcctgtcagcctcagcttcttttctccagggacatttcaacatctcctgctccttgaagccaactggaaacctttatacttctcttatctgcgagcttaatgcgaaactgaaagcaagagtggactgattggagtcagggaagtggtccccagggaggagaagcagcctaggtctcagggcattgggacttcagatggtaggctgacttgtcaatctagattagaaatggaagataactgttgcctggtacattgcttgttttttgctataggagagacatagtttgtaaagaaagggctctgagaatctcccaacagaaaggcaagtcaatgaaagatttagcaaaaatacactaagctattacagcagaatgcctagcagatgtactgccaactgagaacagtaatgccacagggaaagaaacatcccttattgaagc

SEQ ID NO: 16905 - DNA, 1217 bp, Artificial sequence
  DNA replication origin
cacctcccggacggggcggctggcccggcggctggccgggcagggggctgacccccccacctccctcccggacggggcggctggccgggcggggggctgacccccccacctccctcccggacggggcagctggccgggtagaggggctcctcacttcccagtaggggcggctgggcagaggcgcccctcaccttccgtacggggcggctggccgggcgcagggctgacccccctacctccctcccggacggggctgctggccggggagaggggctcctcacttcccagttggggcggctgggcagaggcgcccctcacctcctggatggggcagctggccgggcggggggctgactcccccacctccctcccggatggggcggctggccgggcgggggactgacccccccacctccctcccggacggggcggctggcctggcgggggctgacccccacctccctcccggacggggtggctgccgggcggagacgctcctcacttcccagacggggtggttgccgggcggaggggctcctcacttctcaggcggggcggctgccgggcggaggggctcctcacttctcagacggggcggccaggcagagacgctccccacatctcagacgatgggcggctgggcagagacgctcctcacttcccagatgggatggcggccgggaagaggcgctcctcacttcctagatgggatggcggccgggcagagacgctcctcactttccagactgggcagccaggcagaggggctcctcaactcccagacgatgggcggccaggcagagacgctcctcacttcccagacggggtggcggccgggcagaggctgcaatctcagcactttgggaggccaaggcaggcggctgggaggtggaggttgtggcgagccgagatcacgccactgcactccagcctgggcaccattgagcactgagtgaaccagactccgtctgcaatcccggcacctcgggaggccgaggctggcggatcactcgcggttaggagctggagaccagcccggccaacacagcgaaaccccgtctccaccaaaaaaatacgaaaaccagtcaggcgcggcggcgcgcgcctgcagtcgcaggcactgggcaggctgaggcaggagaatcaggcagggaggttgcagtgagccgagatggcagcagtacagtccagcttccgctcggcatcagagggagact

SEQ ID NO: 16906 - DNA, 907 bp, Artificial sequence
  DNA replication origin
ggagggaggtgggggggtcagccccccgcccggccagccgccccgtccgggagggaggtgggggggtcagccccctgcccggccagccgccgggccagccgccccgtccgggaggtgagaggtgcctctgcccggccgcccctactgggaagtgaggagcccctctgcccggccagccgccccgtccgggagggaggtgggggttcagccccccgcccggccagccgccccgtcggggagggaggtgggggggtcagcccccagcccggccggctgccccgtccgggagggaggtgggggggtcagccccccacccggccagccgccccgtccgggagggaggtgggggagtcaaccccccacccggccagccgccccgtccgggaggtgaggggcgcctctgcccggccgcccctactgggaagtgaggagcccctctgcccggccagccgccccgtctgggaggtgtacccaacagctcactgagaacgggccatgatgacaatggcgtttttgtggaatggaaaggggggaaaggtggggaaaagattgagaaaacggatggttgccgtgtctgtgtagaaagaagtagacatgggagtcttttcattttgttctgtactaagaaaaattcttctgccgtgggatcctgtggatctgtgaccttacccccaaccctgtgctctctgaaacatgtgctgtgtccactcagggttaaatggattaagggcggtgcaagatgtgctttgttaaacagatgcttgaaggcagcatgctccttaagagtcatcaccactccctaatctcatgtacccagggacacaaacactgcggaaggccgcagggtcctctgcctaggaaaaccagagacctttgttcacttgtttatctgctgaccctccctcca

SEQ ID NO: 16907 - DNA, 1493 bp, Artificial sequence
  DNA replication origin
attgtacaccttgaaggcgaggttaattaagtcctgttgtggggtttcagggccggaatttaatttttggagctttatttaaagtcaggagctgactgggtaatcaaatgtatattgagaataagatggccttttgaccttttagggtctagggctgtaaagcgtctcagggttgctgccaaacgagccatgaactgggctgggtttttcatatttgatgaaaaagagcctaaaggctaactgatttgggagaggtcggataaagaaaaaggagcattaaccttgactatgcctttagctccagccactttcctaagaggaaattgctgggcaggtaggggagggctagtcgcggaacaaaactgtaagccagactgggtgtgaggaggggagatgatagaaggattatagggtggaggagctgaggctgaggaagaattgggacttagctcggcctggcgacaagcagcctggggaggaggggaaaggtcagatgggtctgtagaaaaggaagactggaaagactcagcgacgcttggggttgggactgaggggacagccaggagggaaagaaggaggattggggaggaatcacattgggaacagagactagggagggaacaacgtgtagaagaatgcctggacgtcaggcacctcagaccatttgcctattttacaacaagaattatctagatcttgtaggatggaaaaatcgaaagtgccgttttctgtctatttggaaccactgttgagtttgtattggggtcaagcggcattgtagaagaaaataagttgtttaggttttaggtcaagtgtgagttgaagaggttttaagttcttgagaacacaggctaagggagaagaaggaggaatggagggtggaaggttgcccatagtgaaggaagcaagcccagagaacagagtagagacacggagggaaggggtttgggggttcttaccttccagaaaagcaggaaaggggtcggggcatggagatataaggggttggggtgcagagataagaggtcagggcacagaaataagggatcagggcgcagagataagaggttggggcgtggaaataagggatggggtgcagagataagaagtcagggcatggaaataagggattggggtgcaaagataagaggtcagggcatggaattaagggatcggggcacagagataagaggttggggcatggaaataagggatcagggggttcttgccccctagaaaagtggtacttgccactaagggtgaaggagaaggggttggggggttcttgcccccctgaaaaagcagagaaggggtagagacacagagagaaggagttgggaggttcttgccccccagaaaagcagtacttgctgctaagggtgaaggaccaaggcaggcgtccccgtgtggtcagacacctctgaaacgtgggtgagtaatcaggcagtcgtccccacgtgattaaacaccaagggaagactgtcttccctagt

SEQ ID NO: 16908 - DNA, 1415 bp, Artificial sequence
  DNA replication origin
gacggaccggcaggcggcgggcggtccgcgagggggcggcggcgtccgggctttgtggccgcggcgcgcgcggcggggcctggccggccgggggcgcgccgccgccgccgccgccgcccggcgttcgggagcccgcggccctcccggccgccctgcttgcgagaggagcccaggccgcccgccctcgcgcctcgccggcccctcccccggtcgccgcggctgccgcgccgccgctgcaggtaggaggctccccttccgggcgggccgcagccgggcgggggcgggggtggggggcgcgggccgggcgtagagggggccgggggccggcatggagggttttcgggccgagccgctgcgaccccggccttgcaggctgggcgccgggcggccgcctctgcgcgccgcgatgggactcggtgagtagggccggcctgctgcctacaaagccccggggcgcgggcctctggggtactcagtggcgcgcccacggctgggagcggggtgggctttggactcccgggctcggggagctgctcggggggaatccaggtgacctgcagtaccgcggtcttcccatcccggcgtccccactgtgtgctgatcactgtgctcggcgcttttccatacttgtctcctttaagacctccagtgccccgcccgtccagagtgtaacgggagggatccctcacttgcaggatgaaggccgagcatcacatccttgcttgactgaccttgggaaagctcctttactccgagccggggctactgtttctgtaaattagaggcgggggtcgggggggcgtggtataatatctaccctcaggtactattgtgaaagataatgtatgtaaatgataacagctaaattttgagcactctgtatgtaccaggccctaggtactaaacagttggcatgaattatcattgaatcatcaccctggcgctgtgaggtagttactgtaaattgcatgaataatctttatttaggagtacgaaacagtgaagaatttagtctccctattccgattcaggaggttgggtatttcttaggcgtgataacatttaacattacagacgttcctgcagtatcgaggagagtagttataggatgcagggatatatttgtcatacatttaaaactggaggtaggataatatcagggccagagagtgtgcctttcagcatgtcagagcagatgattgtattccaaggaaattgctgaatattaattaaaaaacatagtttctgagttaggattgaggatggctgtgggagtccagggccagagagagacatgggatggacaagggggagaagaaggattctgaagtcctggaggaagatgtagaggaaggcaccagggttcaccatccctcccctgcagcattgctgggccagatttcatccctcccgta

SEQ ID NO: 16909 - DNA, 1133 bp, Artificial sequence
  DNA replication origin
gctgagccggggagcagcccgtcagcatccccgccccacccgcagcgtccgccaggcccgggcccgcggcgctcgggacggagtcggcgggtccgggcgcgtgcgagggtcgcgggcgcgcaagggtgcgcgcgagggtgcgagccggcgtgggggacaccgcggcgaggggagcgggcgggcgcgcgcgcggcgggcgggggtcgcgggccggaggcaggcccagcctcttgctcgcctcctcgccttccctttgtgtccgtggccgttgccaccgcgtcacaaagaccccggcccgcccggtgaggggcgcgtgacggagccgccggcgggaggggtggctgcgaccccgccccgcgcacacccccagctcccgcgccgacagctccgcccccggccgcggccggcgccgcctccaggggagctattgttcctgcgacagggcaggggcgcgggggccggggttggggccacccctcggcggtaggctgcaccgtagcagacttgtttgccgccctttgtgagctgtttttgaagcgtttccttcgcccagcagcagggctgggaatgagggcaggtggtctgtcatatatctataatagtttttaggtggaagaaactgagtcacggaagaggtaaaggtgacttgtccaaggttgcataccaagaaatgggcaggaccaggatgggagcccaagttctgactctagccatgcagttctcagagatgttgggtgaatggttagatttctaggttcctcatccccacctcattcccgtagactcacatacaagtgagtgaaaatagttttacaaaagtctgtgttgccctctccccctaacaaaagctgagattcagagaggattttctaatatacaaggcctggtgaaagctctttatgtgcattctcttcaattatttttttacaggcctcggagggagttttcgttcttatctccattctacagatgaggaagtagggacccagagaggcaaggtgatctgactcccagtccagtgctcttcctaccacatcctgctaggtgataactagacataggtactaagatcatggactgaattgtgtgaaagtcctctgcctttttcattctattatattgcatcccacccc

SEQ ID NO: 16910 - DNA, 2200 bp, Artificial sequence
  DNA replication origin
gaggcgagcaagaggctgggcctgcctccggcccgcgacccccgcccgccgcgcgcgcgcccgcccgctcccctcgccgcggtgtcccccacgccggctcgcaccctcgcgcgcacccttgcgcgcccgcgaccctcgcacgcgcccggacccgccgactccgtcccgagcgccgcgggcccgggcctggcggacgctgcgggtggggcggggatgctgacgggctgctccccggctcagcggcgcggctgctaggaggcaccgaggcagcggcggggctctgggcgcgcggctggatgcccccggcctgcggctccctgcgcttcccgccgtccaggggcaccagtcatgggcgccgcagccgctgaggcgccgctccggctgcctgccgcgcctccgctcgccttctgctgctacacgtcggtgcttctgctcttcgccttctctctgcccgggagccgcgcgtccaaccagcccccgggtggtggcggcggcagcggcggggactgtcccggcggcaaaggcaagagcatcaactgctcaggtaggaccggtcggagccggccctaggtcttcccacccctccgttgccgcctccctcgtggtccctgcggtcggccgggctgggaaagaccccgtcgtgggggtcccaggggtgggcccgagggtgagcgagggcggagggcagggcgcgagcgtgcggtgtggctttgggaccggcgctggggatgggagtggccgtgggtgcgtccgagtgtgtcgagtggctgggcgagggcggcccggcgtgtggggaggcggtggggccggggccggggccggcgaggctgagcggccggccggggctcccggtgtggtcgtgggtgtgctcgcgggagcgtgtgtttgtgttgtgaaggctgaggggagggagggcggccccaggcagggatctgtgtgtgtgtgtgcagagtgcggtgggtgggagacggcgagggggctgggcggggtgagggcaggggagtgaccatgtgctgatgtgctggggagattcttccttaaggcactgggggtctcgggggtgggggtcgtgtggataaagggaacgggttgtcttgaggacgcggtttggcgatgcagagtgactgtgtgtgtgcgcgcgcgcgcgcgtgtgtgttctttgggttctgagatgggatctgggggcttagagtgacctcgggtctgtggatatgagcggggaaagtcccagggcccaggaagtgaccctgtgtttttgtgtgttgtgtgtgaagcctggggctcagttagtcaccctggggtatgcattgaagaggagggatgggtgccctatagcgaaccccatttatgtcttttcaaaggggaggaggcttgggagtcatcatcctgtgtagggtttggatgtagaaagaggaaattaggtctcagggaatgcccttgtgtagcaaggtgtaaccctgggttattaaagtgtggaaagagagaattgggtcccagggaagatgtcgtgcctgtgtgtgtgtgttttgcgggagggcctggattctggcagcagcggggagcaagggagtgacctctcccctctctccaaggccgcttgcccccccacagctgttggaaacaaagagcttgctgaggctttagtggataacactggggaggagggtcccagcagtaaagttcctcttcatttctaaaggggtcccagaggcgcacaaggattatggccctggggcaaagacaggcattcaggtctcattttttgagtggagggtcttcttggagctggcctagcagatgctagtgatcataagccacatccttgctaacttgcccttttatcaattctggagccttctcttgtcttctttaaaccaaggcggagtagggggaggagggaggaacataaggccactgggaatctgccggacaacctttatacttttgggctcttgaaggggcattatttctggaagagtgaggaaggagcaagagagtctcagcgcagatgcttatgctaccctaaatgaagcaagcctttggcccgctatttaggtttgaaggccttaaatcttttaataattttcatatggtaatgttttatgaggggaatggcagttttgagcacagtaaacaatggcatgtccattaaaagcatttccatccgtgaaaaaacttttctgttatttttctgatgttg

SEQ ID NO: 16911 - DNA, 1063 bp, Artificial sequence
  DNA replication origin
gcacgatctgcccagcccttctggcgcggtggtcggagccctggacactagagcgaggggacaaggattaggggtggccacagctggcacaagcagggcagctgggggttggggagagtcatcgcagagggcctgtgccccgggcagtgcgcctcgggcaggcgggttgcctagcggccctgcccgcagctccgaccgcttcctgccggaggattgcgaggaccccgcaggggtccccagggcagcaggggcccgcatcagtgcggggatggttgagtgtctcgggggcgcctccctggcccttgcctgcgccagctgcgctgacaggtcaatagaaggacgcgagcggggcgcgtgccagtctgggtaagaccctcgccgagcctagcagggccgaagcgccaaggggcctggcgcctaatggccgcccgcaagcaggggaccctcgcggcgcgtccacaccttaggttcgccgggcgcgccgagagcgcggcagcagtgttgggtttctgcgggcgacctcgcagccaagggctgggggagggcgactgggcagaggaaggcgtccctcccaggaccaggaaaaaccagcagaagggaaggagcgcagcgatggagacggtcagctcggcctacgggtgggaaactgaggctcaagcgtggcagggactgcccaaggtcagcgacagacactagatccagggccctggacatcgtcccccattctttttccaagagggagggttaattagatccacctgggtgtgtctcgccctctttctggcccttggctccggcgtcgctagtgtcgcactgcgctcgcggtgtcttggggcgtgagctcctgcagggtcgttgtgacccgcatcctctgctcggcccaggctctctccgggggaccgcagggcggctccaatgatgatctcaccatgcggaccattagcaacacatgcgggtgtgtgtgcgcgtgcatgtgtgtgtttctccttctataggggaaatagcttttttttttaggggtgaatttctagaatgcactgcactaggtactttatgaggtgag

SEQ ID NO: 16912 - DNA, 1077 bp, Artificial sequence
  DNA replication origin
gaccgcttcaccgagtggagtgaagctgcgcgcgggacctggaggcggagacctcaggcagcggctgcagaggggcgagccgggcgcaggagggggcgcgctttctccctgcgggtctcagtaatgaggagactgagtttgtggtggctgctgagcagggtctgtctgctgttgccgccgccctgcgcactggtgctggccggggtgcccagctcctcctcgcacccgcagccctgccagatcctcaagcgcatcgggcacgcggtgagggtgggcgcggtgcacttgcagccctggaccaccgccccccgcgcggccagccgcgctccggacgacagccgagcaggagcccagagggatgagccggagccagggactaggcggtccccggcgccctcgccgggcgcacgctggttggggagcaccctgcatggccgggggccgccgggctcccgtaagcccggggagggcgccagggcggaggccctgtggccacgggacgccctcctatttgccgtggacaacctgaaccgcgtggaagggctgctaccctacaacctgtctttggaagtagtgatggccatcgaggcaggcctgggcgatctgccacttttgcccttctcctcccctagttcgccatggagcagtgaccctttctccttcctgcaaagtgtgtgccataccgtggtggtgcaaggggtgtcggcgctgctcgccttcccccagagccagggcgaaatgatggagctcgacttggtcagcttagtcctgcacattccagtgatcagcatcgtgcgccacgagtttccacgggagagtcaggtgagaggagcctggtgcgtggagtggagatgggcgctgctgggggccggggccattgcatgaggggagagaaaacggcttggtaaagtctgaggggagttgttactttataactttgatattgcttaacgattgggccatgttcgtaggtggtaggtagaaggagcttagtagaagtagaataaaatatttaaagcgcggatggaaataaaacgcgcagtgaggtcgcggctggaaggaaagaagtggggagaa

SEQ ID NO: 16913 - DNA, 956 bp, Artificial sequence
  DNA replication origin
ctcacctcccagactatgggcggccgggcagaggtgctcctcacttcccagacaatgggcgggtgggcagagacgctcctcgcttcccagacggggcagccgggcagaggcgctcctcacctcccagatggggcggccgggcagaggcgctcctcacctcccagatggggcggccgggcagaggtgctcctcacctcccagacgaagagcggccaggcagaggcgctcctcacctcccagatggggcggccgggcagaggcgctcctcacctcccagacggggcggccgggcagaggcgctcctcacctcccagacggggcggccgggcagaggcgctcctcacatcccagatgagacagccgggcagaggtgctccccacttcccagatggggtggcggctgggcagaggcgctcctcacatccctgacggggcgtccgggcagaggtgctcctcacttcccagacagggtggccgggcagaggggctcctcacatcccagacgatgggcggccaggcagagacgctgctcacttgctagatggggtggcggcctggtagaggctgtaatcttagcactttgggaggccaaggcaggcggctgggaggtggaggttgtagcgagccgagatcacgccactgcactccagcctgggcaacattgagcgttgagtgagcgagactccgtctgcaatcccagcacctcagaaggccgaggggggcagatcacccgaggccaggagctggagaccagcccggtcaacacggcgaaaccccatctccaccaaaaatacaaaaatcagtcaggagcggcagcgcgtgcctggaatcccaggcactcggcaggcccaggcaggagaatcacgggagcccgaggcagtgaggtgaggttgcagcgagctgagatcatggcagtacagtccaggcttggcaagagagggagacggtagaaagaa

SEQ ID NO: 16914 - DNA, 942 bp, Artificial sequence
  DNA replication origin
aggctgtaatcttagcactttgggaggccaaggcaggcggctggaaggtggaggttgtggcgagctgcgatcatgccactgcactccagcctgggcaacactgagcattgagtgagcgagactcagtctgcaatcccggcaccccggcaggccgaggggggcagaccactcgaggtcaggagccggagaccagcccggtcaacagggtgaaaccccgtctcctccaaaaatacaaaaaccagtcaggcgtggcggcgcgcgcctgcagtcccaggcactgggcaggctgaggcaggagaaccatggggagcccggggcagggaggctgcagcgagccgagaccacggcagtacagtccagcctcggtaatgggagagggagaaggggagggagagggggaggaggagggggaggggagggggagggggagggctaatgttaaatagccacacatagctagtgagtacatacttgtagtgaagttcctgcagaagccatggactaggaaagataaagattgcaccactgggaactttatagtccggtctgagaatgaagcaatctgctcagctattacttaggaggttcttcttactttggtgggctgggatacataggagaaaataagagtcaacaattctgtgacattaaacctgtgctactggaggctgaatattctaagcataaaagtcaaacggagtcttttttatttcactctctttattgttcagtcatgatgcatttcagctaaaatgcatttagcattttagtttatatttggactatgatgttcttgcatatatctctttatttctggagatgctaagtgcttttgcttttctaggtgagcataacaactatataccttcaaaatattaagagtttctagttgctctaggtttaatggaatccacttttcatgaagacattattctcagaacc

SEQ ID NO: 16915 - DNA, 1150 bp, Artificial sequence
  DNA replication origin
gcagaggatcctgtggccttccgtagtgtttgtgtccctgggtacttgagattagggagtggtgatgactcttaaccagcatgctgccttcaagcatctgtttaacaaagcacatcttgcaccgcccttaatccatttaaccctgagtggacacagcacatgtttcagagagcagggggttgggggtaaggttacagattaacagcatcccaaggcagaagaatttttcttagtacagaacaaaatggagtctcctatgtctacttctttctacacagacaccgcaacaatctgatttctctttcttttccccacatttcccccctttctatttgacaaaaccgccatcgtcatcatggcccgttctcaatgagctgttgggcacaccttccagacggggtcgcggccgggcagaggcgctccccacatctcagacgatgggcggccggacagagacgctcctcacttcccagacgggatggcggccgggaagaggcgctgctcacttcccagactgggcggccgggcagaggggctcctcacatcccagacgatgggcagccgggcagagacgctcctcacttcccagacggggtggcggccgggaagaggcgctcctcacttcccagactgggcggccgggcagaggggctcctcacatcccagacgatgggcggccaggcagagacactcctcagttcccagacggggtcgccgccgggcagaggtgctcttcacatcttagactgggcggccgggcagaggggctcctcacatcccagactatgggcggccaggcagagacgctcctcacttcccagacggggtggcggccgggcagaggctgtaatcttagcactttgggaggccaaggcaggcggctgggaggtggaggttgtagcgagccgagatcacgccactgcactccagcctgggcaacattgagcactgagtgagcgagactccgtctgcaatcccagcacctcgggaggccgagctgggcagatcactcgcggtcaggagctggagaccagcccggccaacacggccaaaccccgtctccaccaaaaaatacaaaaaccagtcaggcgtggtggcacgcgcctgcaatcccaggcactctgcaggctgaggcaggagaatcaggcag

SEQ ID NO: 16916 - DNA, 990 bp, Artificial sequence
  DNA replication origin
tgaagcctcttgccttcccgggatagggcgtcctcacatcccctctgagaagttccccagcttccctctgttccccgtttccacacttagcgaggctcttgtccactgctacatcccccatagccagtccctcagccttgccattgcttatgctggtctggaaacaattcctagacttgtggggcatctggggaagttctccatctttttttagctggcatgacccaagtggtgtgggcagggctgtggattctatggtgtggctggaagccaggtagcctctctctactgtacatggaactcagcaacttctgagtcaagcaagatcttagctctgcaggtgtcttgccctgtccaaagttatggccacaccagtaccttttaactctagaagcccagtaagtgttttgtgggaccgcaaagatcattttctagacctgctgaatatgcctagaacgggtagggatggctttcacgctgttcctagggctgacaagtcacacgtttctgggggtacatacacaccgcggtccctgtgaatggcactctccatgagaactgtgatgatttgagttgaatagtgcacagcctacatggttctctgccatggcctggagttccttatcttgccttctccagtgaggactagggctgcaactggcctactttggctcctgacttgggggattctgaaataccttttttttttaaggttgtggagctctctgaagcttataaggattttgccaggaaaagataagaaatatctttgggcattttgtcactgtgctggagatgaaccctttggaggacatatcaccttgttgaggtcaaggggcggaaagggacaggactggcagagagatccggggcagcagcctgccatcccgactgagtatggagtttctctctcccttcagctgcacttttgtgtggagtcagtggctcagctgccacttcccttatgttcatggcatgaatctggcttgt

SEQ ID NO: 16917 - DNA, 857 bp, Artificial sequence
  DNA replication origin
ttcatacaccaccacaagacagtttgatgcagtattcctgattgctttttatagtatttgtaaatacactcgctaatccactaaattaggtaatttacaaacaggtcctctcagttattagtggccagtagtcgagttctattacatttgatcctcgtacagttgtctaaacatttccacccaggttaagggctcggatccgagagaaggaggttggcgaaatttggatgggggcagggtagaagctgagagaaatctctgcatctcagccctcagcgacaacattcagccagtgcccacagaaaaactaaattcggaacctcttcctcctgttacactggcaacaaagagggagtttccgtagcgctcccgtcacccaccaggtgcccaatctccttcccagcccagagtcggcgctcccgcaggggcctccgagtgcggggaggccgcggggcccgggtcacggcactaaggggggatggggtgcaagcgagcaagcgaggtctgcggagcgggccgtggaagggctccgggacccgctgaaaccatctgaacccagccagggggcagcgggcaagagaaaagggacagaatatctaatgaagcagaaactggaattcggtgggagaggtgaagagctcttgctgggggtacacctgcgaggagcacagaaaacgggcggcggatggcggggagactccacggaggtggaagagaggagccaggcccggaagaacagggaaggggatgccacctggggcagaggaggcgccagtgcagcctctacctgcaggcgggcgggacgggcagctcaggtgtgactgggaggagggggccgactggggaaggggccggga

SEQ ID NO: 16918 - DNA, 1061 bp, Artificial sequence
  DNA replication origin
cagggccccggacagcgcgcagagcagaggccagcccgagtcaccgggcgcggtccccgcatccgtgtgggcgcctcttagctcccgcccagagagcggccgggcggccttgccctccgcagcagcagcccggacgcccggccaggcccaccccgcgcacccacagcccacgggcccaggcgccccgcccaccctgtgccggcccggcttgtctcggtagccccgggctcccctcccccgcttactttctgggagtccatggcgagtggctaagcccactgggctcgaacccgagacgacgaaccgtgtgaggaggctcagcgagatcgcacaccccaagaccgctactcactgcactgccccagcccgcaccggcaccgcccggccccacccgtccgcgcccagaccgcgcgcgccgtagtcacgccgcggttgccagggtgaaagggcggcccgcagaagggaggggctgaggagcgcaccgcgcctgcgcgcagcggctgactgctcccgggaagtagccgtggagggtggggagcgccgcccgtctgtctaccgctagtgcctctgcaggctgcactcccttcccccatcctttttcctccagcgatagcggtctctccggccctgaaataggccactgggcatccagcagccggccggtgcggagggcccgggaaggaaagagtatctggtgctggagacggattagcccaccctccacccagcacgcatctgaagcccctccccacactatccttcgaggggcagccaggcttgagcggacccagcggtccaaagggaggaaaagggctggggtggggatgtagcgaaaacgtgggaaaagacctttaggggatgtggtggaaacgtgggaggagggatatagggatgagagtggcggaaacgtgggtgtgggattaatatgagctttggggcctggcacagtttttcccggggacccacccatcctccccggcacctcgctacctgtatgattttgagcaagtcagtctgcctgagcttgtttcatctgtaaaatgagagaaataatgcggact

SEQ ID NO: 16919 - DNA, 1407 bp, Artificial sequence
  DNA replication origin
ttgctcttatccactaagctgcaatttgtttgtgaatttattgtgccaggtcctataccagatctttcagagagagtggtacctgggaattcattacttattcattcattaatcaacatctgatgaacacctgttcactgggagtagatggggtagggaagaggcagagaagataaataagtaaataatactcaagtggggatgagtgttaagaagaataaagcaaacagaaggatgaagactctgtgtgtgtgtgtgtgtgtgtgtgtgtgtgtgtgtgtgtgtgagcaattttagtttttttttttttaagagacaaggtttcactatgttgaccaggctggagtgttgtggctattcacaggtgcgatcatagtgcactgcagcctcagactcctggcctcaagctatcctcttgcctcagcctctggagtaggtgagattacaggctcactaccacgccagacagatggtgcaattttagatattgtggtcacagacttcactgagaaggtgccatttgagtaaagacctaaagaatgtcagctccttgagggcaaggacttgtatctgttttgtttgaagttgtgtccccagcaactagaacagggcctggctcattgtaagctctcagtaataatgtgttgaacgaatgaaaggaggttagggagggaatcgtggataacttgggggaagagtgtttaaggcccaggaaacagtcagtgaaaaggctctgaggaaggagagtatctggtgagttcctgaaacaacaaagagaccagagtggctagagctgagtgagccccaggaagagaagagacagacagctcagggggatagaaggtatctctgggcccattttaaaggcttcagcttaactcagtgaaatggagagccactgaggggttttgagcagagaagtgaccagaatctgacttgtgttttcatagcatcattctggatgatgttggagaacagacagaaggaggcaagtccagaagcaggaagaccaattaggagtcccttccctcactgaaataaccaatattagtgctgggcattgtggaaactgaaatggataaattcgggaacctgcccagtacagtgaatgttaaattctgctgtgcatcttaatctcctgaaatacttaggttttaaaaatgcagatttcagaccacaccccccatcctgaaaaatcctagtttcctgggtctgggttgtgggtgttgggatcctccttccccacctgtgattctgaagcaagttgttgctgaactccaggtggaggctcactggggcttcataaacatctgatgaattaacaacggatacggactttcccagggttgaatgtgttggagaaggaggttggtaagcggctcccccagcccaggtgggtggcaggac

SEQ ID NO: 16920 - DNA, 1110 bp, Artificial sequence
  DNA replication origin
ccttctggggttcagcaggggggagggggaacagcagcagcagcctcagcatctcctccagcttctccttctgctcttctcgagctcttggataattcttcctcttttttcccctagcctttttcctcatttctttctttctttctttttttccttcctctctgctgcacgttgttgttgttattagaaaggcttcgcgcaccccctggtgctccggcgttttgtgtggcaggagaagattgtcttccttctctctttctgtcttgctttctctctccccctggttgctcattattcagagagagacacagagggagggagagagagagagcgcgcgagggagagggaggagaggagagagaagaggagagagaggggagagagagagtgagagggagagggagggagggagagagagagagagggagagagacggatatctcaggtcatctgcagctgcagcgagtctgaggagccgaggaaggcagggaagatggcgatcctccattgctgagacccggcagaagcacatgagactcccaaacaacttccacaacaataacccgagcaggaagaggagaaagagaaagaggataaggaggcggtggggctggagaacccgaagcacctcccggcgccgggacgcttcttctgtaagttactgcaattaacaaccacctcggggtggtccgagtgctccggggaagagagcgcggggtggtggaggcacaaacgcgctcattcattcggccaaggagggttggaggagcggggaggagaggaagtcccctgcatggactggctgttggaagaggagaagaagcgagagagaagaggaggagggggaggagggagagcaggagggggaggaggaagaggaggaggagaagcgagggaggaagaggaggaggaggaagaggaggagaaggtggtagtggtggcagtggaggtggctgtgcttttcctgctggctgctgctcctgctggggggagtgagcgcggtggcttaattaatttcgtgtagttctatgaagagaagagaaaatgaaagatgagtgagaagagagctggaggcttaggacggatgctccgagtgtggggacaggagta

SEQ ID NO: 16921 - DNA, 912 bp, Artificial sequence
  DNA replication origin
ggagggaggtgggggtgtcagccccacgcccggccagccgcctcgtccgggagggaggtgggggggtcagccccccgcccggccagccgccccgtccgggagggaggtggggggggtcagcccccctgcccggccagtggccccgtccgggaggtgaggggcgcctctgcccggccgcccctactgggaagtgaggagcccctctgcccggccagccgccccgtccgggagggaggtggggggggtcagcccccctgcccggccagccgccccgtccgggaggtgaggggcgcctctgcccggccgcccctactgggaagtgaggagcccctctgcccggccagccgccccgtccgggagggaggtgggggtgtcagccccccgcccggccagccgccccgtccaggagggaggtggggggggtcagccccccccgcccggccagccgccccgtccgggaggtgaggggcgcctctgcccagccaccaccccgtctgggaggtgtgcccaacagctcattgagaacgggccaggatgacaatggcggccttgtggaatagaaaggcgggaaaggcggggaaaagattgagaaatcggatggttgccgtgtctgtgtagaaagaagtagacatgggagacttttcattttgttctgcactaagaaaaattcctctgtcttgggatcctgttgatctgtgaccttacccccaaccctgtgctctctgaaacatgtgctgtgtccactcagggttaaatggattaagggcggtgcaagatgtgctttgttaaacagatgcttgaaggcagcatgctcgttaagagtcatcaccaatccctaatctcaagtaatcagggacacaaacactgcggaaggccgcagggtcctctgcctaggaaaaccagagacctttg

SEQ ID NO: 16922 - DNA, 1355 bp, Artificial sequence
  DNA replication origin
ccgacccccccacctccctcccggacggggcggctggccgggcagaggggctcctcacttcccggtaggggcggccgggcagaggcgcccctcacctcccagacggggcggctggccgggcggggggctgacccccccacctccctcccggacggggcggctggccaggcggggggctgacccccccacctccctcccggacggggcggctggccgggtgggggggctgacccccccatctccctcccggacggggtggctggccgggctgaggggctcctcacttcccagtaggggtggccgggcagaggcgcccctcacctcccggacggggcggctggccgggcggggggctgacccccccacctccctcccggatggcacggctggccgggcgggggggctgaccccccacctccctcccggatggggcggctggccgggtggggggctgacccccccccacctccctcccggatggggtggctgctgggcggagatgctcctcacttcccagatggggtggctgccgggcggagaggctcctcacttctcagacggggcagctgccgggcggaggggctcctcacttctcagacggggtggttgccaggcagagggtctcctcacttctcagacggggcggccgggcagagacgctcctcacctcccagacggggtctcggccgggcagaggcgctcctcacatcccagatggggcggcggggcagaggcgctccccacatctcagacgatgggcggccgggcagagacgctcctcacttcctagatgtgatggcggctgggaagaggtgctcctcacttcctagatgggatggcggccgggcggagacgctcctcactttccagactgggcagccaggcagaggggctcctcacatcccagacgatgggcggccaggcagagacactcctcacttcccagacggggtggcggccgggcagaggctgcaatctcggcactttgggaggccaaggcaggcagctgggaggtgtaggttgtagtgagccgagatcacgccactgcactccagcctgggcaccattgagcactgagtgaacgagactccgtctgcaatcccggcacctcgggaggccgaggttggcggatcactcgcggttaggggctggagaccggcccggccaacacagcgaaaccctgtctccaccaaaaccagtcaggcgtggcggcgcgtgcctgcaatcgcaggcactcggcagactgaggcaggagaatcaggcagggaggatgcagtgagccgagatggcagcagtacagtccagcttcggctccgcatgagagggagaccgtggggagagggagagcgagaggg

SEQ ID NO: 16923 - DNA, 1042 bp, Artificial sequence
  DNA replication origin
ggccgggtggggggctgacccccccacctccctcctggacggggtggctggctgggcggggggctgataccccccacctccctcccggacggggcggctggccgggcggggggctgacccccccacctccctcccggacggggcggctggccgggcagaggggctcctctcttcccagtaggggcggccgggcagaggcgcccctcacctcccggacggggcggctggccgggcggggggctgacccccccacctccttcccggacagggcggctggccgggcagaggggctcctcacttcctagtaggggcggccgggcagaggcgcccctcacctcccggacggggcggctggccgggcggggggctgacccccccacctccctcccggacggggcggctggccgggcgcggggctaacccccccacctcccttccggagggggcggctggccgggcggggggctgacccccacctccctcccggacggggtggctgccgggcggagaggctcctcacttcccagacggggtggctgctgggcggaggggctcctcacttctcagacggtgtggctgccgggcggaggggctcctcacttctcaaacggggcggttgccaggcagagggtctcctcacttctcagacggggtggccgggcagagacgctcctcacatcccagacggggcggcagggcagaggcgctccccacatctcagacgatgggcggccgggcagagacgctcctcactttccagactgggcagccagacagagaggctactcacatcccagacgatgggcggccaggcagagacgctcctcacttcccagacggggtggcggccgggcagaggctgcaatctcggcactttcgggggccaaggcaggcagctgggaggtggaggttgtagcgagccgagatcacgccactgcactccagcctgggcaccattgaacactgagtgaacgcgactccgtctgccatcctggcacctcgggaggccgaggctggcggatcactcgcggttaggagctgg

SEQ ID NO: 16924 - DNA, 937 bp, Artificial sequence
  DNA replication origin
gccgccccgtccgggagggaggtgggggggtcagccccccgcccggccagccgccccgtccgggagggaggtggggggtatcagccccccgcccagccagccaccccgtccaggagggaggtgggggggtcagccccccacccggccagccgccacgtccgggaggtgaggggcgcctctgcccggccgcccctactgggaagtgaggagcccctctgcccggccagccgccccgtccgggagggaggtgggggggtcagccccccgcccagccagccgccacgtccgggaggtgaggggcgcctctgcccggccgcccctactgggaagtgaggagcccctctgcccggccagccgccccgtccaggagggaggtggggggggtcagcccccccgcccggccagccgccccatccgggaggtgaggggtgcctctgcccggccgcccctactgggaagtgaggagcccctctgcccggccaccaccccgtctgggaggtgtactcaacagctcattgagaacgggccatgatgacaatggcggttttgtggaatagaaaggcgggaaaggtggggaaaagattgagaaatcggatggttgccgtgtctgtgtagaaagaggtagacatgggagacttttcattttgttctgtactaagaaaaattcttctgccttgggatcctgttgatctgtgaccttacccccaaccctgtgctctctgaaacatgtgctgtgtccactcagggttgaatggattaagggtggtgcaagatgtgctttgttaaacagatgcttgaaggcagcatgctcgttaagagtcatcaccactccctaatctcaagtacccagggacacaaacactgcggaaggccgcagggtcctttacctaggaaaaccagagacctttgttcacttgtttatctgctgaccttccct

SEQ ID NO: 16925 - DNA, 1274 bp, Artificial sequence
  DNA replication origin
tgccgccgcgcagctcggctgccgggcctgcgccgggtgctggccgctgggcggggtctgtggcctggcggggccccggggtcgcccgcgctcctcgcgctctggggaggaaggcggtgggggtgggggcttgtcacattcgcccagcggagcggcctctcccccagcccgtgccccggaccgcgccgctgcctccgcgactgcggccttccccgcgaactcgggccgccgtgcttcctcacgcgccgagcgccagccacggagtctgcagaaggcgcgagggggtcggcgagacaagcagggaatccgctagctcaccacaggatggtggccgccatcatcgtgactcgccgagacgtgccccctcccccacgcgaaaaacctggggggatggggccgggcgggcgaagcgcgcaggcgtggggtgcggcgacgctttgcgccggcgcggccgaggactccgccccagaattgggggcggggcggaaggcggtcctggaatgtcggcggcctggacccggattacgcaggcgcgttccgtgggcggcaagggctcctggggcttcctcctagcgactattgctggggcgttctctccggctgccgcggctccgcctctgtgcaggctccgcccggctgccgaagttacgcaatgtgtagcccgggaagcgcttcgtggagacccggcagagtggatgcggagccctggagcgggggagtaatcggggcggagtttaagtgaaaggatggcggtaaccacagtctgggggccagcacccgcggggcgcttgctgcggggctcagccctgggggtgtcgactgattctttaatcccgacagcacagactcctgagctggactgcccgagttcaaatattgttttttctcactagcctaaacagatggaccgatttaaaatgaaggtcaagttctgtcacacctcggggtagaactgtccagtgtttccccatctagccccgagttaaagtcagagttattagaacggatgcattagcccctcgcctttctccgagtcgccttactctccccactggtggattctaggttgcccccggctcccttaacatccttgctcagatattgccttcttggtgaggtctgttctggctgccttacttaaaatcccaacttcctatctctgttatcctgctctgttttcttgtatagcgggtatccctttataattaccctgtaatgtacgtatctcttgtttatcatctttctccttttcctgtgaaccccagactgaagct

SEQ ID NO: 16926 - DNA, 1216 bp, Artificial sequence
  DNA replication origin
tcgcggaggcagcggcgcggtccggggcacgggctgggggagaggccgctccgctgggcgaatgtgacaagcccccacccccaccgccttcctccccagagcgcgaggagcgcgggcgaccccggggccccgccaggccacagaccccgcccagcggccagcacccggcgcaggcccggcagccgagctgcgcggcggcaccatgcaggtcaccctgaagaccctccagcagcagaccttcaagatagacattgaccccgaggagacggtatgcgcgcgggccgggggcaggggcagccgcgtgcgggccgcggggagcgccaggagctcgtggggccgggcggcgcgctccagcgggggaagccccggagggcgcgatgagggccctgggtcctggtgccggccctggcggcgtacagcggagccgatcctcctgtcttggccgtgggctttgtggcaggagaatggggaagcagtggccggacgccgaaggcctggtggcagatggcgtggagcgcacgcccgcgggcctgggcctaggagctcgtgctagcggggccggagggggatgggaaggtccaggccgtctcagccgtagagcctggctttctggtatgggtgcacaggtgggggagggagacgtaggcgtcgccactacccctgtgtggacctggttagccgcttagttcccagagttggtaacccgagaagatgagccttaagaaaaaaaaaagtatcaggttccgtttgccgccgagaggtgagtggtggtgaaaatgaatttgcccctttcccctcagaattgtttacccttttatttgcaaatgaatcgttctgctgccttcctcccgccaccaaacccacacccttgcgtagattgcactttgaggcctctttggtgatggttttagctgttagagctcttcacagccatccaggctcaaactaaacttcagatttaacgggttttctgtgttagaaatcttggaattgtaggagttggaacgctgcagccaccctcccccgatgccccaaacagtagcagttcaagggggaaaaaagaaaaaaaaaacaaaaaacaacaactttgaatcctttctgcagttaaagccttaaacatttcagaagtccacattatacatttttctgtatttgtgactgcataaagagacactgttgaggtcagtacaactttatgccaagaatctaaaaacgc

SEQ ID NO: 16927 - DNA, 1166 bp, Artificial sequence
  DNA replication origin
gccgtcgagcagcggccctgccagcgcgccctccacctgcagcttcacctatccgatccgggccgggaacgacccgggcgtggcgccgggcggcacgggcggaggcctcctctatggcagggagtccgctccccctccgacggctcccttcaacctggcggacatcaacgacgtgagcccctcgggcggcttcgtggccgagctcctgcggccagaattggacccggtgtacattccgccgcagcagccgcagccgccaggtggcgggctgatgggcaagttcgtgctgaaggcgtcgctgagcgcccctggcagcgagtacggcagcccgtcggtcatcagcgtcagcaaaggcagccctgacggcagccacccggtggtggtggcgccctacaacggcgggccgccgcgcacgtgccccaagatcaagcaggaggcggtctcttcgtgcacccacttgggcgctggaccccctctcagcaatggccaccggccggctgcacacgacttccccctggggcggcagctccccagcaggactaccccgaccctgggtcttgaggaagtgctgagcagcagggactgtcaccctgccctgccgcttcctcccggcttccatccccacccggggcccaattacccatccttcctgcccgatcagatgcagccgcaagtcccgccgctccattaccaaggtcagtcccggggatttgtagctcgggctggggagccctgtgtgtgctggccccacttcgggacacacgggatgatgctcaccccaccttcttcacccctagagctcatgccacccggttcctgcatgccagaggagcccaagccaaagaggggaagacgatcgtggccccggaaaaggaccgccacccacacttgtgattacgcgggctgcggcaaaacctacacaaagagttcccatctcaaggcacacctgcgaacccacacaggtagggggacaaactgcagaagggaggggggttagcttccagccccataggctaccagtggacactcctcagtgcctccttgacttcccaggttagcttccagccccataggctaccagtggacactcctcagtgcctccttggcttcccagggcagtctatcgccttgatctccgggatcactggagagaacagcaaaccggc

SEQ ID NO: 16928 - DNA, 1425 bp, Artificial sequence
  DNA replication origin
gcgggggagggtcactcggcggctcccggtgccgccgccgcccgccaccgcctctgctccccgcgcgcccgcagacacgttcgttctctctggtcgggaaactgccggccgccggcgcgcgttccttacttataacttccttcgctacagccttttcctccgccttctcccatgccccgcccctccctttcttctctccgccccccccgaggctcccttccatcgttgctatggcagctaaatcaacaaactcggcgcacgtgggggcgggggaggggaaggaggggcgcgggcggggctgggccgggccgtgacgccagccaggcagctggcgggctggagccgagctgacgccggcggcagtggtgtcggcggcggcggcggcgtccgccccagcgcggggcgcgaggaaccgggcgcaggttcggtcgctgcgcgaccagggccgtactcaccgccattgtcggctccctgggttcgaagcccgcgaagactggtggggtcagcgggcggcacggtcacgcgtccgcacccctgctagcatacgcgcttgccgcgctgtctgcgcgctggagaagagcgcgattatccgcgtgactcatccagccctccatctccccctccctctctgcgctcgcaggagtccgctctcgtcgctcagcgccagtgccggtggcggtgccggcgctcggcctgacctcgcacggttcctcgcgggcccttctgctgaggggtggggggcgctaggggtgtggagaggaggcagtgcccagcactgtgcagcgtgaactgggagcctcaagagaaggccagaggagtgttccgccgggaacaggcggaaagaggcacgaatggggagttatggttttgatactttaaatagcgagaaagggagtgaaagggctcaagatttactcagaggcataagggagagaagagggactgtgaggcgcggagacagttttcaaccagccatctcgaagccctttcctttttttttctttcttttttttttttttgtgagacagagtctcgctgtgtcgcccaagctggaatgcagtggcacgatctcagctcagtgcaacctccgcctcctgcgtccaagcgattctcctgcgtcagcctcccgagtagcggggattacaggcgtgcgccacgacgccggctaatttttgtatttttcgtggagacggggtttcaccatgttggccaggcaggtctcgaacacctgacctcaagtgatcagcctgcctcggcctcccgaagtgctgggattacaggcgtgagccactgcctgtaatatttgatgactaaattgcactgtagaataataataataatagaagacacccattaaagaagaattaaacactcactgatgacttttcaagccacgcactctcctttccactttatggatgagaa

SEQ ID NO: 16929 - DNA, 1325 bp, Artificial sequence
  DNA replication origin
tcccggacggggcggctggccgggcggggggccgacacccccacctccctcccggacggggcggctggccgggcggggggccgacccccccacctccctcccggacggggcggctggccgggcagaggggctcctcacttcccagtaggggcggccgggcagaggcgcccctcacctcccagacggggcggctggccgggcggagggctgacccccccacctccctcccggacggggcggctggccgggcagaggggctcctcacttcccagtaggggcggccgggcagaggcgcccctcacctcccggaccgggcggctggccgggcggggggctgacccccccacctccctcccggatggcacggctggccgggcggggggctgaccccccacctccctcccggatggggcggctggccgggcggggggctgaccccccctcacctccctcccggacggggtggctgccgggcggagatgctcctcacttcccagatggggtggctgctgggcagagaggctcctcacttctcagatggggcagctgccgggcggaggggctcctcacttctcagacggggtggttgccaggcagagggtctcctcacttctcagacggggcggccgggcagagacgctcctcacctcccagacggggtctcggccgggcagaggcgctcctcacatcccagatggggcggtggggcagaggcgctccccacatctcagacgatgggcggccgggcagagacgctcctcacttcctagatgtgatggcggctgggaagaggcgctcctcacttcctagatgggatggcggccgggcggagacgctcctcacttcccagactgggcggccgggcagaggggctcctcacatcccagacgatgggcggccaggcagagacactcctcacttcccagacggggtggcggctgggcagaggctgcaatctcggcactttgggaggccaaggcaggcggctgggaggtggaggttgtagtgagccgagatcacgccactgcactccagcctgggcaccattgagcactgagtgaacgagactccgtctgcaatcccggcacctcgggaggccgaggttggcggatcactcgcggttaggggctggagaccggcccggccaacacagcgaaaccccgtctccaccaaaaccagtcaggcgtggcggcgcgtgcctgcaatcgcaggcactcggcaggctgaggcaggagaatcaggcagggaggttgcagtgagccgagatggcagcagtacagtccagcttcggctccgcatgagagggagaccgtggggagagggag

SEQ ID NO: 16930 - DNA, 907 bp, Artificial sequence
  DNA replication origin
agccgccccgtccgggaggtgaggggagcctctgcccggccgcccctactgggaagtgaggagcccctctgcctggccagccgccccgtccgggagggaggtggggggtcagccccccgaccggccggccgccccgtccgggagggaggtggggggggtcagcccccctgcccggccggccgccccgtccgggaggtgaggggcgcctctgcccggccgcccctgctgggaagtgaggagcccctctgcctggccagccgccccgtccgggagggaggtggggggtcagccccccgaccggccagccgccccgtccgggagggaggtgggggggtcagccccccgcccggccagccgccccgcccaggaggtgaggggcgcctctgcccggccgcccctactgggaagtgaggagcccctctgcccggccaccaccccgtctgggaggtgtgcccaacagctcattgagaacgggccaggatgacaatggcggctttgtggaatagacgggcgggaaaggtggggaaaagattgagaaatcggatggttgccgtgtctgtgtagaaagaagtagacatgggagacttttcattttgttctgcactaagaaaaattcctctgccttgggatcctgttgatctgtgaccttacccccaaccctgtgctctctgaaacatgtgctgtgtccactcagggttaaatggattaagggcggtgcaagatgtgctttgttaaacagatgcttgaaggcagcatgctcgttaagagtcatcaccaatccctaatctcaagtaatcagggacacaaacacggcggaaggccgcagggtcctctgcctaggaaaaccagagacctttgttcacttgtttatctgctgaccttccctccactattgtcccatgaccct

SEQ ID NO: 16931 - DNA, 1329 bp, Artificial sequence
  DNA replication origin
tttagctaaaaagtatcttacctgataacaaaaacgggaggggagagtagagtaaattactctgaagttcaaaggggagagagagatcactttcagtaggaatgagggattgctttcactaggcacagaagacatgaaggaaaggtgagtcagtcctcgaagttgaacacaagagcaagactattgcaggggaaggggcaggtaagccaaaagacagagttggcaatcatacaagtcaactatgacttgaagaacagcaagtagagctactcctaacaggtctacagctatgctgttccattaaaacatccattaagatcaagtaaaatcagtgagttatctagataatatcatcatcaggatcaaggactccagagatataaaagctggtggagtgaatttaagtagaaaatttgctttcatgactcataagataatatttgggagaagagtagcgttgtaattgtgtgtatacagtggcttgggatggtgtgtgtgcagtgggtaggaatgacaagtgtgaagtgggttggaatggagtgtgtgaagtgggttgggatggtgtgtgtgctgtgtgttgggatggtgtgtgtgcagtgggttgggatggtgttatgtagtgtgttgggatggtgtgtgtgctgtgtgttgggatggtgtgtgtgcagtgggttgggatggtgttatgtagtgtgttgggatggtgtgtgtgctgtgtgttgggatggtgtgtgtgcagtgggttgggcatggtgttatgtagtgtgttgggatggtgtgtgtgctgtgtgttgggatggtgtgtgtgcagtgggttgggatagtgtgtgtccagtgggttgggatggtgttatgtagtgggttgggatggtgtgtgtgcagtgtgttgggatggtgtgtgtgcagtgggttgggatggtgttatgtagtgtgttggggtggtgtgtgtgtagtgtgttgggatggtatgtgtgcagtgtgttgtgatggtgtgtgtgcagtgggttggggtggtatatatgcagtgtgttgggatggtgttatgtagtgtgttgggatggtgtgtatgtagtgtgttggggtggtgtgtgtgcagcgtgttgggatggtgtgtgtgcactgtgttggggtggttgtgcagcgtgttgggatggtgtgtgtgcagtgtgttggagtggtgtgtgcagtgggttgggatagtgtgtgtgcagtgggttgggatgatgtgtgggcagtgggttgggatggtgtgtgtgcagtgggttgggatagtgtgtgtgcagtgggttgggatgatgtgtgggcagtgggttgggatggtgtgtgtgc

SEQ ID NO: 16932 - DNA, 1124 bp, Artificial sequence
  DNA replication origin
ctccgacggcactaggcctccaaggatggaggcgccctccaggggaaaacgctgaagcgctgcaaagaagccagcgactcaatgggtgcgtcaactaggcagccgcagcactgggagtgcggcgcgggagtgacgtcaccaggcggagggggcgaggccgggcccgcttctggtcacttacggcggccggccttctttgtaggcctggcaccgtagaggtagaggagctacattggccgcgtcccctgtccctctgccctcttgcccatctgcccaaacttttgtatttgatctctgttttgatgtcgaaccccaaagcactgtaattggggggggcgggggggggggtggaacctgcggacctgagagcagcgcgcgtgcgcacgacacgcgctgtgcgccggaagagcacgcccagtccgggctgcgcggaggaagcgctggggtcccggagggcgggggtggcggcgccggaggtcgccatggctaccgagcccgaagccgcggagccggtggtgccttcgctcgtggatcgatacttcactcgctggtacaaaccgggtaagtgcggagtgatgttgatccctccttggccgcactggcctaatgctgtgtagactatgttgacagatcataagccacgcgcgctctccctggctctccgtccccacgtcagaaggcactggacttctgtgttccgtctagccccagggaatggcatttgcaaagacctggtggcctgaaatacttcagggcgcattctggggccggcgattgcagtgcgagctctagggtgttgctcgcagtaagatgagtactctaaacggaggccccaaaggtaggcggagggctaggttgcaacagtccttaagtgcctggagggattgaggggctcactctcacagggagtagcgatacataaaattatttaaatgatcagatcgaaactaaggtagaggcagtagggatggcgagaagagggtgggttagattagagacatttagaaagaagaagaatctatacatttaccttaagagacgccatctgccacttagaagtaggtattctttttgtactgttttgtgtaagcagaaccagtggtgggagcatcgttggggactct

SEQ ID NO: 16933 - DNA, 1229 bp, Artificial sequence
  DNA replication origin
ggggagaccccgcggaccgcggcgctggcgctgcgcttcgacaagcccattaagcaggccttctacaacaccggggccgtgctgttcgtgtgcctgtgctgcggcgccgcggtgctggtctacttcatcctggaggccttcctgcggccgctgctctgggccgtgctatgcggcacttttctgcaccccttcaagagctcgctgacgcgcctgggccgccactggctgcagcgcctgcaccgcgcgcacacgcccatcgtcctggccgcgctgctcctgccgctctgcttcgtcgactacggcgtcgaggccctgggcgagcaggcgctgcgccgccgccgcctgctcctgctgctcggcgccggcggcccgctcctgtacggcctctactgcctcggcagctacttgggcgtgcaggtgctgctggtgcacgctgccacgctcatctgccgcgggctggactacttcagcagcctgtgggtgagtgagcggcagtccgcccccgtcccccgcccgtggtcccggcgctctggggtgcaatcctgcagctgttcctcccggtgcaggggcgacgaggggccacacctgtgctgcagtgaccgtccgtctccgctttccttctcacacctcaggaatttggcggacattcttccaaaaagggggcgggcgtgatttgaaacagcctccctgcttttcgccttgtttcaatcctaataggccctcttagggggacagtgccctggattgagaatcgttatttcgctttgcagagagaggcctcagagcatggcagtggggcttggttttacttctggttggagagggcgggggtgcttcggccaccctcagttctgcgcatctgaatgtcagagctggaagggaccttagagattctaggccaacttgccatcctgcagataggaaaggtgacctcttaccaggctagggctacttagggacaaagaggggtttgggtgtcttagatttcttacaagtcctaaaacaaagcttgcttcactggctggtgctgcctctcagttcaggtgattcctgtataatttgtgcaaggcactgggtgctgagctgcctgtgcttcttcctctccacgctttacttttaggtaactgcttttgttgtgcagggactggtgtaccacagcacacctcctcccgcctggagtaaagcagctgaccgcgtgaaggggagagacgtagatttgtgatgcttgg

SEQ ID NO: 16934 - DNA, 1049 bp, Artificial sequence
  DNA replication origin
gagcagcaggagcaggcggcggcggcgcagcgcctgctcgcccagggcctcgacgccgtagtcgacgaagcagagcggcaggagcagcgcggccaggacgatgggcgtgtgcgcgcggtgcaggcgctgcagccagtggcggcccaggcgcgtcagcgagctcttgaaggggtgcagaaaagtgccgcatagcacggcccagagcagcggccgcaggaaggcctccaggatgaagtagaccagcaccgcggcgccgcagcacaggcacacgaacagcacggccccggtgttgtagaaggcctgcttaatgggcttgtcgaagcgcagcgccagcgccgcggtccgcggggtctccccgccaccgccactcggcccgaccgcgcgcgggacccgcggcgccggcccgggagagctccgcaggcttggcgcgtccttagggccgccgccgtcggccatcgttcctccgccacagccgcccccgaggggcggtaatgggagtcgggctagaaacgcgggcgggaggcagggcgggaggcgcgcgagattgtgggagttgtagttccccgctggtttacagacccaccaagcgcttgcaggaaactacaactcccgaaggggaaatggggaaaacgcctccgcctccttggtgtccgcaaggtcctgctaacaagtttgcagggtctatatcttcctggagggggggggggggggaagctcctttcactcattcgttaatgtcaatttctcgcgaggcgagatcccaaaaggcgccacattcagatattaaaacccaagctgcatactagaataccgtgggggagtacttttaaagaaccaatgccccgattctgttttactgatttatttaacagatatttttaaagtgttttctttggtgtatctgacaggattttaaatagagattaccatataacaggccctattctaagtggctcactcctattaactcatttaatccttagaacaaccctacaaagaaggtgttattatcctcattttaccaacagaaaaactgagacagagccgtt

SEQ ID NO: 16935 - DNA, 1324 bp, Artificial sequence
  DNA replication origin
gcgcagaccgaggcagggaggcgggggtgcgggaggctccgcggctgcgcgggcgcgtgctggtggcctcggcggaggctcagtcccggcccgcgcccgcggcgcccccgctgcggcccgagcggcctggctgcgggatctgtgcgcacggatggcgcggccgccccggcagcacccgggggtctgggcgtcgctgctcctgctgctactgacggggcccgccgcctgcgcagccagccccgcggacgacggtgcgggcccggggggccggggaccccggggacgcgcgcggggggacacgggcgccgacgaggcggtgccgcgccacgactcctcctacggcaccttcgcgggggagttctacgacctgcgctacctgtcggaggagggtgaggctgcgggagggcgaggggttgcgggaggggagaccgggggtgggggaccgaggatcgggggaacgaggagagggggcgagggagggggagggggtcggaaaagatgtccgtggaggcagctcttgcagaggcgaggccaggatggggagcgcagtgcccaggcctccgccggcctggaggaaaggcccaaagagctgtcaatgcctgccgcccgctttacagatggggagagtgaggctgggagagggaggggtcatccaagttctgcaaggctgtggataggggtgggtgctgagtctaagctcccccagttcttagatctggcttccacctttgccgcctggggttgggttataggggaggaggccgccatctggccagggcagctagggggaagcagaaaaaccccaacctaaagagagaggttgccttatttcctccctgtctgtattgacttaaatttgcagtgaccagcgcccacctcgtagcattctgttcctgctcactgacccgtcagagctgggtcacatcagcctccccactcccatccctcctcttttatgacgccacatatgttatggtcccctagtgcgagccaccattgttgtggcctgctgggcccgcagactgggagtttgtcagccaagggcctccctgtagagctgcttcaacgagcacaaaagccaagcggatggtggtcagaaggaatggaaactggcctctttaagcaactttgggaagtagtgactttccttttcttctgctaagagggatatccaaccatcaagctggggtttgaagtgttgagtcccaggagctcatatctgttagtggatgtgtctgttgttaggattaagttcagctgtatacaacaagcaaacattaatagcttcaacaagatagaagtttctctcttacagaaagaaaac

SEQ ID NO: 16936 - DNA, 1107 bp, Artificial sequence
  DNA replication origin
cgcctgactttctcccttgggcaccgtgcgtggggtcggcggggcacctcagggcggcggcgcctgggcctgcgtcccgggcacccgcccacaggtggttgcacccccgccccgcgccagctgagagctgggccggcgctgcggtccgctgcagggcgtccagttaccagtgagtcttcctggctgaaggggccagatcagatcaaatcaaaccacacattaatcgggcgcccactgtgcacccggcgctgcggcagacggtgccttcgggaatttctgggtgtgactgaggacacagcggtaattgagctttagatgaatgttacagatcatctcgaggatgtcaagggaagaaataacatacccggacttccaaggaagtatataggccttcccgggtgggagaaatgtttggacttcatgagagaactaggaacatgtgaaaagggtctcagatgggaaaatcagagcctgcctggcttggagtttaacgcttcccggtgtaggctgaatttcgagacagtttcaatttatggcaattttatttttgtggttctttgtgctctccataagatatcattttgctatgaaaatacccttttggggcctttttattgatggaaaaggagccaacattcgggtgcttagagctgttgcctttaaaatagcataaaaatgttactgttccccaacaatgaggctctccagctttttattcagctgggagaggaggcctgaggagccggggaggaggagaggggagcaggctgcctctggagtgggcagcttgtgttaggagaggatgtggcgtagtttgcatctcggatctgggaaaggaatgctatccttgggaagtttgacagtgctccttgccggtggttttctcatctgttccctggggatgattcgtttataaaatgtattgcttgtcagctccatgagacaggcttaagtggtgtgcatggtgaatagacccaaacaggtacacaaacgaacaggttgggacaggaaggctgactgattccagccagtgtagccctcactggagcctggtgggggaaggggatatttgcatcctaaaaggtttcttcactttataaaaggctg

SEQ ID NO: 16937 - DNA, 1130 bp, Artificial sequence
  DNA replication origin
tcccttgacatcctcgagatgatctgtaacattcatctaaagctcaattaccgctgtgtcctcagtcacacccagaaattcccgaaggcaccgtctgccgcagcgccgggtgcacagtgggcgcccgattaatgtgtggtttgatttgatctgatctggccccttcagccaggaagactcactggtaactggacgccctgcagcggaccgcagcgccggcccagctctcagctggcgcggggcgggggtgcaaccacctgtgggcgggtgcccgggacgcaggcccaggcgccgccgccctgaggtgccccgccgaccccacgcacggtgcccaagggagaaagtcaggcgcgcctggccccccgggcaccccggggtcgactcccagcgccccagcaaagggctctgccggtgcaaggcaggcaggtctgagacagccgactctagagttagctcccaagtcaccctacccgctgcgaggaggctgcggggcagatggggctcagggaatgggaatggggtgtatccagaagggatcagcagagagcagaaatggtctaacccccgcctcccaaacttggggcgcctgccgagcagcaagcgaggggatctcctctctgctgtctcatcaaggcctgatggcgagtttgaggggggacaagctggacaccccaggacggcctcacattgatttgagattttctacccaataacccagtatcaggaagacccctgctggaagctagggacggaaggggagcgccggccacccacaccagggggggcggggtctcgggacttggggaccgtgtgtactggggagggggcgaggccccaaggactaggtgggcgccagagaaatcgcaaccccgcggcgcaatgtgccaaggagggggcacgggccaaaggtggggccccggaagagaccgggacggggtggcccaagaagaaaaagggttgaggagtgctcggagaagaggatgggggaggggatccccagggaggtgcaagggaagcgcccccgatgcaagcactgggggagggggagctgcctccaggggcgcgaggtgccagtgccccagactggccccgtcactcaccggcaggtccacgctcacttcggtcccgtc

SEQ ID NO: 16938 - DNA, 2262 bp, Artificial sequence
  DNA replication origin
gccgcctgcggggcgcgccggcccggccagcgccggctgcgagtggccgcaggcgggagggcgcgctcggggccgtcccgccgccgccgccgccgcgcgctctcccgggccggcggcctgcgcgggctgccgaggggctgctccggacgggcggctgcgggctgccagggggctgccgggggcgcgggaggcgggctgcgggctgctcccgcgccgcgcgccggccgagggccagccggagcagggcgcctgcgtggtcctggcgcgctcgctcccactcgccgcgccgcgcccggggcccgaggaggccccgccgagcgcccgctcccaaggcgccttttcctgcgcccgcagcccccgcctcccacctgggaggctgcacctccagccgccgccgccgccgccgccgccgctgccgccgggactgcagcacgccctcctccctcggggctgcgccgggtaattgcaagccgggtctgtgctgccccctgccggcccgagcgccccctgctgctgtaggtgtgctcacgtgtgtacacgtaggtgagcacacacgtgtttccggcgcccagagccctggaggcgccgagtgcccctttgcaccgataggaaaacaaggccgcgtgccctctgggaagcgttgccccggagaccaggcagaatagcactacgttttcccccatgaaaaaatagcactgtttcctcttctggaaaaggagaggggtggactaggtaatcaacacggtaatctacaaggtccttgctacttaagttctgtcaatttaagatctcagagctggaaggacttttttagtcattccagtccagtggactcattccacataaggaacttgaggcccggcgaggagaggaagtatttttccaatatgctacgcaagaaaacacctttcctcaagatctcaggtccagtattgagataaaggcctggataaataacagagaaggctagtgaagttgaaaattactgagaagcagagtagatctgaggctctgagaatgaatagtgtaggacacactgagaatattggagagagacggaattgtttctaagcagtggccctccagtatacaagttcaaggtccgcttcgagtgaagagggttgaccagtgctgctaaatgaggaatgtggaagaggatgaagctgaaaggaggtcaggcctcttgggaagaataacactactatttatcattcccttaatcttgtgccaaacaccgtgctaagccctttccattcatcatctcaatccccacaacagcctggttagatagacgttcttatccccattgtacagaggaggaaactgaagcttagagagcttaagagacgggctccagattccatggttaagaccagctctttcacccagctccaaagctgttggctgctaaccactacctctgctgccaggcagaggtgtgtgcatgactggcaggcaggtgaagatgtctgagaggcctggaaaacgcagtggacacagcaaaaaagacaaagaggaaggagtgcatttatgaggcattctaaaacagacatttattaaggatcaggcgctgtctgaggtgatttcatggatggaattttcattagtccacactccaatctttccaggtattctatgtaacccccaagtcacataggactgcagttcgggtcttaagagaagtaatatccttgtccgaggtctcagagctcctgagtggcagcagccagtaccctcactcattgtctaatgttctttttatgatactatggaggtctcccatgtgacagtgttctctgagagggcatctgtaatcggccttcaggtacccaatctactcctctcccaccgctccaccccagactgtatttaatagaacacagccacaagcagatgttcaaaggtagtccaattctgcttactggtttctaaggatagtccatttcctactatatagcccaggagtgctgtggcacactgactaatagccacccaaagatgtccgcagaccaattgctagaatccgtgaatatgtccctttatgtggccaaaaagactttgcagatgtgattaagttaaggagtttgaagtagggcgattatcttgtattaatccaacgtaatcgcaagggtccttataagagggaagcgggagggtcagagtcagagaaggtgtcacaacaatggcagcagaagtcagcataatggaaccaggatataaggaacctgggtagctgaaagaagctagaaaagataaggaaca

SEQ ID NO: 16939 - DNA, 1148 bp, Artificial sequence
  DNA replication origin
cggccaggtcgcgccgcgagcgagcttccgcgccgcccgcacgcgcgacctacctgggcgctccgcgcccccggatgctgcaggtacgggcccgtgcgaccccagcgggccgggggcagggtgcggggctgccgggggccggggtcgcgctcggcgccaccccgcccccacccgtccctggggcgcgcggcggacgcgcgggcgggctggcgggtgcggctgcaccgggatccccgcaccacgtcggggcggggagggggcgccccgctgcgctcacctggcggggccggggcgggagggcgcgggcggggcgccgggtggggctcggccggggcgggctggcggccgggacgcggcgccggagcgtgggcgtgcgctccagccgggcaggggcgggcgcaacccgcggagcccgtgcgtccggcacctccggaggaccccgtgccgccgcgaccccggctcggggctccgagggggcacacagcccgcggggagctagccgagagcggctgccagcgctcggctcccagggcgaatccgcctctcggctttcaaagatggcatttcctgggcctggcacgaaactccagagccaataaatcctccccgttccgcggacgatatggaatgatttatcaggtacctgcggtgagacagctgcagatgggggagtgtatgtgagagtgcccagcccccccgaaattcccattttcagctacctaaacttactgagaagttgcggttgccttaaaaattcatgggaagttgagacaacttgacacctgggttttccaagctggtggaaagagcttgtgacttggaaactggagacctccgttcaagttgggctcccccttggccagctggtgaccttggcaagttgtttaacctctctggtcctcagtttcctcccttgcaatcagctggtaataatgcccacctcgctgggttgttgagtggattaagtgggataaattatgtggaggtgtttggcaccgtgcccggcacaaagctagcaagcagttggcgtgatgtgaatttaattcgtttagagaccctcgtggctctcatttcaggaggaaattagaattaggaaaccatcttcagggcctagtggtggagtgacagaccctgtctctgtgcccagg

SEQ ID NO: 16940 - DNA, 965 bp, Artificial sequence
  DNA replication origin
agcgcagcggggcgccccctccccgccccgacgtggtgcggggatcccggtgcagccgcacccgccagcccgcccgcgcgtccgccgcgcgccccagggacgggtgggggcggggtggcgccgagcgcgaccccggcccccggcagccccgcaccctgcccccggcccgctggggtcgcacgggcccgtacctgcagcatccgggggcgcggagcgcccaggtaggtcgcgcgtgcgggcggcgcggaagctcgctcgcggcgcgacctggccgccgtctgagcatgcccagtgccgcccgcgggcggttcccgccggccgggctggccgcgacgggcccgcgcgccgggcggggggcgggcgtccgggctggcctgcggtgttctcccgcccccgccccgggctggcgcgccccgacgcatctcctaggggcaccggggctctccgccgagctccgggcaggtcctgagttccctcgcgcatgcatgcagccattcgttccacagccatgactgggcacctactgtgtgccaggccctcagtgatttcatgcctagggaaggcaagaagtcggcgcccaaagaaactttgaaatgaggagtcttgcacgacgggtgcgcggttgagctgaggtcccgctgacttccagtccagtgctcgtcccttggcactagtaagcttccctggttaaacctccccaaggctcgtgggacccctacctgatctgtgctcctgcttcccacctccgtctcatctcacacctgccttcctgcggatcctagagcgcctttctgtccatcaaacactcgaacttcactaacctcaggacattggcgcccgcctttccctctgtgggacgttcttgcccagcttttcacgtggccggcgccttctcattgtacataggtcccctcctcagagaggcctttcctgaccaccttcctcgattagccctctgctcctga

SEQ ID NO: 16941 - DNA, 947 bp, Artificial sequence
  DNA replication origin
aagcacagagaggataaggcagtggggaaaggacagagaatgcctcctgctgagcccgggggcgctgggtggagctctgcggggggcgtcgcctgcccctccagggggctcctccttccgggggctccggccccgcccggctccgagcatgcccagtgcgctccccgcccgtccgagtggtgctgagcgggcgccgcggctccaggttttgctggcgactcgaggccgggccgggccgggcggggcgcgggcggtcctgcccctggactccgggctccgtcggaaatccccccgacgcgatgcacgggcggcacccgctgcagcggcgctatcccgggacgtgcgactccgggacaaggaccgaaatgaggttccaggggctgccgaggcctcagtctatccctggaacgactgcccccaggacctggcacccaggcccgactggagggttccaaccatctctgcatcccttcgttcacatattcaacaaataatgtttgagcgcctagtgtgtgccagacagtgttgcaggggggtcactgcagtaaagacaagcagagctacagccccaaagctgacatttaggagggaaatacaacatgagaattaaacaaatcggaggaaaagccaaagtgaccaacctcatctgctcctctgcctccttgccgttccctaagcggtccggcgctcttttgggtcttggcactggctgttccctcggccaggaatgctcttccctgcttatctgcgtggctgaaataccactatcaccttctcagtgtcacccaatcagaccgtccatcagctcaagggccctatccgaccgcttcactgaaaattcactgcttacctccagccccaaatctcctgaccctgctctttttcctcttagaacttatcactttctaatataatgcatagtttgctaatttgctgtttatctgtta

SEQ ID NO: 16942 - DNA, 1112 bp, Artificial sequence
  DNA replication origin
cgcccctctccactggcatctgcccggtggaggcgccactgcgctctgcctccgccccagcaagcgcgtgtccacgcgggcgcgccacgccagccgtgcgccccagcggctcgccgtgcgcccgcgccccaggtgcccactggctcgcgcgccctccgtctgcgccttggagacccgcggcggcgatcgctcggagccgccttggaccgcggcctcgggtccatcacactccaggggcggagcgaggcaccgagacgtcagggcggagaactagcgccgggctagcgcgccctcccggcggctgccggcgtcccacgtcctcggctggcgcggccggcggcggcggcgaccgggagatgcagtgagcggcggcgctggggcgcagccaggcggccgggagggcgggggccagaggctgagcccgggcgagcccgccgtgcgcacagctctgcccgccgcccctggagcggatccccagccgtccctgggcgttctcccgggttctagcaaagccccccggggtgcccatcagtttccttgggtgactacagcgtgtgttttttctttcctctttcccctgcctgtgtgcccttctccaggatggcagaggcggaattgcacaaggaaaggctgcaagccatagcagtaagtccactttcattttattttcttgctctattgtctggggtggaagggggcccccgagggtttcggggcaagcggcatgccagcacagtagccgcaggtcatatgttccaggggctaaaactctgtcagggctcagctaggctgccttttcttttctatgtctatagatggagacccccaagggcgcgctttggactgaggatttgaatgtggaagattggcttaaaaaaagatgcttgctgctgggctttggggaaggactaaacagaggcttggggtggggggacgactccaggaatattatgaccgaatgctcaggcatacgttggcttcatagcctggagaaccaagagaagggtgacctgaacggtggctgccatcctctctgcggaagctgtcctcctgttaagtggaaaaccaggagtcagcgactcagccagccacgcggtagaacctcctcccag

SEQ ID NO: 16943 - DNA, 1022 bp, Artificial sequence
  DNA replication origin
ataaaaaaaaaaaagaaaaagggtggagagatggaggggagggtggggggatggagaggagggtggagggaaagaagagagggtagggggaaagagggtagggtgggggggtggagggaaagaggagagggttgggggagagaggggagggtggggggatggaagggagggtggagggaagaggagaggatggaggggtagaggggagggtgaagggaaagaggggagggtgggggatggaggagagggtggagagaaaggagagggtgggggggtggaagggagggtggagggaaaggggagggtggaaagatagaggttagggtggagggaaagaggggagggtggggggatggaggggagggtagagagatagaggagaagttggaaggatagaggggagggtggaagggtagaggggagggtggaaggaaagaggggagggtgagggggatggaggggaagttggagggatagaggggaggtgggaaaaaaagaggcctggagctggtgttaggaggccagggtctaaaccccacttgaaaacctacctggtggatgacatgcacagactctctgggcctcagtttcccattcacatataagatggggaggcctttatccacttccctaagagggttgttgtgacaattcagagcagtgttagagtccaaagtcgggtgaatgcccctggggagtgtacaggaccatcctttatagtgtgagtagaaagtcttagcatttttattttttactcaacaagaaattaggctttacaaatatttgatgtatggatggaccatgacatccacaatcagctgcgtgttctgggcatgtcctcaaagaaagaagggactttgcaaacgggaaggggttgggagctctatcctcattcattcccttgcagcctttgtgatgtttgattgcaatttgccacttctggtgaggcgggtacgcagaatacattatccagcttaaactcaacaaaccctgtttcaacaaactgaagaagtggcttaaaa

SEQ ID NO: 16944 - DNA, 758 bp, Artificial sequence
  DNA replication origin
cttccgaggactcccagatttccagcccttcctcggcaaccccttcctcggccaccccttcctcacactcgaggacactccagcccctcccctccccagcttggacacccacctctgggcgcccgctcccgggggcgcagtcctggggttctgctccagtccagcgccgcgcggccgctgcctcccgctccgggggtccaggagactccgggggtccaggagactccgggggaaggcgagcggcagccccgggctggggccagcgcatctgcagggagtggtagcctccgggcgcgctggagggcggggagccccgcccgcctgctcctggggcccgccccttccccgcctcctcgcttcccctccagtagcccagcgcccacggaccgcccctccctcccctcccctccccatctacccacaccttctcctctcagtggcttcggcggaatcgatgcacaaacgaagaaatgaatgaatgcagagactggagagagggaaagacggagggatggatggggcgggcaaagctgagtgtttcctaactcaggggagcgctgtgtctgggtatatggatacttgttagcgcacggggctttggagcggggtggcgtgtcgctgtgtgtgcatgtggacgtgtgtgttggtgtacacatatgtgcgcatgagcgtatgtggaagtgtgtgagtgcctgtgtgcgctcaaatgccaggagccgctgagttcccactcaggcggggaaacagcccctcgtccc

SEQ ID NO: 16945 - DNA, 854 bp, Artificial sequence
  DNA replication origin
gccccgtgcgctaacaagtatccatatacccagacacagcgctcccctgagttaggaaacactcagctttgcccgccccatccatccctccgtctttccctctctccagtctctgcattcattcatttcttcgtttgtgcatcgattccgccgaagccactgagaggagaaggtgtgggtagatggggaggggaggggagggaggggcggtccgtgggcgctgggctactggaggggaagcgaggaggcggggaaggggcgggccccaggagcaggcgggcggggctccccgccctccagcgcgcccggaggctaccactccctgcagatgcgctggccccagcccggggctgccgctcgccttcccccggagtctcctggacccccggagtctcctggacccccggagcgggaggcagcggccgcgcggcgctggactggagcagaaccccaggactgcgcccccgggagcgggcgcccagaggtgggtgtccaagctggggaggggaggggctggagtgtcctcgagtgtgaggaaggggtggccgaggaaggggttgccgaggaagggctggaaatctgggagtcctcggaagcaccgcgggcttttaaagggctttttgtggtccttgtcgagcggagcgtgtgctgggagagggcccgggtggaggggctgtggccatgtggatttgaattcctaggtttgtgggagggccaagcctttggctgctttgttcaatgcttatcatttatatatgctttaaaaactaaacgcaggactccgcttctccctgtatacacacagagctgggctgtgtgtccttttcaggaaaagcagtgaaatcaaatgtggt

SEQ ID NO: 16946 - DNA, 1462 bp, Artificial sequence
  DNA replication origin
gagtgaatttctctggtttgtaggaggtgccttagttagacccagccaggaagcagagctcctatcgccatacctgggctagcaggggggccaagcctggctcaccaggctgaccagtctagcaagattagaacatcagagcagaggccaggaacagtgctggcagccaggtgcttggctgaggcccctggctcccttagcaggtgggacagctgagcagagctgccctgagcccgcctcccctgctcttccccactgggagggagggctggcaaagccctggctctgcctccctgcagctctgccactcaggtctcccatggtaagtctctccttccccagcacctgtccattcctaccttttggaagcaccaggaggtgggcctgggtcctctgctgcctcttcaagccttcatactgggctcgcaggaactggatgctgagtgggggccctttcccaggggcctgagtcctggagccctcagccattaagtgagacctaagctgccagaagtggggcagggctgggcacgggcagggcaacccctccatccggatccgggagaaaagcaaacacagctgggtggggcaggacctggggaggggagagagagggagggggcagtgagggagaaggagaagtgacgggcaaaaggagggtggaaagaggagtgggactgaggaaggagatagaaaaataagggggaaggagaaagatgaaggggaagaggaggtagggatagggagaaatgtgggggaggagaaaggtgggagacagtggcagtaagaggagaaggaaatgtcagaggaaagaaggggcagcgaagggggaaagactggaggaaggaggtgatagtgacaagcggggattaatggggcgagagaagaaagagagggaggaagatggagacaggcaggaggaggcagggaaaggagtgatggggagtgggagaccgagaagtaaggggaggactgggggagcaaagagaaaggcaagcccagctgctcagagcccttcaggggggtcaagaaggtgtcttattccaggtccttccattgcttgatcctaaagtttagaatccaattcccagtgccacggtgaagtctcccctttcctggcagagctgggactggggctggggagtgctaagctcgcgctctgctcacacattttggactggaacgtggccacttttcagcaaacctgccggttgggtttgcagtagttcaaagaacaccctcgggagcttcacaaggtcggtgcctctggatgtgtgccccgcggccacaccctaaagaaacccagtagcaaagatctccccaagatctccactcagaccccaacacacaccccaggtgaaaattcagccctaaagtcagccatgggacagagcccaggggaatcttggcctcgggccagccctaccccttggacatttggtgcagcctctgccgtctcagc

SEQ ID NO: 16947 - DNA, 1199 bp, Artificial sequence
  DNA replication origin
acagcgtgaggagtccccacgctgcgcctcctgcaccctcccgtccgggcagccccgactggaggaagatgagggaatggaaggggtccgcccttggccccccatctgtatccagattcaggccccaggcaaggatagggagggcccttgcagaaggcacgggtcggtggccgccgctgcctttccgtatgtgaagtgatccacccgcagcgggggtagtgatctccctttgggagcgggtctaggccggagacccccgcctgcctccacccatgcccgaccccaaaggtgacgcgtgctgtatccgcactaagggggcggattgcggctggagaccccctggcacgtgcaggtctgtccaggaggcccgagggccccaggtgaccgcgaggaagtgaggtccgggccgcgcccacgggactcctgtggcgcagggcgcgtttccggcagcagtggctttggaatgactgagtccccaaggttgggcccgggggcctcggctgccctgcccgtccatgattcaccctcagtcggtgggttttgctggagccagggttcctcctgggagcagccgcgccctgctgcctgctcgccgacctatcggtatcccgatcgttgttttgtcctcttaaaaatgcccaaggcgaaacagccttcccatgtttgaaagttattgcaagcctaaaaccttgtagactgggaaacccagagcctaacgcgcagtgtctagtccaatgtagccactccagaaatatttgttaaatgcagcgtcagaaaagtgagtggaggaaattgatactgctcgaacggtagaagacccctcgccagcgcctaccctgcgattacccctccctacctgcgggaagcagaggagggcgggtcctcgcccgcctcgggtgccctgacctgtttggtgccgggtgggcttcggaaacagaagtgtgtctgcaatgtgtccccgatccttttgttcctttgattattattgactctcagtgttttttcctcatatgttgattgccactgtcatcttttatcttcctctcaatcagttttttcttagtgggattctcattttagcagccctcatgtgttgaaaagatccttagtagtgaattgtctttcatatactttttttccaagcacctattgtgtgacaaattattaatccattcctggggaagggagtggggctggga

SEQ ID NO: 16948 - DNA, 1187 bp, Artificial sequence
  DNA replication origin
gccgctgcttcccgcagtcccaggccgagacgccgcgtccctttcccctggcgatgcggaggggcggcctccgcacctcccgccaccgccttccccacctcccgccaccgccttccccagttacagaggccgcgcgcggcgccggcaccctggccttccccggtagcgcgtaccttgctctcgatctgcttcaccatcttggctgctggagtctgacgagcggctgtaaggaccgatggaaatggatccaaagcaccaaacagagcttcaagactcgctgcttgctctctccctttataaactggcacgcccggcgtgcgtgtggcgggggcgcgcgcgcccggccggacctccgcgcccgtcgctgcgccccggccacgccccgcccctggagcctgcgagccgggatcggggcggggctggcgcaagcgtggggcggagctccagggcttcggctcctgtaaccccaagcccagctcgcactccagctggaagtggggatcagcactgcgcgtgacggtgggaggcggggagacggacagtcacccccagagacacaaggtccctcccgggtcacctggggatgcgtccgccgggcctgaatcgaacacgcccacgctcgagatggggaccgcccaggcagggctggattcctcgaaaagggccgccacgccccggcccccccagccacgtgaaccccacaaagtgctgagtaacggtgaccgggaagtatctcggtgtgtacgtccttgcctcctctccggaatttaccgtgaccgttctcttctctgtaacctccttctgttctttcattttcactgctgagcccgctgctccagcttgacacagcggtttagtgcggtagaaacgaccgggggactggttgggctcttgaccatcagacagctgcgtgtgagatggaagtgccactgggttgagctctgcaacttagttacgcagttgtgaccctggaaaggtcctgacctcctgaagtctcagtgtttccttctgtagaacgggaatcatgatggtctcaatctcacggtggtggtattttgagggttaatagtgcttgcaaaggacggtgcttggcacatagtaaacactccatagatagttcttactgttcggtgtcttgcagggactgattgggcctggccaccttatacagcatttacaatggcaca

SEQ ID NO: 16949 - DNA, 1126 bp, Artificial sequence
  DNA replication origin
aagtcggacagcagcttgcggacgaacatgagctcgctgcggaagttgacttcgcccacgctggacgaatcatccaccaggaagacaagctccaggcgctcgctgagctcccgcagcagccgcacgcgtcgccggaacgcctggcccagccgctccactctgctccccgccgcttcgtcgccaggagcgggcggcgcggggatactcccgggggccccgggcgcggtctcggggaagaggcggaagctgaaattgcgcgacggggacatctgctgaaaggtcgcccagcccgaaacgagcgccagaccccagcaacaaaaggccaggcgaggccacatcgcgctggagacagagcggctgccccggagcgcaggcggcggctcgggcgggaagaggcgctgggcggccggactcgcagaggggcgtgcgcggagctgggcgcggggcagcggccaagagcctcagcgccctttcatctgacactggggacagacacaatccagactcctcagcagctcgggaactccggagggaacggcgcgcgctctctacccctctcgctctcctctttttttcttccctctctcctcctcctctctctccctgaagcctataaaatgtttgaaggaaagggggcagtcaagaaaaatctcccgcttccctccttctctccctctctccctctccccgctcctgtctactttctgtatctgtgactctatctccctcctccccctctcattctcctcccgggatcaagccaaaggctcggagattccatgacaccagaaccccgcgtctgtcaggctgtcaacattcccgcagcaagcgcaccagcgccgaagccctgattgatcccatatgtctggcaggagctgcagaggaattcactggagatggatccagataccgagagtgccacagtaattggaaacactttgtagacgaaaacatacacgcggactggccagggagttgaaagcatcctttgaaaactgcttgctcaccttttgtgtttcttttcccccattcagtgtcccaaagccctcgccaaatagatgattgtacaattttcctgatggggatttctaatcagtggtgtgtgtgagcgtgcagattaagccct

SEQ ID NO: 16950 - DNA, 1198 bp, Artificial sequence
  DNA replication origin
ggggcgggcggagggccgggctcggctggcggtggggcgggggccgccgggactgggcgcgcggcctgaagccagcccgggggcggcaggagagggacgcgcggcggcagcgagcgcaggtaagggggccggcgcggcgtgtggggacggcgccccctgggcgcgaagccagaggccgcggcgactgctcggcccgccacacggcgcgctgggctcacactgtcccgccgcggacgggctttgtggttgggggcgcgcgtgcgagtgccagtgagagtgtgggtgcgcgctgtgggccgcggcgcgggtgggtggccgtgcgttcttgcgagccggcctgcaggaggcgaggctcccctggcctcccgcacccagcggcggaccgagcccctggagggaagttgccgcagccgcccgggccgccggccctcctgtcccgcgccaggtcagtgcgccccggggcccgcccagtgacacgtaggtggcctccggttacctgggtcggggtgggtgcgcgggagggcttgcgaggggccctcgaaattctcccaaaacctcgtcccgctggacttgcacctccgaggggtccctgcgcccctggggctccgcacctctcgcttcccactgacgactcggttgtcccccaccaccgggctgaggacttttaactaagtttctgtccagccgcctaacaaacgtgcttaacaagtaacaggaggttgtaaggcaagggagggacctggctttgaaagttgatggttttgaaatcgacggctcctttgacttgcgtaggactcctttgtggtgaatggatttaaagtttattcttgtttttctttgctgccatttggtctttgcaatgttaagagtgaaggcattcaggacttgctgctgcctgctgtctggggcctgaggttgtggctctccgcttctgctctcctctcttcatttttgttgaaatccgtggattttttcataaatgtgggtgctggcttgtttcactatggacgcgtcgtttcctatggggttagatagatattggtaaacataaatattgaaaatgtgatgatcacatattgatgatcacagcgaaatcctctattccttcaggctctaacagtttgtttttcacgtatttgcataagtgtgtttgctcagctaagcataattggtaagccagaggtctgtgattcagagt

SEQ ID NO: 16951 - DNA, 808 bp, Artificial sequence
  DNA replication origin
tgcagtccccgcccttaattactctcactaaaattgatagtttacacttgcaaagctacactgggaaagcggaagagaaatttataatcgtggatatggagaactaggggagcagacacacttgctttcgtttacagatccagtgaagtgaaaaatcagaactagaaacgtatgcaccttcctagcagcaaagccgcttctgcgttcttcgcagcctccagtgcagggcggcgctgggagaaactttgcgccttctggaaagtttagaaagtgagccacgaaagagaggccacatttccggggttttgcgggccccgcgatgttttccagagcttttcgagtgggaagaggagagcgacaacgtgaaaatgccccgtgccggggcgtccaccggagtcctgccagctgtccggcgctggggtaagcgcaggaggggcgggggtgggacccgagctggcggccacgggtctcccgctgcgggtgtgtcgactcgggggcggggcgggggaggctgctgagataatgaatgggaggctaaggccaccccccagccccggccctgccaccaccgtgggctgtcgagccaatgaatggaggagggggcgcagaggtcaggggcgctgggggcgccacaccaggtaaggggtccagcttgggagcggggagggcggactctgggggttcgggtgttgctgacttgtgctacgtggaacaagcagaaaagaaggaaggcggaggaagagaggaggctggcgtcggcgctgctcctctggccctccctctgcgccccctcctcctgccagcgcgc

SEQ ID NO: 16952 - DNA, 1057 bp, Artificial sequence
  DNA replication origin
gtccgccctccccgctcccaagctggaccccttacctggtgtggcgcccccagcgcccctgacctctgcgccccctcctccattcattggctcgacagcccacggtggtggcagggccggggctggggggtggccttagcctcccattcattatctcagcagcctcccccgccccgcccccgagtcgacacacccgcagcgggagacccgtggccgccagctcgggtcccacccccgcccctcctgcgcttaccccagcgccggacagctggcaggactccggtggacgccccggcacggggcattttcacgttgtcgctctcctcttcccactcgaaaagctctggaaaacatcgcggggcccgcaaaaccccggaaatgtggcctctctttcgtggctcactttctaaactttccagaaggcgcaaagtttctcccagcgccgccctgcactggaggctgcgaagaacgcagaagcggctttgctgctaggaaggtgcatacgtttctagttctgatttttcacttcactggatctgtaaacgaaagcaagtgtgtctgctcccctagttctccatatccacgattataaatttctcttccgctttcccagtgtagctttgcaagtgtaaactatcaattttagtgagagtaattaagggcggggactgcacacctggaggtgtgggtgggagcggcgcgggactaaggcctagggaacattctcaggagagtggcagccacagggattcgcccaggtcttataacacacccactcgatggggtctccctagccacgccacctcacaacacccatctcccacttctggcttcccaggatttccggagtgatcacaattatcggcctctcgctccacagctaaggccaccgcatatcaaaaatagcagcgtgtgagtaaaagtttcatgagccctcgccttgaaatggcacagaggacacagcacaccagcagtaaggcatggggactcggcaggactgatctgattgagagaaacgcaggacagcgaggcggggctatgttggtggtggccacca

SEQ ID NO: 16953 - DNA, 1783 bp, Artificial sequence
  DNA replication origin
ccctgccgcaccgcgagccgcgagccccccggccgcgccctgcccccccagcccctccctcgttccctccccggcgcaacatggctgcggccgccgcctccgcctcccaggatgagctgagtaagtgccgcggccgaacctgcggccgcgagccggaacgggcgccgcgcggtgccgggggccggcggccgcatgagggctggggcgccaggcccggtgggcgggcggcggccgcggcgtacggggagctggggagcccgggcctggcggacgggcggggcgcggaccgtcgccgctggcgtttgtaggcctcaggtttgcaccgtcacgttgcgaaattgaaaccggagccccgggcggagccacctctgcccgcgatccgccctggcccggggtcgggggagcccagccccctgcccactgagcctcggctggcgggagggccggagccccggggtgacgggcagtgtccgcccgtcccgtctgaccccgcctggccccgggtccccgacggctggttgagttatagaaatggagctttcgggaagggggagaaggtgcctttttgtgacactctagtaatcagccgaaaggtcacgaataggcggtgaccctcagatggagcagggagggcggagagggtcgccggtcgaaccgcaggagaaaccacggggtgacagcgctttcagaaaggagagttagtgccccctcgatcgtacgcggtgcagccttcccggggacggcggtccctgtctggggagagcggtggtcaccctgaatcccaggccgccccgcccgccgccggggttcgcctcaatgctttgtgggaagtgtagttccggggcgccgcggacccacgctggggtcataaataccgaagtttcataggacataggacatgtgagataatttctgattgcgttttgagtgttctcccccccaagggttttctttctttccctttttttttttctcccaatgctgcccttcagtttatggcaaaaacaagaaaggtgttatttgaagatgatgtgggttttaaatggaataaagcatgggtgaggtgttgcaagctttatgaagcttacgttgttaaagccgcttctgaatttccatatgaaagtagttatacacgtaatgtatgtttttctggtgcttgtcagtttaaagccacttttatatacatgatctcacttttgccctcatagcaaccttgtgaggcagataggtaggaattatccttgttttaaagaggaggcaggtttggagagattaagttccttgctgctttgacacagaactggtggagcaggagtactgtttgctttttttgaagctgaagtaaacacttggtgtgatcctgagcagattggagagtcggaggagacaaggtctcatggtgcgattagagagagaagcgggctacagattgctcttctgtcggttccacgtggaagcaccaccaggccttctgagatcagttccatgttttgttttaattggaagaaaagtacacataccataaaatttcccgtcctagccattttttaagtgtacagttcagtgggattgagtacattcacactgttgtgtaatcatcaccaccatccatttccagaactcttcgtcttgtaaaacggaaacttgatacccattaaacaacaaatcctcattccctcctcccttcggcccctggcgaccatcattgtactttctgtccctgtgattttgagtattcttcctacctcgtgtgaatggaatcatacagaatttgtgactggtt

SEQ ID NO: 16954 - DNA, 1201 bp, Artificial sequence
  DNA replication origin
tgttggccaggctggtctcgacctcctgacctcaggtgatccacccacctaggcctcccaaagtgctgggatgaggcactttgggaggcataagccaccatgcccggccagaagattcagtatcagtcagaaagatgtcaattctattgatcaattctgccatcatagagataaggggttaaataaattgtagtacaatgaaacaatggggagaagagtgtctgtacaaaaactctggaaagatgtaatacacttctaatatggtttgtcttcaaggaagataactaaggaatgcctgaaggacagggataagagaaaaaaaagtcactgcccgtgtcctcttttcttaccaaactattcaatcctaaagacattagaaggagccaagcaaggtgactgtctgctggggtttggggtgggagaacctctatggcccacagcagagcaaagaggtcatgcaccgaggctggctgcctggcacagggagtcaaagcccagagctgtgtgtgtgtgtgctgtatgtgtgtgtgtgttatatatgtatgttgtatatgtgtgtgtgtgagtgtgtgtgtgtggacactggtgagcaggaagaaggaggggttgggcagtgtgttgtggcctgatgaggggagttggagcccaagcaaaatgaacatggcttgagtcatagcagggtttcccagatggtgtatcagagcccaacaacagtgaagtcatccgtgtgggtagggcaggggcagcagggcctgattgagggtgtcagagtccaagtagggtgagaagggcattggaatcgcagggctgcctggtgtgaggagtcaaagtccacacagtatggagggcatcgtgcctgggggcagcttggcatggagtttaagggcccaaagtaaggaaggtgtgcacgtgaaggggtggcctggtgtgaagtatgtgatccctagcagaggtaggagggtatcacgtgcgagtgagtgacctggtatgggcggttggatcccaaggaggctgaggaggtgctgatgcatggatagcttggcagggaggtcagagcctgaggggagcttctacctggcagcatggcccagcatgagcagacagagctttgggaaggaaagactaaccacatggggaggcaagagtaggggccaggagctgcaggatgtcagagcttgagaggaatggaggagcatctgca

SEQ ID NO: 16955 - DNA, 1111 bp, Artificial sequence
  DNA replication origin
cccttttctccctcctctaacccccttgctttcttcctgccaagtttctagacgccccagtggaggaggtttgctcttagacctcctccccttacgtcgaaatgaccgctgggtcttgcactcggaggatcttgggagccgacgtcccgacgcctcccgcccccgcagttccttggagagcttggagccgcgcgccggagggaataggaaagcttggttacaacccgggacacccggtagcttcctgcacccgggagggggctggccagggaacttgctggactgcacaactgggggagggtagaagaagaaagatcggggtggggattcgggaatgggcaagcgggcggcgggcggcgggaggcgagggtgggagcaaagggcgagcgggcaaaggccgggcgccgcgccaggccccctcctcgggcgggcgagactttcccgggacctggcccctctgcggccagaccctttccaggagggcttctggacttgtagcgagtttggaagcccagcggttgcttttttggggaaagggacaaagatgtgtgaactctaaagaagttgaactcatagaaataacgactagaatgatggttgccagaggctgggagcgggttcgggggggaatgggggcttgttggccaaagggtacgaagttcagagacgagaggagtaggttctgagatctgttgcacagcagagtgactagagccaataatgtgtatttcgaaataacagagtaaactgcaaatgtctcaccgtaaaaatgatacgtagggcctggcgcggtggctcacgcctgtaatcccagcactatggaaggtcgaggcgggcgaatcatttgagctcaggagttctagaccagtctggccaacatggggaaaccccgtctctactaaaagtacaaaaattagctgggcgtggtggcgggcgcctgtaatcccagctactcaggaggctgagacaggagaaccgcttgaacccgggagacggaggttgcagtgagctgagatcgcgccattgcacttcagcctgggcgacagagcgagactccgtcacaaaaaaagtcttaattttaaaaaaagaaaagaaggaacaaccccgggct

SEQ ID NO: 16956 - DNA, 1185 bp, Artificial sequence
  DNA replication origin
agcacatcttgcaccgcccttaatccatttaaccctgagtggacacagcacatgtttcagagagcacatggttgggggtaaggtcatagatcaacagcatcccaaggcagaagaatttttcttagtacagaacaaagtgaagtctcccatgtctacttctttctacacagacacagcaacaatctgatttctctatcttttccccacctttcccccttttctattccgcaaaaccgccatcgtcatcatggcccgttctcaatgagctgttgggtacacctcccagacagggtggtggccgggcagaggggctcctcacttcccagaaggggcagccgggcagaggcgccccccacctcccggacgggtcagctggccaggtgggggctgaccccccacctccctcccgggcggggtggctgccgggcggagacgctcctggcttcccagacggggtggcagccgggcggaggggctcctcacttctcagacggggcggctgccgggcggaggggcttctcacatcccagacggggtcgaggccgggcagaggcgctccccacatctcagacgatgggcggccgggcagagacgctcctcacttcctagataggatggcggccgggaagaggcgctcctcacttcccagactgggcagccgggcagaggggctcctcgcatcccagacgatgggcggccaggcagagacgctcctcacttcccagacggggtggcggccgggcagaggctgcaatctcggcactttgggaggccaaggcaggcggctgggaggtggaggttgtagggagccgagatcatgccactgcactccagcctgggcaacattgagcactgagtgaacgagactctgtctgcaatcccggcacctcggggggctgaggctggcggatcactcgcggttaggagctggagaccagcgcggttaggagctggagaccagcccggccaacacagcgaaaccccgtctccaccaaaaaaatacgaaaaccagtcaggcgtggaggcgcgcgcctgcaatcgcaggcactcggcaggctgaggcaggagaatcaggcagggaggttgcagtgagcagagatggtggcagcacagtccagctttggctcggcatcagagggagaccgtggggagagggagaggagagggagggggagggggagggag

SEQ ID NO: 16957 - DNA, 1320 bp, Artificial sequence
  DNA replication origin
ggggcggctggccggggggagggctgacccccccacctccctcccggacggggcggctggccaggcggggggctgacccccccacctccctcccggatggggcggctggccgggtgggggggctgacccccccatctccctcccggacggggtggctggccaggctgaggggctcctcacttcccagtaggggcggccgggcagaggcgcccctcacctcccggacggggcggctggccgggcgcggggctgacccccccacctccctcccggacggcacggctggccaggcggggggctgacccccccacctccctcccggacggcacggctggccggacggcacggctggccgggcgggggggctgaccccccacctccctcccggatggggcggctggccgggcggggggctggccccccccacctccctcccggacggggtggctgccgggcggagacgctcctcacttcccagatggggtggctgctgggcggagaggctcctcacttctcagacggggcagctgccgggcggaggggctcctcacttctcagacggggtggttgccaggcagagggtctcctcacttctcagacggggcggccgggcagagacgctcctcacctcccagacggggtctcggccgggcagaggcgctcctcacatcccagatggggcggcggggcagaggcgctccccacatctcagacgatgggcggccgggcagagacgctcctcacttcctagatgtgatggcggctgggaagaggcgctcctcacttcctagatgggatggcggccgggcggagacgctcctcactttccagactgggcagccgggcagaggggctcctcacatcccagacgatgggcggccaggcagagacgctcctcacttcccagacggggtggcggccgggcagaggctgcaatctcggcactttgggaggccaaggcaggcggctgggaggtgtaggttgtagtgagccgagatcacgccactgcactccagcctgggcaccattgagcactgagtgaacgagactccatctgcaatcccggcacctcgggaggccgaggttggcggatcactcgcggttaggggctggagaccggcccggccaacacagcgaaaccccgtctccaccaaaaccaatcaggcgtggcggcgcgtgcctgcaatcgcaggcattcggcagactgaggcaggagaatcaggcagggaggttgcagtgagccgagatggcagcagtacagtccagcttcggctccgcatgagagggagaccatggggagacggagacggagacggagac

SEQ ID NO: 16958 - DNA, 939 bp, Artificial sequence
  DNA replication origin
aggtgggggggtcagccccccgcccggccagccgccccgtccgggagggaggtggggggggggtcagcccccctgcccggccagccaccccgtccgggaggtgaggggcgcctctgcccggccgcccctactgggaagtgaggagcccctctgcccggccagccgccccgtccgggagggaggtggggggggtcagcccccccgcccggccagccgccccgtccgggaggtgaggggcgcctctgcccggccgcccctactgggaagtgaggagcccctctgcccagccagccgccccgtccgggagggaggtggggggttcagccccccgcccggccagccgccccgtccgggagggaggtggggggggtcagcccccctgcccggccagccgccccgtccgggaggtgaggggcgcctctgcccggccgcccctactgggaagtgaggagcccctctgcccggccaccaccccgtctgggaggtgtgcccaatagctcattgagaacgggccaggatgacaatggcggctttgtggaatagaaaggcgggaaaggtggggaaaagattgagagatcggatggttgccgtgtctgtgtggaaggaagtagacatgggagacttttcattttgttctgcactaagaaaaattcctctgccttgggatcctgttgatctgtgaccttacccccaaccctgtgctctctgaaacatgtgctgtgtccactcagagttaaatggattaagggcggtgcaagatgtgctttgttaaacagatgcttgaaggcagcatgctcgttaagagtcatcaccaatccctaatctcaagtaaccagggacacaaacactgcggaaggccgcagggtcctctgcctaggaaaaccagagacctttgttcacttgtttatctgctgaccttccctccactattgtcccatg

SEQ ID NO: 16959 - DNA, 1290 bp, Artificial sequence
  DNA replication origin
gccgggtgggctggggcggcggggcgggcgcagctgcttccccgccccggggcggcacccgcgctcggggctggcggctcctccccgcccggccgggcccagcagcccctaggagcccagcgccgccgccatgtcctccggggctagcgcgagcgccctgcagcgcttggtagagcagctcaagttggaggctggcgtggagaggatcaaggtgcgggccccgggtacccacgctccggtccttccgcccgcggggcgtgagaagaggaggccggcggcccggaccgggcgccagcgggggactcggtggcggcggcgaggcctcggcggggcgcgggggcggtggggtccgcggtgagggagggcgcggggcaagccgggggcccgggcctgacgggaggaagccgcgcctggggggccccgcggtcgtggtcggtcccggtccctgggggtgcgcccactccagaaggcggccgtggtcagttcctcggagggcgcaagggatgccggcgacgcgcgggccgggagggtggacccagggctggggaggccaccgcagggcggcgaattggtgatggattggtaggatgagagcgagagggaggagagccaggatgctcgggtttctgtcgtcgtgacagggtggacggcgctgccacccgccgaggtagagaggagggggaacaggtttggggaaatgatgagttcggctgcggacctggggactccggggagtcatccgggaggtatttgtcctcatggcctgaagctcagcgcccagggctgaaagaggtcattcaagtgcattggggcgaaaaagcctcttctatgaagagcagagctcagagcctgggacccggggaccagccacaccgatggccggtggccgagagaagaggaaataagagacagcaaggtttccgagcaaggcctagagaagaggaaataagagacagcaaggtttccgagcaaggaagtagggatttccaaaaactgggggctcagtcaacatgtccagcgtttagtcagttggctaaaaggcgtctgttgtagagctgtgtttagctacgagtgcagcattatttgcagaagatctgtaagaaggaacacaaccaggatagtccctgtgcctcagtttctcctttgctgtgtgcctggcactgctacagggaatagggtggttctggaggggaaggtaaacagcaacttaacggatacatagcatcgcttcatgtactaagtggagtgaagataataaacagggtaaagggagagagggctgtggaatgc

SEQ ID NO: 16960 - DNA, 1010 bp, Artificial sequence
  DNA replication origin
tactaagtggagtgaagataataaacagggtaaagggagagagggctgtggaatgcagaggtctggtggcttatgtgttagtaaaagcagaatctggactgtcatagggtaggcagacgttttttctttttaaagaaacctagttttaaagaggaaataacgtgtttttttaacttaggaaatgaaaagccatgttttagggttgagaggaagtaacaaattatatttttaggttccagggaagaaacaaatggaagccaattgctggtagaggagacagggctacgggggggtgggggattggtggcacagcttctgagacaggaagaaagaaggtaagggtgtgtgtaaagataagtttctagatatgggctaaacttgtatggtgacacttttctttgtgaaataggaggccaggttttcttctaaggcagaggaaaggggactaagggagtggcccctgagcaggcacgcagatgcgctgtgactgaagacccagctgctgtgacaagggagactgctggtcatatttgtgattttttttttttcctgcagcaatctttaccatcctggaatgtgagtgctgaaggtgaacggtagttgaaagaggagtaagttagcaggggaggtatgccagaaaggtggaggtggggccggagggcaaggcgtgtgaaggtctggccagaaagaggctgagcctagatggatagagaaggaatgcagccagcctcctggtgataggtgagacagaaggggaggaggtgatgcctggtgatctcggtgaggtcagagcagaataaaggaagaataaaggaggcagcaccctggatgggaaggagagattgtgatcagagagtaggatactggagtgtaaaatttcagaagtggagcagttacaggtgttgtaactgtatctgttggcattgaggagaaggctgtttgaggggaagaagtcagggaactgaaatgagggttgttggaaattcacaaagacaatgtggggacatgag

SEQ ID NO: 16961 - DNA, 1623 bp, Artificial sequence
  DNA replication origin
tgggcgtggaccgatgggggcaccgcccctgggagaggcgggcgccgcggttccgggggcgggacgcgccgaggagtggggcgcgagccgccggttttgattagtgcgcggagctgcggcggtggagctgctcggccgggagcccggcggcgagacggagaggcggcggaggtgcccgcgcgcagggtctggtgggcggccgcgaggctcgggagaggcgaaccggagcgcgggaccgcggtcgccccgaccagagccgggagaccgcagcacccgcagccgcccgcgagcgcgccgaagacagcgcgcaggcgagagcgcgcgggcgggggcgcgcaggccctgcccgccccttccgtccccacccccctccgccctttcctctccccaccttcctctcgcctcccgcgcccccgcaccgggcgcccaccctgtcctcctcctgcgggagcgttgtccgtgttggcggccgcagcgggccgggccggtccggcgggccgggggatggcgctgctggacctggccttggagggaatggccgtcttcgggttcgtcctcttcttggtgctgtggctgatgcatttcatggctatcatctacacgtgagtgagggaccgcaggaggggctcggggcaggggtccgggcctcggagacaggcgagaatgggaaacgtttgcgctttgaaggggactgggctcgggcgggggtggagaaagctgatcgtcaggctgttccccccgttccctcgcccctcggaccggcggtggcggtggtctttgcgagggaaaagtgttgggcgtgggaagggtttgctgggttgcaggcgactgcccagccaggctaaaggagactgctcttacgtgtcaggctgaaggtggtggcttggtttgattgtgctggggattcgtgtaatttttcatctgggccgagatgtatggtgtattgtttttttctcccgacctgggccacgtttctgttagggtggtgattgtgtccacttttctgggagctgctcacagctatctggacacctctctgtggattttcttcttcctggaagggctctatgcgcttagataggtgtgaagcacctgtccaccctgaaaaatgtccaccaaacctccgagctggcatgatagctttgagtcctgtcagcttgtacatctcagcgtggttttctttccttttttcagttcctcgttttattgttttatgtagatttgtactctccccgtgccggccacatcttttcatttttgtttaacaaatacttcttgaggcctactagataccattcactgttattggccaggggacatggtggtgagcaggacagaattcctgtcctcatgagtcttacattctagaaggaaggagcagataaaatctaaataaggttatgagattgtgacgaagcgtgtaagtaaaatagaactgggtgatggcgtgaatagagacatgggttatgtggctagtttggtatatccactgtttaaggtgaaatctgcctctgtaaagaaatgaaaaaattatatagagcacattactgatatcgattcacttggatttttagtctggggggagaaaagagcaattgtatatagtaatcgttaccatgaact

SEQ ID NO: 16962 - DNA, 1494 bp, Artificial sequence
  DNA replication origin
cccgggaggaggcgcgggcgcgccgggagggaccggcggcggcatgggccgggggccctgggatgcgggcccgtctcgccgcctgctgccgctgttgctgctgctcggcctggcccgcggcgccgcgggagcgccgggccccgacggtgagtgcgggctgggacgggcacgggcggccggcggggcccccggctgggcctcgaggactctgggcgcacggacgcttccccgcccctgggccgggccggcgcggtgccgaggcgtggggcgcaggtggggcccgcgccggccgttggagatcggcaaggaggagctcagagaagcggggggctccccgccgggcttccctgcccccgcccgaccccgcgacgccgggggacgccggttttaaggcggcctggccgggcccccagggacctccactgcccaggaggcggggtgggggctgggcgcgagcgcggacccgggcagggcggcgcccggggaagggcggggaggccagggcgttctgcggcgctgtcacgcttccggctctgcggtggcttttgcatgacacatttttgacccgaagcaattttcttaccacttttaattttttcacgttgttagagagccggatgctaaatatggtgagaaagacgcgtaaggaagagtacaggagtgaagccattaattcactcattcattcaacagatggcccttgaacagcttccctgtgcgcgatgagggcgggcagtgcgggccctcgtggagctcattgtctggaggatttagaccagcaaatgttctatttccaagcaatcgagggagttgtttttcctcctctgcaaaatgcagtgttgagctgagtaggaattacacagaggattcagacacgcaggggaggtgacattcatccacataactgtaatacaaggcagaatggcatgggtgccatgagaaggtgtgggtggtgagggcagggaaaggggaatcggtggtgacccttgagctgggccatcaatgattggtcatatttggatatgggaaaatgtgaaaaaggtatcccagctcatagcagaaggcactgtcacctctccacaaatgagtgtagaatgaatgaattccttcagaattcaggcccgggggagaagggaaggaagcacacggaggcaccagaggcagagggcagagtgccttgattggcagacctaggcctttggacttagctgtgcctggaagccactggaagccgtctcagggagtgacaagaaaagtgggtctagccagttctaggcgcttcgggagccacaggttacagtgcagacatggccaaatccaagcaccacaccacacacaaccagtcccgaaaatggcacagaaacggcatcatgaaacccggatcacaaagatacgaatcttttaaaggggtggaccccaagttcctgacaaacatgcggtttgccaagaagcacaataagaggggcctaaagaagatgcagggcgacagtgcca

SEQ ID NO: 16963 - DNA, 1437 bp, Artificial sequence
  DNA replication origin
gccgccttaaaaccggcgtcccccggcgtcgcggggtcgggcgggggcagggaagcccggcggggagccccccgcttctctgagctcctccttgccgatctccaacggccggcgcgggccccacctgcgccccacgcctcggcaccgcgccggcccggcccaggggcggggaagcgtccgtgcgcccagagtcctcgaggcccagccgggggccccgccggccgcccgtgcccgtcccagcccgcactcaccgtcggggcccggcgctcccgcggcgccgcgggccaggccgagcagcagcaacagcggcagcaggcggcgagacgggcccgcatcccagggcccccggcccatgccgccgccggtccctcccggcgcgcccgcgcctcctcccggggccctcagggtgcagagataaggctacaggcgccgcggggaggggaccagccggcggcttccggcgccgccgagggaagcggggggcgctgcggggtccccgggaggccgcagagcgcgggtccttcctcttgtcggggcctgggcttaggacacgcccgttccgcgtccgtctctggctccgcacttgctgccctctcgccgctcacattcgcaaagggggacagacactcatcggataatgacacagctggacgcagagccccggagagtgctggggaggaaatgttgcggaggattcaagccactcgagggctcagggaggcacccccggggagaggggtgaggggagcaaggggcggaaatcttccaggacgtgaaagggagctggatgaggtgaccacagcgcaaggcccagatgagaggtcggaagacgcagacccaggccacccaggggcgacacacttgaccaggtgacacctggtcaccgggagtgagagagagtagggctgtgatggagggaggggctggcatcagtccccgctgctctgaggacacccggcttgggacgcgctgatgccagcccctacctccatcacagccgtactcatcccaagggaaggagtaaaccaagacccaaggatgagaaggacgttggggaggaatctaagcgggagtttgttgtagaaatggggaatggggacctagagtgagagcagagggttggagaggggcgttgagctgcagagggaagttagccctcctaacccaagtgatggaggtcgccgggaagctgtcacagtttcaagcagtgaatgacttcatcactgacacatctctgtctgttctgtggaattgggattggggttgggttgggatgtggaaggcaaagagtccagcccggagttgctgcaggaatcaggcaatagaagacatgtcctggcccggtgcggtggctcacgcctgtaatcccaacactttgggaggtcgaggcgggtggatcacttgaggtcaggagctcgataccagcctggccaactt

SEQ ID NO: 16964 - DNA, 1000 bp, Artificial sequence
  DNA replication origin
ttgggacgcgctgatgccagcccctacctccatcacagccgtactcatcccaagggaaggagtaaaccaagacccaaggatgagaaggacgttggggaggaatctaagcgggagtttgttgtagaaatggggaatggggacctagagtgagagcagagggttggagaggggcgttgagctgcagagggaagttagccctcctaacccaagtgatggaggtcgccgggaagctgtcacagtttcaagcagtgaatgacttcatcactgacacatctctgtctgttctgtggaattgggattggggttgggttgggatgtggaaggcaaagagtccagcccggagttgctgcaggaatcaggcaatagaagacatgtcctggcccggtgcggtggctcacgcctgtaatcccaacactttgggaggtcgaggcgggtggatcacttgaggtcaggagctcgataccagcctggccaacttggtgaaaccccgtctctactgaaaaaaaaaaaattaggtgggcacggtggcaggcacctgtaatcccagctactcggaaagctgaggcgagagaattgcttgaacccaggaggcggaggttgaagtgagccgagctcgcaccactgcactccggactgggcgacagagtgagactccatagacagatagatagatagatagatagatagatagatagatagatagatagatagatagacagacagacagacagacagacagatagagatagagatagatgtgtcctgcagctgggcattgacaaatgagtgtgaagagggcagtgtgtaagagtggaatccactaggttttatgactagtcggggagaaggaaataaataagatccggtttgaaggctttgagcttgtgatgtctgtgggagcgcagccgagagcaggcaccccactacttcaccccatatcctcacttgtttactctctgccatgagcctgccgtaaatctcaccactttcaaacacaccc

SEQ ID NO: 16965 - DNA, 1098 bp, Artificial sequence
  DNA replication origin
ggtcgcggcgtcggcgcactcgtccccgccccgcgcgcgggctctcacccacctgcaggtgtctgtgcgtctgtccataggaacgcggtcggcgcgggggggcctgcgagagccgggcagcccgggctggacgggacgggccgaaggggcgcgagggcgggaggagagcggccagagggccgggcaccaaaggtaagtggagcggggaaggcgcccggcgggcggcggaccgaggagcggggcggggggcgggggcgccagcctggctcggccgaccgccgcgcgccgctccgtgcgccccgagctccgcgcgcccggctcggagcgcggcgggcgggcagggggcggggcgcgggcgggccggggcggggccggcgagcggggcgggggctcggaccccgggctccagccggcaccggaaacgcgccgtggtcggcgagacccacaggaagtgtgtaacgacacctcctacggcacgcaccgagctcgcagtcgttgctgccccgaggaggtgtagatcgagcctcctgccgcacacacgttcgcacgcggcggccggcgcgctggaccgagaggttggagcaatccatcctccgcgcgcacgagctcagtccctactgccccgacaggtgtggaacccgccgtccccgctatggtccgaggaagtgtacagcactgctccctactacacgtcctgggcccgcggtccccgatgccccccggagctctgtgcacctccactgaaacgcaaggagcagacagaacctacaccatccgtgaggtgtgtgatttcccttataacgcattgagtagagttacctctccgcccagggatgtgcattaacactttctaccgagatactacgtacagcccatagtcaccgctgccccgtgaaggtgcccaacaaccacctgtaacacacacacccctatcccatcgagggagcggggatgcttaatgatacctaaaatacactaaaactaggtcctccagcaaaccagagacacaagaacaccacctacacgactcagcacagcaaagatgaagctggacttgctaggtgctaccaggcttggtccacctttattttacctaac

SEQ ID NO: 16966 - DNA, 959 bp, Artificial sequence
  DNA replication origin
ccagccagccgccctgtccgggaggtgaggggcgcctctgcccggccgcccctactgggaagtgaggagcccctctgcccggccagccgccccgtccgggagggaggtgggggggtcggccccccgcccggccagccgccccgtccgggagggaggtgggggggtcggccccccgcccggccagccgccccgtccgggagggaggtgggggggggtcggcccccccgcccggccagccgccccttccgggaggtgaggggcgcctctgcccggccgcccctactgggaagtgaggagcccctctgcccggccagccgccccgtccgggaggaaggtgggggggtcagccccccacccggccagccgccctgtccgggagggaggtgggggggtcagcccccctgcccggccagccgccccgtccgggaggtgaggggcgcctctgcccggccgcccctactgggaagtgaggagcccctctgcccggccaccgccccgtctgggaggtgtgcccaacagctcattgagaacgggccaggatgacaatggcggctttgcggaatagaaaggcgggaaaggtggggaaaagattgagaaatcggatggttgccgtgtctgtgtagaaagaaatagacatgggagacttttcattttgttctgcactaagaaaaattcctctgccttgggatcctgttgatctgtgaccttacccccaaccctgtgctctctgaaacatgtgctgtgtccactcagggttaaatggattaagggcggtgcaagatgtgctttgttaaacagatgcttgaaggcagcatgctcgttaagagtcatcaccaatccctaatctcaagtaatcagggacacaaacactgcggaaggccgcagggtcctctgcctaggaaaaccagagacctttgttcacttgtttatctgctgaccttccctccactattgtccca

SEQ ID NO: 16967 - DNA, 1560 bp, Artificial sequence
  DNA replication origin
gccagcgggtgcggcatgtcgcgcagggagtggggccccgtggacggcagggccttggggggcccgcccgccatggcgcgcaccgctcgggacgcgccgccgccgcttcctcctgctgcccgccgcggcgagctccccgagcaccccgggccgagccccgctcggccgccgcttaacccgaggccttgcaccggccgtgctgggggccgccgccacccgccggctggtctctgccggcgctcagacgctccgctccgcgccgcgcgcccccgctccgcgcccgagcccgccgcgggtccgctggcagcacggccgcggcgcccagcccacacagccacaccgcccacccgctccggccccgcccccgaggcgccgcggccgcccgggagggggcggggagggcggggaaggggcacgtggggaaggaaggacggagggagggagggaggaggcgcggccccgcccccgcccggcaggaagtgcgccctgggcctctgcggctgtcctcccagtgtccaacgttgcctcgcggaggccgccgtgcggagcaaatgtctaacggaaatcagaggtggaaaagaggttggaggagcctgttccgttccacccgcgtttactgatgcgcccaccagcagccacgcttggggctgggggctttgaggacacgcacgtgagtcagggtcttctggcctctaaggcacgcgcaggaagaaccctagatagacggaattacgacccatatcggaagaatagcataaagggcgacaaggctcaaatgagctagaggacatcgggtggggaacctggaagggacttcaaagaggcggtgtggggagtcttcaggctcactctgaggtccccattgtggcttgcttctgcagctgagctggatttgtgtaaagtcaaacctcagaacagcgagcatgagtagagagtctcaaatgatatgcgactcttcaactcacactttggccgaagagacttttgaaagaaccatgaggttcaagttattcttcatgcatttgtgcttcctttccaggccttgggctgagctgattctcagctttatttgctggcgtggtgcaaatagtcaaggtgttacttccagccctttggggtgtaggttcacctcctttttccaccttacctgtccctagatcttctgtttccaaggccaagtctttaaagggttttcagtccctctagcaaagtaatgggtagggaggctcatcgtgagggaccacattttccctacccattccaaactcaaaggtttgcctagccttacctgctaaaaggtgatgacagatgttgactctgggattcactaaggcctctaccacagttttctctagaaacaaatagaagagaatgcagagggttgaaatctacccaaaatatcagtcagagactctgagcttcaaagaccttcccctatttcccccaatgtaatttatatagggttggacccttagtcctcaagctatcatctttatctcctccacataagcctgccttggctgggaaaagtagcattcaaagggcactgggaacaatttt

SEQ ID NO: 16968 - DNA, 1191 bp, Artificial sequence
  DNA replication origin
acggccggtgcaaggcctcgggttaagcggcggccgagcggggctcggcccggggtgctcggggagctcgccgcggcgggcagcaggaggaagcggcggcggcgcgtcccgagcggtgcgcgccatggcgggcgggccccccaaggccctgccgtccacggggccccactccctgcgcgacatgccgcacccgctggccggctccagcagcgaggaggccgtgggtggtgacagcacgcccagcccggacctgctgatggcccgcagcttcggtgacaaggtggggcgcctggggccggggagtgggaggcttatttcgctccccgtgggggggatgatggatccggagccttcgtgggcctggggccgcgcccaccctgccgccccttcccgggggacgggcgtgtcctggccccggagccctcggcgaagcgtctcctctgccgcctccgcggggtcgcagccgcagagggacaggcttcgctgcctgtgactggtcgcaagcaccggtgacagctggtggggaggggtccagcctgcgtgttggagcgggaggcgtgtgttcagggcagggcgcctgtgtcctcggatggggttccgagttcctccaggtgcatccctgcaggctgagctgctgcataacttgtagctcctccagtttccgagactgcacagaaagcaggagttcctggctttccgtgctgggaccgggcagccctgggcttacagcgagagtcttcttccccctagtcagtcatgtggggagtgatctttgtttaggtttgctgtttgtcctgaggagtcacctgactcagaccccagccggcggcgggaggagagcctcgttgtggttttctgtctggggctccattcacctccgacggcctaccactctgtttaggtttggcagaggctggttttgtggttgatggaaagaaagctcgccctttgaccttctttgtacggagggaggctccagattttcttagagcagcacaaccctcctgctgcttggagagacagcagagtccaggcaggggtaagggacgacctcctccctacccccatggccatttcagctgtgaaggagacttgagcagtgattgtatccccgctcctgccgtcacttagtcactaactgcagaaattagaattgttctcaggtcttgtgatcaagattttctctcccta

SEQ ID NO: 16969 - DNA, 1014 bp, Artificial sequence
  DNA replication origin
aatgatttggacagtgtgggagtgagctgacgtaagggagtatgaaaagggtgcctggcaatgttggagggtctggttgtagaatgtatcgtgtctgtccgtgtgtttgcttgattttgtttctcctctagcagtgtgctcacacacccaggtctggtagagcaagtgggtttttacgagttgggtgaatgggcagtggggagggaacaacatttagatattgctgtaagtgattgaagttctgggccatggaatggatgctgagtaaagaaggaaggaagtaaagacatgaatggatggaatgtcaaggaactttaggtcccaagaggctgagaaaccaaggatgttgggaagaggaagagcctgaaatataggggatgccgtttagagggagatgtgtgggtttctccctggtgacggtctgggagaggctgtggaatggaaggaaacattgcttgcttagaggctggtgttgtatgtatgagccacctggatctcgagggcacttaggttgtggaagggcttggaaaggaagcctgagagccagctgcttgaatcttcagggcatcaggagaaatggcagagctgtcagtggatgacagctgtgcgggagagatacaggatgtatgtcactggatggcacgagcctcagaagggttttcacagggcggttggggagtggtggtcaggagctgtgtggaacgaggagcatgtcagcagcagctcctggccttgggggctgggcgaggcttgtggaatgcgagcagctcacagagggaccgatggcagggaggcccgattctcagggagagccaggtttcagaatttgaatgggcagaagaacgacaagactttattaactatggcgtgggtcttccagagagcttggcagaaagatctgagaggaacgagataagtggaagtccatgttggaagaaaggaaggcagaggagcgtgaggatgaaaggctggaagcctctacttgtcattctcagggcagtggggttttgaggc

SEQ ID NO: 16970 - DNA, 1173 bp, Artificial sequence
  DNA replication origin
gattcccaggcagatggagctttggattctggagacttggccttctccatgttaattgtgaggttggagaagcgacatgcacttacttagcaggggctggctgccttctcctgggcctgttgggctgcagcctggtgtacaccttagaatctaacccgccatggaaggtggggggcatcagagctcttacagaagataaggagaagctgaggaattagattttaaatggcaccgggagcatccgcaccttcgaatgacagtgagggtaacagagagggagctcttgccttttcctgtcttctgcgttggactcttttcagtgctaatacacttggtataactagctccaaaaagaacaaagaagggatgccagggagaaggcttcacagaattcctagttatcttcaaaaagtaaataaaaaaagcagggtgctgttttaggccctgacccacgggtagcctcatcctgggtgggtgccagatgaagaagtttaaatgggtggtgtcggagtgcagatgaggagagatgggccgtgtggaggggacctggggtgtcggtgttggggggctggcctgtggtgtgtgtggggggtgggtgtgtggtgtgtgtatggggagggcacgtggcatgtagggagggcgtgtggcgtgtagggagggcgtgtggtgtgtgtggggtatgtagtgtgtgggggtgggtgtggtgttttgggggagcatgggtgtggaggggagtggggcattggtgtgggaagtgtggaggtgtgtcgtgtggaggtgactgggatggaaaggtgcacagagctgttccccctctggttgagagaagagcagagggaaagtggaaattgggctctctggacaaacctcttgaaggctgtagaccttggacagctcttagaaccaccgggatagtgaatgttctagaatgggaaagacgtggtgggtagtgaagtgagaatcccaattgtaaactgccagcagggagacttctacatacagagctaatgcagaccggagagtggggcctcgtgtctgttgtttccagacccttctggcaagtgaggaccctcaccatggggcagaagaccaggtgcctccagccagagcaggcagaactcccccatcccctcagctgacttaagtcccaccgcagccaccctctgccagtgc

SEQ ID NO: 16971 - DNA, 1186 bp, Artificial sequence
  DNA replication origin
gaggatggaggaggagttctgaggaaggaggaggagttctgaggagggaggaggaattctgaggaggtgggaagagttctgaggagggaggaggaattctgaggaggtgggaagagttctgaggagggaggaggaattctgaggaggtgggaggagttctgaggagggaggaggaatcctgaggaggcaggagttctgaggagggaggaaaaatcctgaggaggcaggagttctgaggagggaggaggaatcctgaggaggcaggagttgtgaggagggaggaggaatcctgagaaggaatcctgaggtaggaggagttccgagggggtggggagttctgaggaggtgggaggagttctgaggagggagaaggaattctgaggaggtgggaatagttctgaggagggagaaagaattctgaggaggtgggaggaattctgaggaggggggaggagttctgaggagggagaaggaattctgaggaaggaggaggagttctgaggagggaggaggaattctgaggaggtgggaggagttctgaggaggcaggaggaattctgaggagggaggaggagttctgaggaggtgggaggagttctgaggaggtgggaggagttctgaggaggtgggaggaattctaatggggggagttctgaggagggggaggaattctgaggaggtaggaggagttctgaggaggcaggaggagttctgaggatgtgggaggagttctgaggaggtgggaggaattcccaggaggtgggagaagttctgaggagggaggaggagagaggcatcctaggtcaagccagaaagaagagtggtgaaattgcttcctgattcctccttggtgactctgaggttagagaggaagctaaactctgaagcccaccttatatacggaagatgatctggggtctgtggcattccaggtcctgctctctccctaggccatcacttcagatctgcaatggactttgtatgtcagccatgataaaccaaggccataccagttttctatttggtcctcaaatgtaccaaactctttcctgccccagggactttgcgtatgttgtctcctatacctggaatatatgttttccaagcctctgtctctgagactcggatgaaatgtcatttcctcagactggcctttcctgaccactccacttgcccctcccaccct

SEQ ID NO: 16972 - DNA, 1675 bp, Artificial sequence
  DNA replication origin
gcagaatcctaggcgtcccacccctcgcgcaaacctgccttcctgggatgggagaatttggaaacgctccctgagccagtcctggggagcttccttccagcccctgccccggtggtggggggtccgcagagatccgcgggaggtccgggcacgcacgcctggctgtggggaaattcggccccgtcaggcggccgcgctcacaggagcagcgtgacccgtcggccccgggggtgctggcgccaggagccagcactcgcggtgcgctcccccgcgcctggcttccctggactgtcgccagtcctactctgcctgaggtggcgagggcagggtggagcgcggccttttctggcctgaggaggagtcactcgggaggtcactcggctgctgggcgggctgctgtcacaggcgctgcgtgccctggctctgctcgccactggccggcgcgctcccggcgcacggagcacactcgcgctcccggcgcacggagcacactcgcgctccgggactgaaacctgagcagccgtagcagccgaatttgggagcatatccttgtcactgcagccagaaagcccttcgatccccatcagagaggtcacatgagccccgaggtcacctgcccgcggaggggccacctgcctcgcttccacccgaggacctgggttgagcccgtggtggcctcgtcccaggtggctgcctccctctacgatgcggggctactcctcgtggtgaaggcgtcctacggaaccggaggctcctccaaccacagtgccagcccatcgccccggggggctctagaggaccaacagcagagagccatctccaatttctacattatctacaaccttgtggtgggcctgtcccccctgctgtccgcctacgggctgggatggctcagcgaccgctaccaccgaaagatctccatctgcatgtcgctgctgggcttcctgctctcccgcctcgggctgctgctcaaggtgctgctggactggccagtggaggtgctgtacggggcggcggcgctgaacgggctattcggcggcttctccgccttctggtccggggtcatggcgctgggatcgctgggctcctccgagggccgccgctctgtgcgcctcatcctcattgacctgatgctgggcttggcggggttctgcgggagcatggcttccgggcatctcttcaagcagatggctgggcactctgggcagggcctgatactgacggcctgcagcgtgagctgtgcctcgtttgccctgctctacagccttttggtgctaaaggtccctgagtcggtggccaaacccagccaggagctccccgccgtggataccgtgtctggcacggttggcacataccgcactctggatcctgatcagttggaccaacagtatgcagtggggcaccctccatctcctggaaaagcaaaaccccataaaaccaccattgccttgctctttgtgggtgctatcatatatgacctggcggtggtgggcacagtggacgtgatccctctttttgtgctgagggagcctctcggttggaaccaagtgcaggtgggctatggtatggctgcagggtacaccatcttcatcaccagcttcctgggtgtcctggtcttctcccgctgctttcgggacaccaccatgatcatgattgggatggtctcctttgggtc

SEQ ID NO: 16973 - DNA, 1699 bp, Artificial sequence
  DNA replication origin
atcaatctaaacatcagagatttagtacttgcactttaatgaagccaaccttgcactggagactagattctatcttgaagtggcaaggtcagggctctacttgctggtagcctgggctgcagaggatgaccaggtgctagctcacctggggcctgcattcagagatggagcaagaagtggggacatgatgagaatataatccaacccacagtagcctaaactgggagagacactgactaccctgagtcttgttcatttccaggccagagaactcagaagcctgggggttcctagggctgactagcatcctaataacccagctcctactagatctgttctagatctgatgtgactctctcagagacccttcaaatgtccctggtttcccaagacaatgggaagaactgaaataccacagaccctcccagagatgacaagggctgccccctacagtctagagccctagaatgcacagactccttgatcaagtggccagagtggtccatctgggtcaggttgttctcatggccatatttgattgtggaataccacctggccccataacctactcattcactggagtctccacccctcataggatcaaggtgtttggactgtttgctgtagcctctggaaaaattaagaatggagtgggagagccaggcttgggttgggtgaaacatgtatctcccaaggtgaccctaggtgagggggaggaagaaggaaatgggctgctgggccagatccatggggcacatcttgaagggcaagactaggtgtgtctttctctttgcagaaggcagagtcgtctgggcctagacacgaggaggctgggccatgctggaggttgagggtggcaggggaggagattatagcccacctaaacactaccaaaagagcacatagatacactaaatcatttggaatccagtccctactccctacatgagtatattatccatgtggcattttaagctctccctgcatacctgcgtctccctttcatgtctttgggttcctgatcatccacgctgccagagctatagtggattgtgggtagagggacaggaaggctgtgtgctttgagtctccatccctggggctgaccatggaacaggtcatgctctgtggtacattttggcccctgcaccatccatcaccctggttttctttgcagaagtatgtacctaaacaagaagcgaggccacctgggaagtggaggtctcagcccagcccaggggagtgagcccacagacagaagaagagtgactactaacaagcagaaagggacctgggcacttgattcagatgaggaccctggtgactctgccccttccagtgggctcaagcccctgcccaagagtccagttttatcatctagggggacatctagggctggcaggatcttgccgtctctcccttggccctggggtttggggcaggagccttctagacaaggcccaggcactaggcccaccaatgcaggtgtaccaaacaggactcttctctaagaggcctttggcttggagaagagcctggacctggcggctcccaagtttttacttctctcaaagtgctacccagctgcctatagcacatgggcccctgttgcattaaatctataaataaaacttcacaccccaatacttatcctaggcagaatcctaggcgtcccacccctcgcgcaaacctgccttcc

SEQ ID NO: 16974 - DNA, 1474 bp, Artificial sequence
  DNA replication origin
ggacttctagccgctggccgcactgacatgtattcggaaaagcaattccaaattctgtaaaatatcttccggcagtgatgcgatccgaactccggcagtgggttgtcaggcccaggtcagtcctgtagtgcgtaacggaactcggttccggctggctctgatcgcatcactcctgcatcctgcaagtaacgccctcgccagcttccacctcccgatctaattgtcccagaagtccccgcacttccgctgtacggctgagtgtttgccaagatggccgcgcccgtgcgctattaccgaagggcgccgccatcgcggctgccggacccgctaaggccgccctccgggtagccgccatgtcggtctccagcggcgtccagattctgacaaagccagagaccgtggaccggaggagaagtgcggaaacgaccaaagaggccgggcgaccactggagatggctgtgtccgagcccgaggccagcgccgcggtgagagctgtgatgagacagggtgttttggcggtcagagatggtgtacttgcggggcagtgattggagtagtctgtgacgataggtgatttgggaattggtggaatcgatgctagatggtcttttgggaggtcggtgttctgagttatctgtggggttaatgatttggctttaggatatcagtattaggagggatctgcagagacaatgatggggaggcgtctgtggcagtcaccgagtgtcggagtttggaaggagatcagaaatggaggctttgtgatgtgtcagagatagggaaggaccgtgggggttggcggtttgggatgtctatgggagccagcgattatgggtgcctgtggtggttagagcctgggttatcaaagagggtcagtgttaggatttgggaaattcagtgattgggagcatctgggagcatcagagattggggcttgggagtcagtgacggtgatgtctgtggaagtttgattagcagtatctttgagggtcagtgggtaatggaggaatcggggggccagtgaggggggaatatgactgttggagtttggggagtcaatgttgaggtgtctctggggatggtagatgatttgtatgtcatctggggagaaaaggtaattggggatgtatgcaggtcaataattaggtggtgtctagcagtaataactgtgctttgagtaatgaggtgattagtaggaattaatgattgaagatcctctatgattctgtgactagaagtctaagggggtcaggagtttgaggggattgctgcatttaatgattgagggttctttggtggtcagtgattggagatctgtggaggttaatgattgttctgtggagagtgatagttgggaacttgcagagatccataattgggagaagtttgtgaaggttagtgattggggagtatttgggtgtcagtgattgaaaacttgcaggaacagtaggaacagtctgtaagatgagcattt

SEQ ID NO: 16975 - DNA, 1572 bp, Artificial sequence
  DNA replication origin
ccgacgccactccccagaagcctgggtctccctcccgtgcccgctctcgcgagtcgtcaaccacctgggcgggctggacgtggccctgggcgagcttcgggccccggggggcgccttcctcccggggcccgccggcggcacgcagcccagcgcctcgcagcgcgcctggctcacctggcagctggcgcacgccggggccgccctgcactgggcgctggccacgctcgacagcctgctggctgcggggccctggcccgcgggcccgccgccctttgcgcccgctcctggggggccttaggtgcgcacgggagccagcaccctcgccttggaaaagctcgaaccctctgccccagaggcgatcccgactctgcaccgcaaactctacggcgccctgcaggacggcggcctcctgccgcttggacgccagccaggagctccccggcagcagcagagcagaaagaaggatggccccgccccacttcgcctcccggcggtctccctcccgctggctcacggagatagatggctgcctagctccggaagcctagctcttgttccggacatcctaaggacgacaccgtttttccttccgggggctcaccacatctgggactttgatgactcgggacctctctcccattgaatttttgcgcgttttctgggaagggatgaggtgtgggctttgcgtttggatgtgggattgtcctttgagccgagagcgttgagaagcctacctggagtgacacccgtgtagagactgagccacgtggattcgcggaagtgggggtgggggcttggggcggtacctcaccataggggatttccaggggaaagtgaaatgccctcggtgtaggtcattcgtagtggaaaggaaaatgcctggtccctcagcttcttcgtgtgtcccaagaaatgtcctcaatatttccaacctctgcccccagggtcaggaaaatattcctggcaggttttggtgagcctctggaatctctccgccattccgcgtttgcaccctcggctttggcaaggatgaactgcatccacgtttttggaaatcagtcgtcatgtgtttaatgacccttgtggctacctcttcgaggtgtgtgtgtgtgtgtgtgtgtgtgtgtgtgtgtgtgtgttcatgccagcgtcctatgtcttgtaactgaaatctgggaacttgtctccctaccctgtgatgatcacctggggaactttggagaaggaggtggaaggggaatgtcccacttcgtgtcttggaacaggtggcttctttcttgggaaaagaggtgggatggagagaatgcacccgagctcttcagaaaggacctgcactgattggtgataggcagcatgggctcaggagagcagggagagttaggggagacacccacgtgcctggaatagtggagggccatttggagcaagcctcagatggagagccacatatcgaggtgttcggtcaatccttgtgaaccagagagtgttcctacgaatgctagagtctcatagaagtaatgtctcttttacgtttttttgcctgattaatattttcttcccctcccggtgcct

SEQ ID NO: 16976 - DNA, 1808 bp, Artificial sequence
  DNA replication origin
caagagaacctgcgggactcggtctcccttcactcgaaatttgcccgactctcggcatggtgtgcacacacccaagcacgcgggcgcgcacacacacacacacacacatacacacaggcacgcacacacgcaggtgcacaccaggaagtggagaaatcgtccaacgcagaggtagagaggacttcgaaatgggcaacgaagtagggcacttcctttgaaattaccgtgaagcccacagctacctttgtctctgttctgccactccgcaaaattgctcatcacttgcgggagacagagcggcagggacccagggagaaagcggaacccctccaacccgcctaacctaatcaaggtagcctgcccctgtgggcgtgtccgcagccaatcctcctgggaactcccagcagggggtcctggctccctatcaaagcccgccggctgcgcccaaccggccattgcccggcttgcgctgctcaggctgccagaggttagagcctcctcgccgggaacacagagctctttcctggatggggaagctgtcctttgaggagacgggagaagacagacctccctgtggaaagcaggggaagatggagacacgcaagacccgggagggctctgagagaggacgaggtgagtgagggtcgagtgtctcgtctgtgcggattggtgtgtggagggggtggcaggggccagggaggcaggagagttagagctggggtgacaaaggcagcggcccccgccccacgggccctgatccggcaggtggtggggaaacctaaggtcaaagaaaggcagactttttgtgtgctgggtggctccgccagctgggccatcctctgggtgcgcccgcggaggagggtttgctggagggtgccaggcagctggggaacagccagagtcaggagacaggaagggacccggggagtggggcctggaggtcttgggcagctggagaaagaggagggggtgggggacacctgggagcagagccattcctgccttgaagtcactctgggagcttggcccttgcaaccctcccgcagccgtctacggacgggtcatggcccactcactgtcgacctcctcttcccccgcagcttccagcgggcacagccgggaggcctctgcgtccaggcacaaacggtggagaagccccgacggctcccctcgcagtcccggcagagaaaccggaaaccgagggcggaaggtcaagccacgaccagccccagccggagagcgaggccacgacaagcccgagtccggcagagcacgacgcccccacgagcgcagaggaggcaggtttaggggctgggagcttggaggggtggggaggagggcgcagggccccgggaaggggagcggggagtggggggccccgagggggccgaggaagccctcagtgcgccaggaacccgggcccccggtggccccagatgagatgtgcttcaagtttgaatgggcggaggggagggcaccccggacggggcaccggagtccccaggatgcagggaggggccgagaggatggggcgcggaggcgagccgcggaggggtgggggatggagggcagggggaggcggggtcgggagcggcttcgggaccttggaaatgggtcccctagcgctgcgcgcagtccctctgacacctcccgctctgtctcccgcgcaggttctgttcccagcccgaggcgcctggaggagccaaagcaccggcctagatcgccagggaggacgagcggcccgcaacgccgcgttgacgtccgggaggagcgacccacctccccaaagcgccgccgacgccactccc

SEQ ID NO: 16977 - DNA, 949 bp, Artificial sequence
  DNA replication origin
tgctgggagttcccaggaggattggctgcggacacgcccacaggggcaggctaccttgattaggttaggcgggttggaggggttccgctttctccctgggtccctgccgctctgtctcccgcaagtgatgagcaattttgcggagtggcagaacagagacaaaggtagctgtgggcttcacggtaatttcaaaggaagtgccctacttcgttgcccatttcgaagtcctctctacctctgcgttggacgatttctccacttcctggtgtgcacctgcgtgtgtgcgtgcctgtgtgtatgtgtgtgtgtgtgtgtgtgcgcgcccgcgtgcttgggtgtgtgcacaccatgccgagagtcgggcaaatttcgagtgaagggagaccgagtcccgcaggttctcttgctcctgcagtctgcggaggaaaaactcctttctggcacggcggcaggaatccatctaccgacgttaggaaaggacagggtgtgctttcgtcccagcttagttttctatggagaaacaggcagcagaggagagtgggccagagggccacattttgcccacgaccagccaggtttgagttggttcctcctaggcctcacggtctgattttctcctcccctttgtgtacccgacgggtgttgctctgagatcaggaccatcccggcgggctgcggatgggatcatcgtgtgtgtatggccacagccctccgccccgctcgctcggtgagcacgtgaatcaaggaaggggcacacgactctaggcaggacccggcggggtgtcgggaggagaaactcggtaagagaagagagggagagggagacgtgcgaggcgcaggctgtcccaggcgagtctgagaaacggcgtgcgcggagacgtccgccagaaagcaagcaggcgaaaggaaatggaacatccgcagggccggtgccgtgggatccgatcac

SEQ ID NO: 16978 - DNA, 1216 bp, Artificial sequence
  DNA replication origin
ctgattttctcctcccctttgtgtacccgacgggtgttgctctgagatcaggaccatcccggcgggctgcggatgggatcatcgtgtgtgtatggccacagccctccgccccgctcgctcggtgagcacgtgaatcaaggaaggggcacacgactctaggcaggacccggcggggtgtcgggaggagaaactcggtaagagaagagagggagagggagacgtgcgaggcgcaggctgtcccaggcgagtctgagaaacggcgtgcgcggagacgtccgccagaaagcaagcaggcgaaaggaaatggaacatccgcagggccggtgccgtgggatccgatcacgccctgacggctttcggggacatctcaggctcgctgtctcccccttggacctggcgcagagaggagtgaggcctgaggacagggctccgtggccagctaggtgtgggaggtgccaacacagtaagggctggtcaaggggtggtcgggagcgatacgggggagttgctcaagaaatcaccgctggaactgggattccagtccagtgggatacgtccagtcatcccacttctggacgtatcgcctaaggacacgaaatcgggatgtggtgcaaatatgtgtcctgctgcgttggttgtcggcacgctgcctgtaaccaagacgtggaatcgacctaagtgcccatcagcagatgactagagaaggacaaaggagtggggttcgcagaagaaacacatcagggaaaggaaaggagagccggtcatctgggacgtcatgcatggacccaaaagtcatggtgcccagtgaaatcagccaggcccatccgacccgtattgcgtgatctccttgggatgtgggatggaaagcggtgaggatcgcgaaagtagagaggagaaaggtggttggccgggcctggggccggggtaggggcagggaaaagatgccaatgcgagatgtgggtcaaagggcagaaagtttccgagaggcaggtggagtgcttcctggatatccgtggcagggcaacgcgagtacggtggagcagaatgtaaggttctcgtgaatatacccacgggagtagagctgaaaattctcccgacagggacaggggacgcatgtggggcgataagtgtgtgaattcggccgattctagtgaattccctaatgaagacgtcacacacggtaagtgtgtatcatatttattgtcattcatacttg

SEQ ID NO: 16979 - DNA, 1104 bp, Artificial sequence
  DNA replication origin
acgccactccccagaagcctgggtctccctcccgtgcccgctctcgcgagtcgtcaaccacctgggcgggctggacgtggccctgggcgagcttcgggccccggggggcgccttcctcccggggcccgccggcggcacgcagcccagcgcctcgcagcgcgcctggctcacctggcagctggcgcacgccggggccgccctgcactgggcgctggccacgctcgacagcctgctggctgcggggccctggcccgcgggcccgccgccctttgcgcccgctcctgggggcccttaggtgcgcacgggagccagcaccctcgccttggaaaagctcgaaccctctgccccagaggcgatcccgactctgcaccgcaaactctacggcgccctgcaggacggcggcctcctgccgcttggacgccagccaggagctccccggcagcagcagagcagaaagaaggatggccccgccccacttcgcctcccggcggtctccctcccgccggctcacggacatagatggctgcctagctccggaagcctagctcttgttccgggcatcctaaggaagacacggtttttcctcccgggggctcgccacatctgggactttgacgactcgggacctctctcccattgaatgtttgcgcgttctctgggaaagtgaaatgcctaaccttgtttttactctaagtcgctactttgaatcttccctgttggtctctttaatcacctagccttgcttctcatgtaaataaggctctctgtagctgggaatgctggacaaactccaatcgaccccttaatttacgagacacgaagggctccttacccaacccccttccgcaaggagttgacctgtgtaagcagatactcagcatttcaagggagcccaatcaactgataagatactggcacaaacagtgcatgaagttcccaggatttttctcgaagagataacaacataaagccttgagttcgtgtccagcatagcacctatatctaagtgtcatgaaggatttagagccccgcacctggtaccgttgccttttgtaaccatttgccttttaaaactgtttatctctctataaccatttgcttctt

SEQ ID NO: 16980 - DNA, 1758 bp, Artificial sequence
  DNA replication origin
cccgactctcggcatagtgtgcacacaccccagcacgcgcgcgcgcgcacacacacacacacacacacacaggcacgcacacacgcaggtgcacaccaggaagtggagaaatcgtccaacgcagaggtagagaggacttcgaaatgggcaacgaagtagggcacttcctttgaaattaccgtgaagcccacagctacctttgtctctgttctgccactccgcaaaattgctcatcacttgccggagacagagcggcagggacccagggagaaagcggaacccctccaacccgcctaacctaatcaaggtagcctgcccctgtgggcgtgtccgcagccaatcctcctgggaactcccagcagggggtcctggctccctatcaaagcccgccggctgcgcccaaccggccattgccccgcttgcgctgctcaggctgccagagggtagagcctcctcgccgggaacacagagctctttcctggatggggaagctgtcctttgaggagacgggagaagacagacctccctgtggaaagcaggggaagatggagacccgcaagaaccgggagggctctgagagaggacgaggtgagtgagggtcgagtgtctcgtctgtgcggattggtgtgtggagggggtggcaggggccagggaggcaggagagttagagctggggtgacaaaggcagcggcccccgccccacgggccctgatccggcaggtggtggggaaacctaaggtcaaagaaaggcagactttttgtgtgctgggtggctccgccagctgggccatcctctgggtgcgcccgcggaggagggtttgctggagggtgccaggcagctggggaacagccagagtgaggagacaggaagggaccaggggagtggggcctggaggtcttgggcagctggagaaagaggagggggtgggggacacctgggagcagagccattcctgccttgaagtcactctgggagcttggcccttgcaaccctcccgcagccgtctacggacgggtcatggcccactcactgtcgacctcctcttcccccgcagcttccagcgggcacagccgggaggcctctgcgtccaggcacaaacggtggagaagccccgacggctcccctcgcagtcccggcagagaaaccggaaaccgagggcggaaggtcaagccacgaccagccccagccggagagcgaggccacgacaagcccgagtccggcagagcacgacgcccccacgagcgcagaggaggcaggtttaggggctgggagcttggaggggtggggaggagggcgcagggccccgggaaggggagcggggagtggggggccccgagggggccgaggaagccctcagtgcgccaggaacccgggcccccggtggccccagatgagatgtgcttcaagtttgaacgggcggaggggagggcaccccggacggggcaccggagtccccaggatgcagggaggggccgagaggatggggcgcggaggcgagccgcggaggggtgggggatggagggcagggggaggcggggtcgggagcggcttcgggaccttggaaatgggtcccctagcgctgcgcgcagtccctctgacacctcccgctctgtctcccgcgcaggttctgttcccagcccgaggcgcctggaggagccaaagcaccggcctagatcgccagggaggacgagcggcccgcaacgccgcgttgacgtccgggaggagcgacccacctccccaaagcgccgccgacgcca

SEQ ID NO: 16981 - DNA, 1026 bp, Artificial sequence
  DNA replication origin
tctccctcccgtgcccgctctcgcgagtcgtcaaccacctgggcgggctggacgtggccctgggcgagcttcgggccccggggggcgccttcctcccggggcccgccggcggcacgcagcccagcgcctcgcagcgcgcctggctcacctggcagctggcgcacgccggggccgccctgcactgggcgctggccacgctcgacagcctgctggctgcggggccctggcccgcgggcccgccgccctttgcgcccgctcctgggggcccttaggtgcgcacgggagccagcaccctcgccttggaaaagctcgaaccctctgccccagaggcgatcccgactctgcaccgcaaactctacggcgccctgcaggacggcggcctcctgccgcttggacgccagccaggagctccccggcagcagcagagcagaaagaaggatggccccgccccacttcgcctcccggcggtctccctcccgccggctcacggacatagatggctgcctagctccggaagcctagctcttgttccgggcatcctaaggaagacacggtttttcctcccgggggctcgccacatctgggactttgacgactcgggacctctctcccattgaatgtttgcgcgttctctgggaaagtgaaatgcctaaccttgtttttactctaagtcgctactttgaatcttccctgttggtctctttaatcacctagccttgcttctcatgtaaataaggctctctgtagctgggaatgctggacaaactccaatcgaccccttaatttacgagacacgaagggctccttacccaacccccttccgcaaggagttgacctgtgtaagcagatactcagcatttcaagggagcccaatcaactgataagatactggcacaaacagtgcatgaagttcccaggatttttctcgaagagataacaacataaagccttgagttcgtgtccagcatagcacctatatctaagtgtcatgaaggatttagagccccgcacctggtaccgttgcct

SEQ ID NO: 16982 - DNA, 1459 bp, Artificial sequence
  DNA replication origin
ttcactcgaaatttgcccgactctcggcatagtgtgcacacaccccagcacgcgcgcgcgcgcacacacacacacacacacacacaggcacgcacacacgcaggtgcacaccaggaagtggagaaatcgtccaacgcagaggtagagaggccttcgaaatgggcaacgaagtagggcacttcctttgaaattaccgtgaagcccacagctacctttgtctctgttctgccactccgcaaaattgctcatcacttgccggagacagagcggcagggacccagggagaaagcggaacccctccaacccgcctaacctaatcaaggtagcctgcccctgtgggcgtgtccgcagccaatcctcctgggaactcccagcagggggtcctggctccctatcaaagcccgccggctgcgcccaaccggccattgccccgcttgcgctgctcaggctgccagagggtagagcctcctcgccgggaacacagagctctttcctggatggggaagctgtcctttgaggagacgggagaagacagacctccctgtggaaagcaggggaagatggagacccgcaagaaccgggagggctctgagagaggacgaggtgagtgagggtcgagtgtctcgtctgtgcggattggtgtgtggagggggtggcaggggccagggaggcaggagagttagagctggggtgacaaaggcagcggcccccgccccacgggccctgatccggcaggtggtggggaaacctaaggtcaaagaaaggcagactttttgtgtgctgggtggctccgccagctgggccatcctctgggtgcgcccgcggaggagggtttgctggagggtgccaggcagctggggaacagccagagtgaggagacaggaagggaccaggggagtggggcctggaggtcttgggcagctggagaaagaggagggggtgggggacacctgggagcagagccattcctgccttgaagtcactctgggagcttggcccttgcaaccctcccgcagccgtctacggacgggtcatggcccactcactgtcgacctcctcttcccccgcagcttccagcgggcacagccgggaggcctctgcgtccaggcacaaacggtggagaagccccgacggctcccctcgcagtcccggcagagaaaccggaaaccgagggcggaaggtcaagccacgaccagccccagccggagagcgaggccacgacaagcccgagtccggcagagcacgacgcccccacgagcgcagaggaggcaggtttaggggctgggagcttggaggggtggggaggagggcgcagggccccgggaaggggagcggggagtggggggccccgagggggccgaggaagccctcagtgcgccaggaacccgggccccccggtggcccccagatgagatgtgcttcaagtttgaatgggcggaggggagggcaccccggacgg

SEQ ID NO: 16983 - DNA, 1447 bp, Artificial sequence
  DNA replication origin
gcttagttttctatggagaaacaggcagcagaggagagtgggccagagggccacattttgcccacgaccagccaggtttgagttggttcctcctaggcctcacggtctgattttctcctcctctttgtgtacccgacggtgttgctgtgagctcaggaccatcccggcggctgtggatgggatcatcgtgtgtgtatggccacagccctccgcctcgctcgctcggtgagcacgtgaatcaaggaaggggcacacgactctaggcaggacccggcgggtgtggggaggagaaactcggtaagagaagagagggagagggagacgtgcgaggcgcaggctgtcccaggcgagtctgagaaacggcgtgcgcggagacgtcccgcagaaagcaagcaggcgaaaggaaatggaacatccgcagggccggtgccgtgggatccggtcacgccctgacggctttcggggacatctcaggctcgctgtctctgccttggacctggcgcagagaggagtgaggcctgaggacagggctgcgtggccagctgggtgtgggaggtgccaacacagtaagggctggtcaaggggtggccgggagcgatacgggggggttgctcaagaaatcaccgctggaactgggattccagtccagtgggatacgtccagtcatcccacttctggacgtatcgcctaaggacacgaaatcgggatgtggtgcaaatatgtgtcctgctgcgttggttgtcggcacgctacctgtaaccaagacgtggaatcgacctaagtgcccatcagtagatgactagagaaggacaaaggagtggggttcgcagaagaaacacatcagggaaaggaaaggagagccggtcatctgggacgtcatgcacggacccaaaagtcatggtgcccagtgaaatcagccaggcccatccgacccgtattgcgtgatctccttgggatgtgggatggaaagcggtgaggatcgcgaaagtagagaggagaaaggtggttggccgggcctggggccggggtaggggcagggaaaagatgccaatgcgagatgtgggtcaaagggcacaaagtttccgagaggcaggtggagtgcttcctggatatccgtggcagggcaacgtgagtacggtggagcagaatgtaaggttctcgtgaatatacccacgggagtagagctgaaaattctcccgacagggacaggggacgcatgtggggcgataagtgtgtgaattcggccgattctagtgaattccctaatgaagacgtcacacacggtaagtgtgtatcatatttattgtcattcatacttgaaggcaccggcgggggaaggaaataattaaatcgcaagacaaaacctccaagagagatcacctcgaagagagtctaacgtccgtaggaacgctctcgggttcacaaggattgaccgaaccccaggata

SEQ ID NO: 16984 - DNA, 1062 bp, Artificial sequence
  DNA replication origin
ccgccgacgccactccccagaagcctgggtctccctcccgtgcccgctctcgcgagtcgtcaaccacctgggcgggctggacgtggccctgggcgagcttcgggccccggggggcgccttcctcccggggcccgccggcggcacgcagcccagcgcctcgcagcgcgcctggctcacctggcagctggcgcacgccggggccgccctgcactgggcgctggccacgctcgacagcctgctggctgcggggccctggcccgcgggcccgccgccctttgcgcccgctcctgggggcccttaggtgcgcacgggagccagcaccctcgccttggaaaagctcgaaccctctgccccagaggcgatcccgactctgcaccgcaaactctacggcgccctgcaggacggcggcctcctgccgcttggacgccagccaggagctccccggcagcagcagagcagaaagaaggatggccccgccccacttcgcctcccggcggtctccctcccgccggctcacggacatagatggctgcctagctccggaagcctagctcttgttccgggcatcctaaggaagacacggtttttcctcccgggggctcgccacatctgggactttgacgactcgggacctctctcccattgaatgtttgcgcgttctctgggaaagtgaaatgcctaaccttgtttttactctaagtcgctactttgaatcttccctgttggtctctttaatcacctagccttgcttctcatgtaaataaggctctctgtagctgggaatgctggacaaactccaatcgaccccttaatttacgagacacgaagggctccttacccaacccccttccgcaaggagttgacctgtgtaagcagatactcagcatttcaagggagcccaatcaactgataagatactggcacaaacagtgcatgaagttcccaggatttttctcgaagagataacaacataaagccttgagttcgtgtccagcatagcacctatatctaagtgtcatgaaggatttagagccccgcacctggtaccgttgccttttgtaa

SEQ ID NO: 16985 - DNA, 1770 bp, Artificial sequence
  DNA replication origin
ctcgaaatttgcccgactctcggcatagtgtgcacacaccccagcacgcgcgcgcgcgcacacacacacacacacacacacaggcacgcacacacgcaggtgcacaccaggaagtggagaaatcgtccaacgcagaggtagagaggccttcgaaatgggcaacgaagtagggcacttcctttgaaattaccgtgaagcccacagctacctttgtctctgttctgccactccgcaaaattgctcatcacttgccggagacagagcggcagggacccagggagaaagcggaacccctccaacccgcctaacctaatcaaggtagcctgcccctgtgggcgtgtccgcagccaatcctcctgggaactcccagcagggggtcctggctccctatcaaagcccgccggctgcgcccaaccggccattgccccgcttgcgctgctcaggctgccagagggtagagcctcctcgccgggaacacagagctctttcctggatggggaagctgtcctttgaggagacgggagaagacagacctccctgtggaaagcaggggaagatggagacccgcaagaaccgggagggctctgagagaggacgaggtgagtgagggtcgagtgtctcgtctgtgcggattggtgtgtggagggggtggcaggggccagggaggcaggagagttagagctggggtgacaaaggcagcggcccccgccccacgggccctgatccggcaggtggtggggaaacctaaggtcaaagaaaggcagactttttgtgtgctgggtggctccgccagctgggccatcctctgggtgcgcccgcggaggagggtttgctggagggtgccaggcagctggggaacagccagagtgaggagacaggaagggaccaggggagtggggcctggaggtcttgggcagctggagaaagaggagggggtgggggacacctgggagcagagccattcctgccttgaagtcactctgggagcttggcccttgcaaccctcccgcagccgtctacggacgggtcatggcccactcactgtcgacctcctcttcccccgcagcttccagcgggcacagccgggaggcctctgcgtccaggcacaaacggtggagaagccccgacggctcccctcgcagtcccggcagagaaaccggaaaccgagggcggaaggtcaagccacgaccagccccagccggagagcgaggccacgacaagcccgagtccggcagagcacgacgcccccacgagcgcagaggaggcaggtttaggggctgggagcttggaggggtggggaggagggcgcagggccccgggaaggggagcggggagtggggggccccgagggggccgaggaagccctcagtgcgccaggaacccgggcccccggtggccccagatgagatgtgcttcaagtttgaatgggcggaggggagggcaccccggacggggcaccggagtccccaggatgcagggaggggccgagaggatggggcgcggaggcgagccgcggaggggtgggggatggagggcagggggaggcggggtcgggagcggcttcgggaccttggaaatgggtcccctagcgctgcgcgcagtccctctgacacctcccgctctgtctcccgcgcaggttctgttcccagcccgaggcgcctggaggagccaaagcaccggcctagatcgccagggaggacgagcggcccgcaacgccgcgttgacgtccgggaggagcgacccacctccccaaagcgccgccgacgccac

SEQ ID NO: 16986 - DNA, 1644 bp, Artificial sequence
  DNA replication origin
gagagtgggccagagggccacattttgcccacgaccagccaggtttgagttggttcctcctaggcctcacggtctgattttctcctcctctttgtgtacccgacgggtgttgctgtgagctcaggaccatcccggcgggctgtggatgggatcatcgtgtgtgtatggccacagccctccgcctcgctcgctcggtgagcacgtgaatcaaggaaggggcacacgactctaggcaggacccggcggggtgtggggaggagaaactcggtaagagaagagagggagagggagacgtgcgaggcgcaggctgtcccaggcgagtctgagaaacggcgtgcgcggagacgtccgccagaaagcaagcaggcgaaaggaaatggaacatccgcagggccggtgccgtgggatccggtcacgccctgacggctttcggggacatctcaggctcgctgtctctgccttggacctggcgcagagaggagtgaggcctgaggacagggctgcgtggccagctgggtgtgggaggtgccaacacagtaagggctggtcaaggggtggccgggagcgatacgggggggttgctcaagaaatcaccgctggaactgggattccagtccagtgggatacgtccagtcatcccacttctggacgtatcgcctaaggacacgaaatcgggatgtggtgcaaatatgtgtcctgctgcgttggttgtcggcacgctacctgtaaccaagacgtggaatcgacctaagtgcccatcagtagatgactagagaaggacaaaggagtggggttcgcagaagaaacacatcagggaaaggaaaggagagccggtcatctgggacgtcatgcacggacccaaaagtcatggtgcccagtgaaatcagccaggcccatccgacccgtattgcgtgatctccttgggatgtgggatggaaagcggtgaggatcgcgaaagtagagaggagaaaggtggttggccgggcctggggccggggtaggggcagggaaaagatgccaatgcgagatgtgggtcaaagggcacaaagtttccgagaggcaggtggagtgcttcctggatatccgtggcagggcaacgtgagtacggtggagcagaatgtaaggttctcgtgaatatacccacgggagtagagctgaaaattctcccgacagggacaggggacgcatgtggggcgataagtgtgtgaattcggccgattctagtgaattccctaatgaagacgtcacacacggtaagtgtgtatcatatttattgtcattcatacttgaaggcaccggcgggggaaggaaataattaaatcgcaagacaaaacctccaagagagatcacctcgaagagagtctaacgtccgtaggaacgctctcgggttcacaaggattgaccgaaccccaggatacgtcgctctccatctgaggcttgctccaaatggccctccactattccaggcacgtgggtgtctcccctaactctccctgctctcctgagcccatgctgcctatcacccatcggtgcaggtcctttctgaagagctcgggtggattctctccatcccacttcctttcccaagaaagaagccaccgttccaagacacccaatgggacattccccttccacctccttctc

SEQ ID NO: 16987 - DNA, 1097 bp, Artificial sequence
  DNA replication origin
cgacgccactccccagaagcctgggtctccctcccgtgcccgctctcgcgagtcgtcaaccacctgggcgggctggacgtggccctgggcgagcttcgggccccggggggcgccttcctcccggggcccgccggcggcacgcagcccagcgcctcgcagcgcgcctggctcacctggcagctggcgcacgccggggccgccctgcactgggcgctggccacgctcgacagcctgctggctgcggggccctggcccgcgggcccgccgccctttgcgcccgctcctgggggcccttaggtgcgcacgggagccagcaccctcgccttggaaaagctcgaaccctctgccccagaggcgatcccgactctgcaccgcaaactctacggcgccctgcaggacggcggcctcctgccgcttggacgccagccaggagctccccggcagcagcagagcagaaagaaggatggccccgccccacttcgcctcccggcggtctccctcccgccggctcacggacatagatggctgcctagctccggaagcctagctcttgttccgggcatcctaaggaagacacggtttttcctcccgggggctcgccacatctgggactttgacgactcgggacctctctcccattgaatgtttgcgcgttctctgggaaagtgaaatgcctaaccttgtttttactctaagtcgctactttgaatcttccctgttggtctctttaatcacctagccttgcttctcatgtaaataaggctctctgtagctgggaatgctggacaaactccaatcgaccccttaatttacgagacacgaagggctccttacccaacccccttccgcaaggagttgacctgtgtaagcagatactcagcatttcaagggagcccaatcaactgataagatactggcacaaacagtgcatgaagttcccaggatttttctcgaagagataacaacataaagccttgagttcgtgtccagcatagcacctatatctaagtgtcatgaaggatttagagccccgcacctggtaccgttgccttttgtaaccatttgccttttaaaactgtttatctctctataaccat

SEQ ID NO: 16988 - DNA, 1812 bp, Artificial sequence
  DNA replication origin
cggtctcccttcactcgaaatttgcccgactctcggcatagtgtgcacacaccccagcacgcgcgcgcgcgcacacacacacacacacacacacaggcacgcacacacgcaggtgcacaccaggaagtggagaaatcgtccaacgcagaggtagagaggacttcgaaatgggcaacgaagtagggcacttcctttgaaattaccgtgaagcccacagctacctttgtctctgttctgccactccgcaaaattgctcatcacttgccggagacagagcggcagggacccagggagaaagcggaacccctccaacccgcctaacctaatcaaggtagcctgcccctgtgggcgtgtccgcagccaatcctcctgggaactcccagcagggggtcctggctccctatcaaagcccgccggctgcgcccaaccggccattgccccgcttgcgctgctcaggctgccagagggtagagcctcctcgccgggaacacagagctctttcctggatggggaagctgtcctttgaggagacgggagaagacagacctccctgtggaaagcaggggaagatggagacccgcaagaaccgggagggctctgagagaggacgaggtgagtgagggtcgagtgtctcgtctgtgcggattggtgtgtggagggggtggcaggggccagggaggcaggagagttagagctggggtgacaaaggcagcggcccccgccccacgggccctgatccggcaggtggtggggaaacctaaggtcaaagaaaggcagactttttgtgtgctgggtggctccgccagctgggccatcctctgggtgcgcccgcggaggagggtttgctggagggtgccaggcagctggggaacagccagagtgaggagacaggaagggaccaggggagtggggcctggaggtcttgggcagctggagaaagaggagggggtgggggacacctgggagcagagccattcctgccttgaagtcactctgggagcttggcccttgcaaccctcccgcagccgtctacggacgggtcatggcccactcactgtcgacctcctcttcccccgcagcttccagcgggcacagccgggaggcctctgcgtccaggcacaaacggtggagaagccccgacggctcccctcgcagtcccggcagagaaaccggaaaccgagggcggaaggtcaagccacgaccagccccagccggagagcgaggccacgacaagcccgagtccggcagagcacgacgcccccacgagcgcagaggaggcaggtttaggggctgggagcttggaggggtggggaggagggcgcagggccccgggaaggggagcggggagtggggggccccgagggggccgaggaagccctcagtgcgccaggaacccgggcccccggtggccccagatgagatgtgcttcaagtttgaacgggcggaggggagggcaccccggacggggcaccggagtccccaggatgcagggaggggccgagaggatggggcgcggaggcgagccgcggaggggtgggggatggagggcagggggaggcggggtcgggagcggcttcgggaccttggaaatgggtcccctagcgctgcgcgcagtccctctgacacctcccgctctgtctcccgcgcaggttctgttcccagcccgaggcgcctggaggagccaaagcaccggcctagatcgccagggaggacgagcggcccgcaacgccgcgttgacgtccgggaggagcgacccacctccccaaagcgccgccgacgccactccccagaagcctgggtctccctcccgtg

SEQ ID NO: 16989 - DNA, 1890 bp, Artificial sequence
  DNA replication origin
aggggttccgctttctccctgggtccctgccgctctgtctccggcaagtgatgagcaattttgcggagtggcagaacagagacaaaggtagctgtgggcttcacggtaatttcaaaggaagtgccctacttcgttgcccatttcgaagtcctctctacctctgcgttggacgatttctccacttcctggtgtgcacctgcgtgtgtgcgtgcctgtgtgtgtgtgtgtgtgtgtgtgcgcgcgcgcgcgtgctggggtgtgtgcacactatgccgagagtcgggcaaatttcgagtgaagggagaccgagtcccgcaggttctcttgctcctgcagtctgcggaggaaaaactcctttctggcacggcggcaggaatccatctaccgacgttaggaaaggacagggtgtgctttcgtcccagcttagttttctatggagaaacaggcagcagaggagagtgggccagagggccacattttgcccacgaccagccaggtttgagttggttcctcctaggcctcacggtctgattttctcctcctctttgtgtacccgacgggtgttgctgtgagctcaggaccatcccggcgggctgcggatgggatcatcgtgtgtgtatggccacagccctccgcctcgctcgctcggtgagcacgtgaatcaaggaaggggcacacgactctaggcaggacccggcggggtgtggggaggagaaactcggtaagagaagagagggagagggagacgtgcgaggcgcaggctgtcccaggcgagtctgagaaacggcgtgcgcggagacgtccgccagaaagcaagcaggcgaaaggaaatggaacatccgcagggccggtgccgtgggatccggtcacgccctgacggctttcggggacatctcaggctcgctgtctccgccttggacctggcgcagagaggagtgaggcctgaggacagggctgcgtggccagctgggtgtgggaggtgccaacacagtaagggctggtcaaggggtggccgggagcgatacgggggggttgctcaagaaatcaccgctggaactgggattccagtccagtgggatacgtccagtcatcccacttctggacgtatcgcctaaggacacgaaatcgggatgtggtgcaaatatgtgtcctgctgcgttggttgtcggcacgctacctgtaaccaagacgtggaatcgacctaagtgcccatcagtagatgactagagaaggacaaaggagtggggttcgcagaagaaacacatcagggaaaggaaaggagagccggtcatctgggacgtcatgcacggacccaaaagtcatggtgcccagtgaaatcagccaggcccatccgacccgtattgcgtgatctccttgggatgtgggatggaaagcggtgaggatcgcgaaagtagagaggagaaaggtggttggccgggcctggggccggggtaggggcagggaaaagatgcccatgcgagatgtgggtcaaagggcacaaagtttccgagaggcaggtggagtgcttcctggatatccgtggcagggcaacgcgagtacggtggagcagaatgtaaggttctcgtgaatatacccacgggagtagagctgaaaattctcccgacagggacaggggacgcatgtggggcgataagtgtgtgaattcggccgattctagtgaattccctaatgaagacgtcacacacggtaagtgtgtatcatatttattgtcattcatacttgaaggcaccggcgggggaaggaaataattaaatcgcaagacaaaacctccaagagagatcacctcgaagagagtctaacgtccgtaggaacgctctcgggttcacaaggattgaccgaaccccaggatacgtcgctctccatctgagg

SEQ ID NO: 16990 - DNA, 1117 bp, Artificial sequence
  DNA replication origin
ccaaagcgccgccgacgccactccccagaagcctgggtctccctcccgtgcccgctctcgcgagtcgtcaaccacctgggcgggctggacgtggccctgggcgagcttcgggccccggggggcgccttcctcccggggcccgccggcggcacgcagcccagcgcctcgcagcgcgcctggctcacctggcagctggcgcacgccggggccgccctgcactgggcgctggccacgctcgacagcctgctggctgcggggccctggcccgcgggcccgccgccctttgcgcccgctcctgggggcccttaggtgcgcacgggagccagcaccctcgccttggaaaagctcgaaccctctgccccagaggcgatcccgactctgcaccgcaaactctacggcgccctgcaggacggcggcctcctgccgcttggacgccagccaggagctccccggcagcagcagagcagaaagaaggatggccccgccccacttcgcctcccggcggtctccctcccgccggctcacggacatagatggctgcctagctccggaagcctagctcttgttccgggcatcctaaggaagacacggtttttcctcccgggggctcgccacatctgggactttgacgactcgggacctctctcccattgaatgtttgcgcgttctctgggaaagtgaaatgcctaaccttgtttttactctaagtcgctactttgaatcttccctgttggtctctttaatcacctagccttgcttctcatgtaaataaggctctctgtagctgggaatgctggacaaactccaatcgaccccttaatttacgagacacgaagggctccttacccaacccccttccgcaaggagttgacctgtgtaagcagatactcagcatttcaagggagcccaatcaactgataagatactggcacaaacagtgcatgaagttcccaggatttttctcgaagagataacaacataaagccttgagttcgtgtccagcatagcacctatatctaagtgtcatgaaggatttagagccccgcacctggtaccgttgccttttgtaaccatttgccttttaaaactgtttatctctctataaccatttgcttct

SEQ ID NO: 16991 - DNA, 1776 bp, Artificial sequence
  DNA replication origin
gcatagtgtgcacacaccccagcacgcgcgcgcgcgcacacacacacacacacacacaggcacgcacacacgcaggtgcacaccaggaagtggagaaatcgtccaacgcagaggtagagaggacttcgaaatgggcaacgaagtagggcacttcctttgaaattaccgtgaagcccacagctacctttgtctctgttctgccactccgcaaaattgctcatcacttgccggagacagagcggcagggacccagggagaaagcggaacccctccaacccgcctaacctaatcaaggtagcctgcgcctgtgggcgtgtccgcagccaatcctcctgggaacacccagcagggggtcctggctccctatcaaagcccgccggctgcgcccaaccggccatttccccgcttgcgctgctcaggctgccagagggtagagcctcctcgccgggaacacagagctctttcctggatggggaagctgtcccttgaggagacgggagaagacagacctccctgtggaaagcaggggaagatggagacccgcaagaaccgggagggttctgagagaggacgaggtgagtgagggtcgagtgtctcgtctgtgcggattggtgtgtggagggggtggcaggggccagggaggcaggagagttagagctggggtgacaaaggcagcggtccccgccccacgggccctgatccggcaggtggtggggaaacctaaggtcaaagaaaggcagactttttgtgtgctgggtggctccgccagctgggccatcctctgggtgcgcccgcggaggagggtttgctggagggtgccaggcagctggggaacagccagagtgaggagacaagaagggaccaggggagtggggcctggaggtcttgggcagctggagaaagaggagggggtgggggacacctgggagcagagccattcctgccttgaagtcactctgggagcttggcccttgcaaccctcccgcagccgtctacggacgggtcatggcccactcactgtcgacctcctcttcccccgcagcttccagcgggcacagccgggaggcctctgcgtccaggcacaaacggtggagaagccccgacggctcccctcgcagtcccggcagagaaaccggaaaccgagggcggaaggtcaagccacgaccagccccagccggagagcgaggccacgacaagcccgagtccggcagagcacgacgcccccacgagcgcagaggaggcaggcttaggggctgggagcttggaggggtggggaggagggcgcagggccccgggaaggggagcggggagtggggggccccgagggggccgaggaagccctcagtgcgccaggaacccgggcccccggtggccccagatgagatgtgcttcaagtttgaatgggcggaggggagggcaccccggacggggcaccggagtccccaggatgcagggaggggccgagaggatggggcgcggaggcgagccgcggaggggtgggggatggagggcagggggaggcggggtcgggagcggcttcgggaccttggaaatgggtcccctagcgctgcgcgcagtccctctgacacctcccgctctgtctcccgcgcaggttctgttcccagcccgaggcgcctggaggagccaaagcaccggcctagatcgccagggaggacgagcggcccgcaacgccgcgttgacgtccgggaggagcgacccacctccccaaagcgccgccgacgccactccccagaagcctgggtctccctcccgtgc

SEQ ID NO: 16992 - DNA, 924 bp, Artificial sequence
  DNA replication origin
ccaggaccccctgctgggtgttcccaggaggattggctgcggacacgcccacaggcgcaggctaccttgattaggttaggcgggttggaggggttccgctttctccctgggtccctgccgctctgtctccggcaagtgatgagcaattttgcggagtggcagaacagagacaaaggtagctgtgggcttcacggtaatttcaaaggaagtgccctacttcgttgcccatttcgaagtcctctctacctctgcgttggacgatttctccacttcctggtgtgcacctgcgtgtgtgcgtgcctgtgtgtgtgtgtgtgtgtgtgcgcgcgcgcgcgtgctggggtgtgtgcacactatgccgagagtcgggcaaatttcgagtgaagggagaccgagtcccgcaggttctcttgctcctgcagtctgcggaggaaaaactcctttctggcacggcggcaggaatccatctaccgacgttaggaaaggacagggtgtgctttcgtcccagcttagttttctatggagaaacaggcagcagaggagagtgggccagagggccacattttgcccacgaccagccaggtttgagttggttcctcctaggcctcacggtctgattttctcctcccctttgtgtacccgacgggtgttgctgtgagctcaggaccatcccggcgggctgcggatgggatcatcgtgtgtgtatggccacagccctccgcctcgctcgctcggtgagcacgtgaatcaaggaaggggcacacgactctaggcaggacccggcggggtgtggggaggagaaactcggtaagagaagagagggagagggagacgtgcgaggcgcaggctgtcccaggcgagtctgagaaacggcgtgcgcggagacgtccgccagaaagcaagcaggcgaaaggaaatggaaca

SEQ ID NO: 16993 - DNA, 1327 bp, Artificial sequence
  DNA replication origin
ttctatggagaaacaggcagcagaggagagtgggccagagggccacattttgcccacgaccagccaggtttgagttggttcctcctaggcctcacggtctgattttctcctcccctttgtgtacccgacgggtgttgctgtgagctcaggaccatcccggcgggctgcggatgggatcatcgtgtgtgtatggccacagccctccgcctcgctcgctcggtgagcacgtgaatcaaggaaggggcacacgactctaggcaggacccggcggggtgtggggaggagaaactcggtaagagaagagagggagagggagacgtgcgaggcgcaggctgtcccaggcgagtctgagaaacggcgtgcgcggagacgtccgccagaaagcaagcaggcgaaaggaaatggaacatccgcagggccggtgccgtgggatccggtcacgccctgacggctttcggggacatctcaggctcgctgtctctgccttggacctggcgcagagaggagtgaggcctgaggacagggctgcgtggccagctgggtgtgggaggtgccaacacagtaagggctgctcaaggggtggccgggagcgatacgggggggttgctcaagaaatcaccgctggaactgggatccagtcatcccacttctggacgtatcgcctaaggacacgaaatcgggttgtggtgcaaatatgtgtcctgctgcattggttgtcggcacgctgcctgtaaccaagacgtggaatcgaccgaagtacccttcagcagatgactagagaaggacaaatgaatagggttcgtagaacaaacacatcagggaaaggaaaggaaagcctgtcatctgggacgttatgcatggacccaaaagtcatggtgcccagtgaaatcagccaggcccatccgacccgtattgcgtgatctccttgtgatgttggatggagaaaatgctgtgaggatcaggaaagtagagaggagaaaggtggttggctgggcctggggccggtgtaggggcaggtgtaggggcagggaaaggatgccaatgcgagatgtgggtcaaagggcacaaagtttccgagagacaggtggagtgcttcctggatatccgtggcagggcaacgtgagtacggtggagcagaatgtaaggttctcgtgaatatatccacgggagtagagctgaaaattctcctgagcggggacaggggacgcatgtgtggtgataagtgtgtgaattcggccgattctagtgaattccctaatgaagacgtcacacacggttagtgtgtatcatatttattgtcgtttaaactggactgatccagctgccg

SEQ ID NO: 16994 - DNA, 1104 bp, Artificial sequence
  DNA replication origin
tgctgccccgggcgggatgggagcgcgggttgggtgggaggaggcgcagctgcggggcgcgctggcgcaccgggagggccgggggcggggtcagccaggccccgcccgccgccacctgcgacaggtggagcgcacggggcgggcgcacggccatgtccgccgagggcgcggagccggggccggggtccgggtccgggcccgggccggggccactctgccccgaacacggccaggctctgagctggttctgcggctccgagcgacggcccgtgtgcgccgcctgcgcggggttgggcggtcgctgccgggggcaccgcatccgccgggcggaggagcgcgccgaggagctgcgggtgagcgggtgtgggcgccggaaggcgagggctccggagaccccgggcgcgcctggcgggacccggcagggactggggagcctggggctgggcggactcgacacccggccccggagcctaggctcctcggtggctttggctgtaggactaggcggttaagggtgtggcctctgaagtcaggctggcctgagttcgaatctactccctgtgagtcacgtaactctgagcctcagtgtcttcatctgtagtttggggacaacaacaataataatagcgcgtatttattagagttgtgagaaataaataagatagtgggtaaaatgcttagcgataaggggatccaggctccccaggccccttccattgctctgttgaggaagctggggctggcatgaaaggctcagctgctccagttctcagcgcagggtgtgccccagctcccgcccctgtggaaactgacactgataaaatccagcgcgaccgtatcccttaacccctggactcaaagcccccctcctcctttcgcctcttccccctgctcctaaccccttctggcttctggtgcggtgatctctttttcgctttcaggattggccttgactgtacttcaggctggtttaagggcttcagctggataaacggtgggggtagggagaatatcaggggattccccttcacccaggctttctcgccacctccacttccagctcggctccagggtggccacctccttgtcatcaccattctcctg

SEQ ID NO: 16995 - DNA, 945 bp, Artificial sequence
  DNA replication origin
gggcggggtggggcgggggaggatcacgagttcgggagttcgagaccagcctggctaacatagttgaaaccccgtctccactaaaaatacaaaaattagccaggtgtggtggcgcgcgcctgtagtcccagctactctggaggctaaggaaggagaatcgcttgaatccgggaggcggaagttgcagtgagccgagatcgcaccactgtacacctgggtgacagagtgagactctgtctcaaaaaaaaaaaaaaagaaaaaaagccggccgggtatagtggctcacgcctgtaatcctaacactttgggaggctgaggtcgggagttcgagaccagcctggccaacatggagaaaccccgtctctactaaaaatacaaaaaaaaaaggagccggggatggtggcgcatgcctgtaatcccagctacttgggaggctgaggcaggagaatcgcttgaacctgggaggcggaggttgcagtgagccgagatcgcgccattgcacttcagcctgggcaacaagaacgaaactccgcctcaaaaaaaaaaaaaaaaaaaaaaaaaagccgtgggtcaggagccagagccctctgctctagtcttagctgtgccaatgtgactccctgtgtgatttgggggtaaattactgcccctcactgggtctctgtctacccacctgcaaaatgagaggatctttggatgagtctccttaattcatttcctggacaaacttcctccaaggctcccccagatttaccagtgacgcccttccctaagtatcaacttagccgtactttgaactctggcccctcaggtttcaaggggacggccttgtctgggatcagctctgtctggggaaagaagctgcaccagcctctggatagcaggctgagtcacttgtttcttgtgccttgagtcagttctctcatcagctctcctcctaggcca

SEQ ID NO: 16996 - DNA, 1373 bp, Artificial sequence
  DNA replication origin
gggaatacaggcatgaaccacctcgcctaattttgtatttttagtagagacggggtttcaccgtgttggccaggctagtcttgaactcctgacctcaggtgatccacccacctcagcctcccaaagtgctggcattacaggcgtgagccaccgcgcccagccaacatacattacttttgcaaacaaagataaaactctttttttattcttcaaaagaataaaaaagctccctggtggtctagtggttaggattccaggctcttaccacagggatctttttttttttttttttttttggggacacagtctcgctctttgcccaggcaaatattgtgcagtggcagaatcttggctcactgtaagctccgcctcccgggttcatgccattctcctgcctcagcctcccgagtagctgggactacaggcacctgccaccatgcccggctaattttttgtatttttagcagagacagggtttcaccgtgttagccaggatggtaccacagggttcttaaaaacaaaaagaggccaggtgcggtggctcatgcctgtaatcccagcactttgggaggctgaggtgggcggatcacctgaggtcaggagttcaagactagccaggccaacacggcgaaaccctgtctctactaaaaatacaaaaattagttgggtgtggtggcacacacctgtaatcccagctactggggagtctgaggcaggagaatcgcaagaaactgggaggcgggggttgcagtgggctatcgcgccactgcactccagcctgagcgacagagggagactccgtctcaaaaaaaaaaaaagagaaagaataaaaaagcaggttactgcagcggactctaccctcaccaagttatcttggatttaacaagtttccaactgaaagcaattccctccaataccaactggggaccctgagaccagagaggggctgggccttgcccaggttcacacaacactaagcaagccaggctgggtcccaactcccctcctcccactcaacctgggtacttctcgggggtttcccgatccaaaggaggccaggagccggggttggggatggggagcggagacagcggtgaggagcggcggtgtggcgggcagggggtgcgcagacagggcggagaaggtgctggtaacgggggctgcggagcggaagggtgcgggctggggaacctcagagggtgcggggagggaataaggggcgtagatggtgcagggtaacggaggcgcgcagtgaaggcgggtgacaggggcgcagagaggtgcacagtgagacgaaggagggagaggggacggcgagggcgacgggagatggggcgggagagggcgaaggtgagggggataagggcggggac

SEQ ID NO: 16997 - DNA, 1051 bp, Artificial sequence
  DNA replication origin
cagcctgaccaacatggtgaaaccccatctctactaaaaataaaaaaaaattagccgggtgtggtggcacatgcctgtaatcccagctacttcagaagctgagataggagaatcctttgaacttgggaggcggaggttgcaatgagccgagatcgtgccattgcactccagcatgggcaacaagagagaaactccatctcacaataaataaataaatagaaataaaaataaaaatacaaaaattagctgggtgtggtggtgtgcacctgtagtcagagttcctctggaggctgaggcagaagaatcgattgaacctaggaggcagaggttgcagtgagccgagagtgcacccattgcactctagcctgggcgacagtgtgagactccatctcaaaaaaaaaaaaaaaaaagaaaatgacagggcgttgaacttggttttgcaggatgagtgggttcagcctggtggagagaagggggccaatatttccttaggaagggaagaaaggggcaaaggtggggaaggaggatggctgtggactgttttgaggagctgaggcaagtgtgtatggaggggatggataagagggggccaggctgaggctgtgggaagatttctgagcagtgggtagggttagtggcctggttgacacctggctttgggaagatcaatcctgcaggctgagcagagcagacaggaagcagaggaatgcagaggctggggaggctgcgggcagagaaggaaggggcgtcttaaggcagccaacaggcagtgtctcagggcggatgctctaggcctgcctgcctgcctgatctaaagggcagcggagacagggacagggcaggaagagggcagtggggagctgggcttggagaggaggtggagagctctgttttagacacttccttttggaggtgcctgggagactatcccatagccaaaggatggggaggggcggggaagagccacaaaaatgggggctggcaggcctgagtccaactgctttttgtatgaatgggacctcaaggtccagagaggggcaaggacttaccc

SEQ ID NO: 16998 - DNA, 1127 bp, Artificial sequence
  DNA replication origin
tgtcttgcagggctgaggctggaagccaggtctcccagtgggctggggaggcacaggctctgagggaaggggggcccagcgcagaccctgtcaggttctttccattctctcctgctccccccaagccttgtgaagccgcagggccacccctctctgcaaaggacaaggccaggatttgacacgggagcacttctcaaggctattgggaaaactgggaccccttcaaaggcagacactgggataattcctcttgaagcctctgtaaatgctgcggaggagaaggggaaagtagggaggagggaagaggaaggaagggaggagggaggagggaagagaaggaagagagaagggaggagggaagaaggaggaggaaggcagagaagaggaaaggagggaggaggagggtggggaagggagggaagagggaggaggaaggaagaggaagacagggaggagggtggggagaggaaggaggaggaagaaagaggaaggcagagaggagggtggggaagggagggaggaggaaggcagagaagagggaggagggaagcagagacgaggaaggaggtaggcagagaggagggaagagggaggaggaaggaagagagtagagaggagggtagggaagggatgaaggtggggaaaggagggaagagggaggcagaggggagtgaggaggaaggcagagagcagggaggaggatggggaagggagggaggagggtggaggaggaagtggggaggaaggaagagggaatgtggatattggtcttgcatcaccttttaaaggaaggaatcccaccctctccagggaatgaagactcctggatctctccttcctggggcctcagtttctccttctgagcaggaagtgtataggtgccctttctagtggctttctctctcctcctcccaccacccacccctttccatttcccatctgcagaatttctcgctctgcgtgcgttgaggggtgtgtaggcagagtgaggcgctgctgtggaggttcgggagtcaactgctctgttcagcagccacccgcacaaggtggatcattgtcaccttctcggcttctagtaattctgtgccctgtcctcggccctcttcccccttccttccctccacggt

SEQ ID NO: 16999 - DNA, 2100 bp, Artificial sequence
  DNA replication origin
ctggtgatcaaaagtctagcaaatagtgaagctgggagtcccagcccttcagacttcaagcttcaaggcctttctattatgacattctgtctcttatccctgaagtttaaccatgccgtgaaaacagagcaagcttccatttggggacttggtgtaagctctgacacgattttcataaatctaaatagttattctatgatacccacttcactccacgttcatcttaatccatgtgtcacctgaaaagatggatgagtaatttggagacttgattgatgtgggttttgccttatgactttcctcgaagttaatgggagccatgcggtcccagatccatgaatcaccccagctggaaatgctccattagaaggaaagagaaaacaaaagatcagcaggatgcctggaaaacagtcacactcagggttgtgagttgatggtaatgaaactccgtgtttggaagcacagagagggtgcagtgagcaccgggattggagtcagggttgggagagggtgcagtgagcactgggcttggagtcagggttggtggagagggtgcaatgagcactgggattggagtcagggttggtggagagggtgcagtgagcactgggattggagtcagggttgggagagggtgcagtgagtactgggattggagtcagggttgggagagggtgcagtgagcactgggattggagtcagggttgggagaaggtgcagtgagcactgggactggagtcagggttggtggagagggtgcagtgagcactgggattggagtcagggttgggagggggtgcagtgagcactgggattggagtcagggttggtggaatgggtgcagtgagcactgggattggagtcagggttgggagaggatgcagtgagcactgagattggagtcagggttggtggagagggtgcagtgagcactgggattggagtcagggttgggagagggtgcagtgagtactgggattggagttagtgttgggagagggtgcagtgagcactgggattggagtcagggttgggaaaaggtgcagtgagcactgggactggagtcagggttggtggagagggtgcagtgagcactgggattggagtcagtgttggtggagcgggtgcactgagcactgggattggagtcagggttggtggagagggtgcagtgagcactgggattggagtcagggttggtggaatgggtgcagtgagcactgggattggagtcagggttgggagaggatgcagtgagcactgggattggagtcagggttgggagggggtgcagtgagcactgggattggagtcagggttgggagagggttcagtgagcactgggattggagtcagggttaggagggggtgcagtgagcactgggattggagtcagggttgggagagggtgcagtgagcactgggattggagtcagggttggtggagaggatgcagtgagcactgggactggagtcagggttgggagagggtgcagtgagcactgggattggagtcagggttgggagaggatgcagtgagcactgggattggagtcagggttgggagagggtgcagtgagcactggggttggagtcagggttggtggagagggtgcagtgagcactgggattggagttggtggagggggtacagtgagcactgggattggagtcagggttcggagagggtgcagtgagcactgggattacagtcagggttgggagagggtgcagtgagcactgggattggagtcagggttggtggggagggtacagtgagcactgggattggagtcagggttgggagagggtacagtgagcactggattggagtcagggttgggagagggtacagtgagcactgggttggagtcagggttggtccctgctgtgctgctgttcttattgtgggctcttgagtgcaagtcatttctcctcattgggcctcaaggtcctcgtctttaaaatggaagtaataattcacctttctcacaggataaaggaatcataacattcctgaccataattgagtgcctactgtgtgtcaggcctattctagatgcttcacatacattatcttatttaatctttacaaggacc

SEQ ID NO: 17000 - DNA, 2538 bp, Artificial sequence
  DNA replication origin
ctgggtacacatcataaaaaaggcctcccaggggtccatgtggaaacatgtacaaggatgttcattgcagttttatttggggtgaggggggacagttaaggcaaatgagaagtacacaagctaaggaattcatcaccagcagccctacaccacaagcagcactggttctccagttataatagccagaaaactaggaacaccaaaacacccatcagaaaggggactggttatataaactatggtagttccttacaatgggatactgggcgttgattaaaatgctcggaggtgaataggtaaaatgtggtggctgcaccaagcagctggaagtaatgtggacagatctcaaaaacagagcagaggcacaaaagtgagaaacagaatgagattcaaacactgtattatttatgtaaatttttaaagcatgcacacaaaacaatagtgcatgtctctaaaaacacataaacaaaaagatgcatgttaaatacattagaataagcggcttggaggtaggggaggagcagagaagttggagaaaatggggataaaaactaaacaaagctagaaaggaccctacacaagcaaagatagccacacaccctaaactgagcaaaattaacttgtggcacatgacttttaaaagggagggaaagaaaacaggtagcatctgagttcttactatgtgctgagtgtttacatgtattaattcatttaatcttcataactaactccacatggggttctctgaaccagcccctgaccctgcaatttacaaagacgaaacagagaggtttagcaaactgctcagagccacacagggaggaaggagcagaggcaagacttgaatccaggctggcgaactccggtgtctgcactctccaccctcacgtaggcagcttctgattgttcttaccctacttagctgagaaaatggaagcactgccatttcttctcagaatcacagaaagtcagaaagagagtctgtattgcactgcattggacccctttatgcagatgcaaaaacaggcccaaaaaggcatgaagaggcacctcaaggccacagatgctcagcgcgatgtcccccccactgcgacacacttagtatcccagcttcaagaccagttagacacgcagaggaaaaacaaaacaaaacagaaatagtccggagaacaggagtttggaataaaagactcagaggattagggaccaaggaggcagcaggagagagaacaaaacttgcttgcaggtttgggacccagccaccaggccacttaagaagctgtaagccttagttcagccacgaagcagtggcgtttatgagctacgagaccccgtgataaccctgtcccctggctggagcttccactcagctagaatggggactctggccagggaacaaggtcttttgctgggcccgggtttagcatgtcccggaaaagcccatgaggccctggcacgggcgctgatgtatcagctaatgtctcgttcaagttgtcagcattttgttagagccaattcagtgggtaattaagaaaaaagttgagaccagatggggaagcagatgctagctcagccgcaagagcagttccctgcaagtgtctggcaaagcaccgggctggccaagtccgcacagagaagggcgagagcaacagctgcctagacaggagacggggcaaggagatgcccgttttaaatgttggagacgctgaggcccaacgacgcaggagaacttgaggaaaaggagagattctgccctgaggagaactggagacaaagtttagaccctcaagtgcaacaaacgctctctcgcagcagcgggagaggacagtgctaggagacaggagctcgggttcgcgggagaagacggtgctaggagacaggaggtcgggtttgcgggagaggacggtgctaggagacaggaggtcgggttagcgcgagaggacggtgctaggagacaggaggtcgggttagcgcgagaggacggtgctaggagacaggaggtcgggtttgcgggagaggacggtgctaggagacaggaggtcgggttcgcgggagaggacggtgctaggagacaggaggtcgggttagcgcgagaggacggtgctaggagacaggaggtcgggtttgcgggagaggacggtgctaggagacaggaggtcgggtttgcgggagaggacggtgctaggagacaggaggtcgggtttgcgggagaggacggtgctaggagacaggaggtcgggtttgcgcgagaggacggtgctaggagacaggaggtcgggtttgcgggagaggacggtgctaggagacagcaggtcgggtttgcgggagaggacggtgctaggagacgggagctcgggttcgcgggagaggacggtgctaggagacgggagctcgggttcgcgggagaggacggtgctaggagacaggagctcgggttctggcctcagctctgccaggttctcttgggttgctgcctcacctcaaagaagtcacttttccccttcctctctgtgcctgtttactcatctgtaagatgaa

SEQ ID NO: 17001 - DNA, 1141 bp, Artificial sequence
  DNA replication origin
gaatgggaactgaggtagagccagtcagcgtaggtgcattttgagtttgctctaaagaggaacagagttaggggcatgttccctagtgctgacatcacagtctgttgctatgctgtggaaagcctctggtcgggaagggaaaactgatgttgcaggagagcagggaaattgccagctcagtgacctcgggtccaagccaagagaaagaagtacaattccactggggcagcacgcaggaagagtgactttagagtgcattagatctggtggtggggagatgagtagttttctcctgattgcttctattttctcagggaaagtagctgttagtggagagcaggttgtttgaggtttgaggagagaggcgaaagtctcaaatgcccatctaggatcatgaattgaggagggaaattgttgggctgtactaagggcccactggaggtttgtggtcacacatttaaagtcagacaatccacatggttttgtgtgttcttccagtgtggggtaggcaaggagttgacttggggttttgccagagaataaaaggagagagaggtctaaagatggaaagattaggcaaaggggcaatcattgtgatgggcttggtcttggctggggagggatagcagtgggggaggggcatggcagggcaagggtgacagggtggtggattgcagctcctgtgggggccaggattggtggaagggtctgggagtcaggagacaggatgcttgaaattgagatcatggcatggtggtgtcattgctaaggacaaggtctagggtgttacctgggagcaggggttgagctggtgggctggggacaggggagagaaaggggactgaaagaaaggagatccaagaactgattgatcagagtcagatgagttgttagtatagccaaaattgaagacagaagtaatggcggcaggaaagtcagtgagccaggggcccaactcacgggcacacggtgtctagatgatgccactaggctggtgggaggggttgtctggtggagggtgtgctgggcttgatggacttagacttcaggctgctgctgtttggaaggaagttagagggtccatgctgtagagatggcaaggagtggtgagggggatactcaccctctggggtgccccagg

SEQ ID NO: 17002 - DNA, 1582 bp, Artificial sequence
  DNA replication origin
cttgcttggtggccccgggtaagcaccttcccaggctggagcactcacagtttgacggctgatgtaaagggtgagcagggcatggcttcggctggaggcctggttcagggtgtgggctgagttccttcgacggctgagacctggaagggaaaaacatcaggagctggacctggtaggaagaacaggtcatcatcaatgaagaaaaaggagcaaaggaatcctggcggaagggtcagcctcatgcaaaggcagggaggcaacagagtgggtgttgttcagggaacgatgggatgttgggccctgctctagcagagatgggtggatggaggatagagaaaactgagcagaagaatgacagtcagatttgcattttataaacatctctcccactgcttcgtgaaaggaaggggagaaactgaggcaggagatcagctgagaggtgtggcacagtgctggggccagaatccacagtcagcatctccagtgcctgccaaaggaggggtgcccaataaatacttgatttaaaaaaaagaatgaggctgaaagggcctttaggctaggctaagaggtatgaccttgatcctcagggccctggaagggtggagggtctggaggcaaagagagatggggtttgcagcatagaggagaatggatgggcaggggagagccttgaggtgcagagaccaccagggagcaagaatgagtcctggcggaggccgaggccctgggctagagaggagagggtgtgaaaggagtttggaaggcagaattagcaggccttgttggcagtgcggggaggcccttgggccatgcctttgaattgtggtttactggtccttccccacctcccccaggaatcatttctgaagctgcagctgcagtctgggccccaagtccacactcagtgaacaactgaggaatgggcacccctacccgcaaaactccccgctgtcagcacacacccgtttgcaaaagttccatcagggcctccagactcccaaattccaccacccgcagctgctccacatagaagccccgagtcttgttccagcgaacagggaggggccggggagaccccaggctcagcaagtcccgaacctgggaggggagggaggagggtgagggaaggggatctttctgagtccacccatccccagatcttactgacaacagtccccaccgcctcttctgtcctttgatccaggctccctggaaagaagcgctccgtttcctcatgggctgtctttctattcctctcattcccttacctgctcattgtagatctccagataagaggcgcgaagggtgacaggggcacccaggtgctgcacgcggtccaacagccaggcgaaggtcctctgcatgatgccagccaggctggggggtacaggcaccccctccccctaggggcaaaaccagctgagccatcgtcatctccacagtaataactaccctctgtagcgcatgtatgataccgtgcgccgggaaacgtgccaagttcccaaacaatggctcatttaattcatagtcggtactgtcacttccattttacagatgagaaaactgagagctaggaaggggc

SEQ ID NO: 17003 - DNA, 1088 bp, Artificial sequence
  DNA replication origin
agccagaccaggagagggttaaacaatcatgctggcctaggattaactttggcattagagaggcaggtgccccagtgttttaccagatgcttggaaacctgttctcaggtcagctcagagattcaatccagccaggtcgtccctagagctgactgagacctgtgccactccttgggccctgagctgagctgctgggggtgggagtggggggtatgtggagagggtgggaaaagcttggtcctgtgcaggctagctctgtggccttggttgagtccttcctatctgcttaggtatccccaactgggcacaaaggaggccggtctgggtggtcccacgggttcctcttgtgaggactggccaagagcaagggatcctcagactccagaaccccctagctaggggtcccctagcttgggagagactttctccaccgcaggggtgaggaagggtaaatctttaacgagctagccctgggcagctggagtctttccggatggatggctgcctgggatgggggatggggtgggaatgcaagatgtgtgtagacagtcccagtgttgtggagaagggagggtattggtggggggtaaataaaggagacgcgggcggagctaactccgtgtgcagagcaggacatggaagaacgcgggtcacccgacgggtaagcagatcttcagacaggttcgaggagtcctgaacagccgctaggtgcaggtatgataagtcgcattgctgcccacagggatctcgcgcggagcctggagcaagggccagaggggccggaaacgcccatccaggtggtgctcaggtgggtataaattggctaggaggcacctgggcgagacaaggatcgaggaagacatcaggatgtaccatctgcccttctgtcggaccccagggtacgtcccatgagcgcggccgagctgcgtcgagggcagcagagcgtgctgcactgctcagggacccggactctgcaggtgaggaacccctctctctatctccccaataaaaaatcccggggacgccagatcccttcccccaggcaactttgccctaggccccgcgctcccccggagtggtcctctccc

SEQ ID NO: 17004 - DNA, 1623 bp, Artificial sequence
  DNA replication origin
tgcagccagggtttaaaaggccgccttcagcgccccctccccgcccccagcggagacttcaaaaggcccggcgggcgccgccgccccagcacctatgagccgcccccagctctcggagcccgcgccggagcccgtggacgcagagctgccgaagttcgagcgcaggcggaccgggtcggcggcgcagtcccgcgcgcccatgcccctcccggtgccgctgcgctccgcgcgcccgcgccccgtttagggaaggggacctcgccccccgcccccgcgcccacggctgcggggacccatgaatacaaatgccgttaggcgccggaggaaggaccgaccggccagcctcgcacgtagggacccagtaagtgcttgggggctcctggagcggtgcgaagtgttatatgcctgtgtgtgcgcgcgcctaaaggtgtgcgcgtatggggaggtgggtacacgcgtgaggagtgaatgcgtgtgtgcacatgtgcggtgggcactctcggagaactgtgtgcaagtgagggtgtgcgcgcgtgtgtccacccggggtgtgtacatgtgtgggggcgatatggccaggatagcgtgcatttgtgcctgtgtaagcatccgtgtgcatgcttctgcgagtgtagagtatcagcgtgcgcctgagcccagatatctgaggatgcgtttcgtgtgaacctaggaagggtgcgtggctgtcccagaatgggaccgtgtgtgagcgtgtgtctgagtttggggaaagggtggatacgtgtgggagtgtgtgtgtgcaccggtgaataagtgtaactttgctcgtgaacgagtggcaagaggtggtagaggcggagggagctgtggtcccagggctggactggagttttgggtgtgagaatttgcccgggggccaaggtgtgcagctcttagctcccggatgggatccgagggagtttttgtcgattctggggaggtgcgtggttagtggtggtggtggggtgcggttagattccaattgctgacagaagggagagagagggtggcaaacccttaacaagcccaccctatatgttctccagggcgctccgagtctgggagcgcaaacttttggtgggcggtggggatcacgatactggttgtcgtgggcgtctggacaccaagttctggtcctagctccgtccctgaaactgtgggtttcttccaggagtagaatttggcccttctcccctaccccaaccccccattggaggacccccagcctcaccagtcagaagttcctaatctcagaacggtgatcaaatcaccgtgaagccctgggcagccccttcctctctgtgaatctgtttccccatctatacaaggaggaggggggcgggtgtcccatcggggctgtagtgggccagctgaggctgtacccttggctccggccggcagggggcagcagggggcagcagagggcggccgggagcggggaggagggaaggtggagagccaccgcgggccgagactttaaatcgccttcatttcccccaaatccttccttttcctctcctcccccaggccggcggggaggcagcttccaccgccctccgcgcgccctcacccggccttgctctgcctccggggaccgccagc

SEQ ID NO: 17005 - DNA, 1199 bp, Artificial sequence
  DNA replication origin
gggggccgcgcgctctaagccggcctggcgcggcggggcggggggctggcggccccatggggcgcgcccacacttgccccccgggctcgggagcatgaagtaggggcctgccatgggagcgggatcggcgcggggggcccgaggcacagcggcggcggcggcggcgcgcggggggtgagtacgaactcggggacgccccctccctagcttcctgctgctccaatctcggggagggccggggttccccgccatgcggtcgcttccagcggaacgtcagcttcctgccccttcctgcgcccccgcgaggcgggacgccaagggttaataggggctgcgcccccggccgggcgagagttggcgaacgctgcccgccctgccgcgcctggcccggctgcccgatcccgttggggcgggggcagagccagcccgggggtcgggggtgggggtgggtggtggcgcctggagcggccggcggggtgcggaggggggctttttggatgcttgggggaggaggggggtctccgtttggggccgtctcggtgtgttccggtgtctcagtgtctgcaggtcccaagcctgtacgtctccgtttctatctgttcttgtgaaattgtccgcaagtttctaggtcaccaggtctcgggttctgctcctgtctccgtgtctgtgtggctctgcacgtccccgcgtttctggaaatctccgcgtgtttgtgttagtcggcctgggtctgtgtgtctgtgtttcctgcttctcggttcctgtccctttcacgtgtgtaagagagaaaaagtgagagccagcatgtcagagcagaaagggccctgggcgatcactgtgcggaacccctcagtgtacagatcgggagacagggccggagaggggcagggactctcccaggagcggctgcgcggagctggggcccagaggctgggattcccagcgtgtggagtaggagttgtaagagagagtgagcctgtgctggagccggcgcagcgtgtgggtgtgtgtgggagccagcagcatgcaagcagcccgttggggcctgtggacggcgctcctctctttccatcctgcccccaggacaccaggacactccccagaggctgttagggctgtagctgggccctgccccctttgagctggagtccgcgggatgacaccccctcctttcttccccatgtcttggaaaaagctgg

SEQ ID NO: 17006 - DNA, 1038 bp, Artificial sequence
  DNA replication origin
gcatggggtaaaagctgaaaagggagctagctggaactacagctcatcaagtggggtggacctgtcccacctgcctccatggactggccagaccccctgtgcccagacggctatgcctgggctttcttcacagcttccacgtcctccatgggaacacagacaggtcatcgtctggagaggatgcagcccagaactttcccattgactcacacacccattcaacatgaagggaataatacaaataccagctgccgtttactgagcacttattacatgccaggccctgttctaagccctttacaagcatggtcctgttcatcttcacaaaacccagccagctaggaataaggtgccggttttgtggaagagaaaaacaagcagcagagtggctcacccaagctggcacagcagagttaggattcaaactcgagcctgcctgatggcaagcctcatggccctcctgtggtgccgcctgcctcccaccaacatgattctgtgagtgtctcactgctgtcccctaccaccagtggatatgttactctgcgtagccaagccaggcatgtgggtatcaagagggtccctggacagagatggaggagagaaaatgccaacaaagaacaggggagtgtgctcagaaagggacagagaccaccaggaggctgctggctgctgagggtccgcagcgctggtggaggcacaggagagggagaatgttctgagtacagggaggaaacagaaggaggcagaggccagggatgtgtccatagacatgacatggagtttggtccggccagaagggtccaggagcagaggcatgctggagagcagaggcatgctggagagcagaggtatgctggcgccagagcgcacatgatgcaggacaacgtgatgtcaagggaggcagggaggcaggagaaggcagagactgggcctccgagcagtgttgactgcccacttgcccacagctggagccccaccatggggtgctcgcctggcaccacttttctgcccaactgctggcatctaccctggcgcagg

SEQ ID NO: 17007 - DNA, 1635 bp, Artificial sequence
  DNA replication origin
tgcatgatctggagccagtcagctacgggccttccttaagctgttcgagctttgcagctgggttagcaaagaacgggcttggacctgggccaaccaaagcccagggatgctcttcacctgggggtagccaccagacttgagtctgtcccagcggatcatgaatctggagcagggtgggcaatgatgcatttagcagagccagaggagccgggggcctggctggagccaaggatgtacccataaccagctccctgctctaagctgctccttttcctgtctttactaggggcaaccacttgaccaatgccccagtcccccactggagctccaagcagcatgcagaccccactcagtcttaccggcaagccacagtctcccttgggtcccggaggccccatcagcagagggaaaggcgtagatcctgccaggtggaagatcgaatagccactgctcgtgggccgggggctggaggacaggaattgcgccggggccaataccagggccggggtggtctgctgactgggctggggctgtctggggctaggcctggttgtcagatcgctcaaggggacatccctggctgccttcccaggtctgagggggacaggcttccgggggctgctcttgggtccggctttctttgaggcttccgatccaatgggcttcttgcttccagtgggagctgagccaggagtggggacggcaggtgctgttctgggagtgctggtgcccgaagttggaggtaccatcgtggctggtggccgagtactcctggtagaaccaggagtaggggcaggagatgaggataaagcagtaaatgggggaggtttgtgggtgctggtgcgggcagaggccggcttactggcatggctggttatcttggcctcagtccgagctagtgtgggaatgggttttttagaggagctggtggtaggaggtaggggccgggtgctgggcggtgggggcctgggcattcccgggttcctctggatgggcttctctgcgggacgggagactctggcaggaactggacgggaagtaggtggcacttgcttctgagtgggtagggctgactttgtaaatgaagatggagctgttttctgggtaggatgggggcttttgatgggcacaattgaagtagaaggggccgaaggcttggtagggaggcttttggggattttggtggctgtgatcttctgtgatggttgagcggccgcagggcgaggcgttctggtagagccgccaacagaggctgggagcatgggatcaagtgcgttactggctgacagcttggcaggtagcagcggggtttgggctgggcctcccaccgccatatgctggtgagggtttgtggggctagtcctttggggcttggtgggcgtggcgggtgccacagtccccctgggtcccctgcctgctggcagtgaccccagggctggtgtggcagtggtcaagttctccaggcctagcagggcgaggtcggactggaaggtaaaaggtctgccagagtcttgggagaagagaggtcccagtggggactggtacgtgtcagcctgtccacactgcttcctcaggtgggtacagtaattgtgagcgacctgcgtcacagggtagatactgaactggcagagagca

SEQ ID NO: 17008 - DNA, 1421 bp, Artificial sequence
  DNA replication origin
cagtggcgggcttgactcagcggcggggaagtaggccaaggggaatttagcaggagggtcccgggccaggattctgcattaggaacttggtctgcgacctttcacccgccccctgccctctctggttttgcccttggagggtttggaaggaatgtgtgctaagattactttgagctccagcgttctagggacccttttttagtgagtgttgagtatcatggctgtggaatgggcaggaacacatggcagaaatagccttggaaccagagtcctgaggttgaacttgagtttctggctctagtaacccattctctgtgtgactttgggcaaatcactgcccctctctgagccttggttttcttatctataaagaataaataaaacttagggtaggaaagcactttataaaatgcaccagaaatatagaagattgtctttataaatttagaggagaaagtgactagaggctggtggtggctggtggtgatggtgagtggatggtgtgggtgggggcagcagcaatggtagtggtggtaatgacgataataatgatggtgatggtggtagtactgatgatggtgttggtggtggtgatgatgatgaagatgatgggggtgttgatggtggtagtggtggtagtggtgactgtgatgaggtggtgatggtggtgctggtgctggtggcgatggtgatagtggagtggaggtgagggtgatgatggtgctggtggcgatggtggtggtgatagtgatagtggtaatgataatgatgatgatggggcactgatgatggtggtggtgatggtggtggtgataatggtggtggtggtactaatgatagtggtagtggtggtgatgatgggtggtagtgatggtagtagtgatggcaggggagtgatgatggtggtcatggcagtggtgggggtgggagtggtgatgatgatgatatggtggtatggcgtaggtagtggtgatgatgatggtgatgatgatgatagtagtggtgtggtggtggtagctgtgttaatgtcaatattttgccatcactcccatttctcatatgccgggattggaaggagagtcacttgggccagacgaagtgtgtgccaagtgataaggcagtgaggggccttacttgagtctctttggcatcaggataaatacctcccactctgtggcctggaaacagttgagtatttaaaaacagaattttatgagccatcggggcctttccagaaatgcatctatatggatggggcccagcagaaatattcattccggacccacagcctcacccactgtatgtatgctctcggctggagagggcacgtcccagcaagtggcaccctgtcccaggggagacgcagcctcccgtctccctgcccctgtaccggatgcttcagcactgactcatctcgcctt

SEQ ID NO: 17009 - DNA, 817 bp, Artificial sequence
  DNA replication origin
agccagggcaccgtttctctttctcctcggcctctgctgctggagcgggctgggggcagggaggacacagagagggagtggctggtgcttccttgtgggactagagtccacacagctggtgggaaccccttgagaacagcaagtctgtgccctgccagcaggtgggtgggggtatggttgagcctttttggaaggtctggttactgatttggggggtggtcttccttccccatctccctgacacatctgacagccttggtttcagagttgcggtaccccagctttgaatcctctgtctgcgcttcctggctgtgaggtcttgtgagagcaggccatgtctctgtgcctcagtgtcttcatctgggaggtgtcagggtgtgggtgggggtagaagcagggtggcaccctggacagctctggctggatgggaaggggctgcagagggcacggggaggctgtgcgggctgcgtagctgtgctggcaaaggagagcctgggcgtctgggcagttctgagggattgagccataaagggaagggtccctggctgtggaatgactgagcgggcggagaagccctgtgtgggtggtggggaagaagagtccatcccacccaggaactgaagatagacacctcaggggtctgttagacccttgagagagcaggggcagtggcggcttgggtgtaagaaggagatgtgcagaaggagggtgcagtggctgctacttccttgtggggccagtttctccagggatggcggggaccctgaactccatagccctccccagctcacactgctggagtcttcaccaaacccca

SEQ ID NO: 17010 - DNA, 775 bp, Artificial sequence
  DNA replication origin
ggctgcccgccgcgccgaacccaggccgtctggcccgaacgcaggccaaggcggaggcgcccaggctgcttcccggccccggagccccacagcaccaagcccggatcgcaggacacgggcgcgcgcccgggcccgcgcacactcaccgcccgcgccgccgccgccgccgccgccgccaccccgggacgcggaaggtcgggggcgccgagcccctaatgccgcagcctctgggcaccgcagccccgcgcccagcacgcctcccgcgccgcgctgcgccgccttcacgggcccgccccccgcccggccggccccgctcggtcgcccaaccccgaggagccgcccgccggactcgctttggggccaagagggaacgcgcctcccgggcccgcggcggagcggagctggaggccgcgtttcatcagccgagcgcccccccgggacgccggaaggagcctccgcgcggagccgaccacgtgcacggcatcttggggcacgggttcccgccgtctccccactgtaaaggagcggcttactccagaggtccagccccctcacacacaatcacggaacccgtggatgaggcagtatttgagaccagaagtttattggggacttgggtttggtttttgtttggttggttttgtcgttgtttttagagtcgggggtttcgctgtgttgcccaggctgctatcggactcctgacctcaagcgatcctcttgcttggcctcccaaagtgttgggattacaggcgtgagccaccgcacctggccgggg

SEQ ID NO: 17011 - DNA, 1016 bp, Artificial sequence
  DNA replication origin
atcagcaggctttattccattcacctggaggctgtttcctgtaatagctaaaagtaaccggccctgtcctgccgcttctcacctgtgtaaccttgagtaagttacttctctgcctcagtttccttacatgtaagtggggataacgacagtaacttcaggtggttgtgaggtttaaagagttcacacatgtaaatcactcaaaatagcactgggcaagtaggaatcattgaagaaatatagctgccatcatttttactccacagacatttcctaagcaccttctcaggccaggccctgtgctatcttgagcacgaaactggaaataaaatctgaagttcctactcagccctccctgctagggatcaccatctggtaggaaagacaaactcagggaaagacaattacaaaacaaacaattgcaacaaggcagtgagagggagcaccttggttggggtgggggaagggttctccggaaggcttcctggaggaaggaggctcctgggcttggcaaaggtggaggtgagagccaagagaggccagtgccaagcagaaagggatatggaccagaggccaggacatgcccatcagggcagcctgtgtggtcaccttgcagcccctcattcaaccaggaagctgcagagggcaggaggggtgctggcaagacctcaagggcagatgcctatcatatgtcctgaaccccatttccccatccagctcagccctgcaccagcccgaggataacacagaaggtcagacagacagcagggtggaggcagagcagggggagtgagcacagccttgaggcccctgcaactaagcaggaaaactagagcttctctgggtctcctctgctgattctgcattttaaccagaacttccagatatccatcttgcacaaggtcaactcccctctttttcagcccgtagagagcatctgcaaaggaacatactcttaagtcctattgcgcaaaggcccccagctctgcagacaccgagtgcccagcctccccgggaac

SEQ ID NO: 17012 - DNA, 838 bp, Artificial sequence
  DNA replication origin
gggccgcagggacggtgcagcgcccgccgaggcgccctcacctacctgtgatcactgccggagacctctggcccccctccgctcgcagccacacttgcagcgtgaacgcgtcccggggcagctcgaggtcggcccggaggcgcagctgctcgcctcgcccgctgaaatagagcgcccggctcggcgggctcggctcctcggtggcgcccctcgcctcccgctgctgccgccgccgggggacgcgcacggcttcccaggcaccgcccggcggcggcggcggcggcggcgaggcgcggcggccgcgggccgcccgggtggcgcaggtggccgggccggcggcggggcgcgggggtcggccggcccgcgggtctctccgggcccggcggggacgctcggccagcccgcagcccagcgcggcgctcagcagccccaggtgcagcacccaactccagagccgcatgtccgacggttccccccgcccccccttcgcccctgcaccgccacccggagctgccagctttgggagcctcggcgcctcgactttcttcgcttcttcacccttcttgggcgagcccccctttccacttgcttttttcttttctttctcgctttcctcctcaaggtgtgtgctccactctccccacctttgaaaaatacagcccaactcctcctggttggcaattaatttctctccccgctcctttatctgccttatttttcccctaacagctggttgccttcctccttgttttatttcattttattttatatgatttctcgctccaaaaaaaagctcctcttaagactgatccgctgaattccctccccccaaaagatg

SEQ ID NO: 17013 - DNA, 1715 bp, Artificial sequence
  DNA replication origin
gtcggacatgcggctctggagttgggtgctgcacctggggctgctgagcgccgcgctgggctgcgggctggccgagcgtccccgccgggcccggagagacccgcgggccggccgacccccgcgccccgccgccggcccggccacctgcgccacccgggcggcccgcggccgccgcgcctcgccgccgccgccgccgccgccgggcggtgcctgggaagccgtgcgcgtcccccggcggcggcagcagcgggaggcgaggggcgccaccgaggagccgagcccgccgagccgggcgctctatttcagcgggcgaggcgagcagctgcgcctccgggccgacctcgagctgccccgggacgcgttcacgctgcaagtgtggctgcgagcggaggggggccagaggtctccggcagtgatcacaggtaggtgagggcgcctcggcgggcgctgcaccgtccctgcggccccagaggctcgcgggtgtctgggcgcgggtggcgggcgggtcgggggcttgcgggcgtgtctgtgcgagagctgccccgcgagcggcgcagagacatccgggcgagctgagagcctcactttgctccatcggtggaatgggcacactcggaaggcgtagctgctccatccctgggaggaacctggggagccctcctggcggccccgcggaccctcggccagtgagggctggttcccggagcctagggcacgtaacccgtgctccgaatggtcagatgcactctctccttttgggatgaaagggaggatgacccaattgagatgcatgtgaaaggagacttggggaccgttgatttctttgacgttttaatggaggtaactccccttcattaggccccattcccctgaaagccggcaagggcaaggttgttgtaatggccaggacttagaagtcctcgaagtgccccaaagttgctcactgattgaagcctgcctctgggactcaccctcaccccctccacgccatcccatgtcctagcttttaaagcccattgcctgtcactcggggctgggacgagaccttcctaacgcataccccgccagcgttccccagacgcggctgcgaaacggggcgcttttctcatatgggactttatgagcccgtaatgaatttgagttctccctcctcaacctccctctctctccccttcgctgttccacagcaaagcctatagtgaaatcggacactttgcgaggattgcaaaccttagaaatgctccagcatccattttcccccctctaaatgaatctgtggaaatgcctttaataaaactggggagcggaggtgggggcggcgctggaagagaggaggaaagttttgccttttctgtctgggagattccctttctgcacaaacaatcttgccatgtcctgggacgtcttaaagtgagagtaggggttcccccttcactgcagccaggaaacgtgtgaaggcgttttgcgatcccaccccctcacacacacactttcttagaagggaaagctgtgagctctccgggcagttctgcttcttcctgtctttccatggcttggactttcacagatgtagcactgactatccagttgacatgaagacccctttaggagacccacactctgctgctatcccaagaatacgtctcccgaagcccccgctttccagctatcaaaggagagcgatacagtgattccccccaacaacccacaactga

SEQ ID NO: 17014 - DNA, 2335 bp, Artificial sequence
  DNA replication origin
ttgagactggagtcagatacgcattctggcttatctcctgacttactgagtgaacttgagcaggtccctttcgcccatgggcgtcggtttcttcatctgcaccaaggagacggaaaactggattacgtgtcgctaaggccccgggttctcagaggaaagctcacccctgcagggccgccttgccccgcgcgcttggggccagctgcacgacaagccccagcatgctggggaggcggggctcagtgacggacagggagctctgcgaattggcgcccggcaaggggtgctcaacggcgcgtgcgcagagggaggcaggcgggtgggctgccggcggtggactcgtcggagccgcgggcggtcaggtagggggcgggaaggagggttggggactggggaccgcggccggagtcgtgggccgtggctcagcggccaggcgggggaacgtgccggcgtgcagcggccgcgcccgaatggcagggtgtggggaccggatctggggggggcaggactagggtgggggtggggctgcgaggggcaggctcgggagggattcgtggggctgaggagatccgaggagatgcagctgggggaggggagcgaggggctctgaagagatttgcggttgcagcatctcgggaggtatgaggtaatgtcggggccctgaggaggaacggggtgtagcatgtgggagatgggagggaatcagggccctggagggacctgggtgcagaatttcagaaatatgaaggaactggggggccccgatgagatttgaggaaatctgggggcgctaggcatctggcaaggacagggtctgagatgataggagcaaggtctagggcgatcctaagtgctattgagaaagggttttcggagtgggctgagggtgagattgagggggtggggtgagttcttgagggactctatcttgttagcagaaagaagggagctggctgaggtgtgaaggcagcacatgacattcagtgcataagaggaaggagcagggtatgagggcagcacagtgcccgatggaatgcaggagatgggggctcagattgagggagagcagaaatctggggtgaggaattggggcgttgaactgaggtgcggggctgagtgtggcagagatttggaaatagggattaaacgatctgagtccgagggatttggggcatatgagtgaggaattgacgagggttgcaatatacagccccaaagattggaatttggaattgtaagagggttggggacagggtttggagaggattgaatcgtggggtggagatgtcctaactgggctataaaatcaaaggaccctgagtagatttgtggattggtgtcttgggctgctaaagagattttccttaaatcgctgcatgggagacagagggagttcaggggacccaaggacctaaaagtaatgtatgaaactggatgagtatatgaagatgagcagagttcaggtgctgaggaacaaagtgataaatcttcagttcagataatcctgaaggagtgtggtaatccctgtgaagggcagaatcttcttcatttattaaacaaagatccgttatcatgaggcaggtatggtattgccactaactccattctgaccaccggtcccccggcccactgaaagtggtaggctttggggaagaagaagtggaactattcaaggtcatctgcctaagccctttttccctgtacccccaagctacgatagcagatagaaagtgagacctccaggggaatgagtggaataatttatcctatataagatccattacagcttgaaggggcagtggctctgtgagtgaggtgtttgggctcggagacagacaaaacaacaacaacaaccaccagaaaaaaaaaagggaacccttaggtattgagcatttagtcctgtgctagactgtaaagcagtggttcttaaccaagtctggctttgtctcctaggagacattaggcaatgtctggagatgttttttggttgtcacagggtgggggatactactggcctcaagtgggtagattaaacattaaacataatgttttatgttaaacatttgacaatgtgtgggatacgcccttcccccccgcagtaaggaattatcctgcctaaaatgtcagtaatgccaaagttgaggcactctgacctagagtcagataccctgggttcaagtcctagctctatctcttcctgactttaagtcctagctctatctcttcctgactttgtggccttgaatgagttacttaaccacccagtgccttggctcttcatctgtaaaatggggttatgataacaagaccaatgtcacagaattgttgtgaggat

SEQ ID NO: 17015 - DNA, 1071 bp, Artificial sequence
  DNA replication origin
gtttgctttgctagagtagttgtatgagatacctctatagaccagcccatcttttctcacacagtgactttatccacaagaaaggaaggaaggaagaaaggagagagggagagagggagggaggagaggagaagagaggagaggagagagggaggcagatggggaagaagggagggaagaagggaggaaaagaggaaggaaggaaggaaaagaaagggggcaggggaggggaggggaggggatggaagggagggaagggaggaggaagtaagggagggagggagggagggaaagaaggaaggaaggaaggaaggaaggaaggaaaaaggacaggaagggaagggaaggagggtgagagggagggagggagggagaaaggagggaaagaaggaaggaaagaaggaaggaaggaaggaaggggaagggaggaaggaaggagggagggaggaggaaagggggaaggagggaaggaggagggaaggaggagggaaggaagaaaggaaggaagaaaggaaggaaggcaggcaggcaggcaggcaggcaggcaagccaagccttcagacatatttgtttctgacatctcaaaggaggacaaatcagggaatccaaggttggaagagacattcaaatctcatttttcatggcataaaggaaaaggcagcatctctacgtatgattgtgcagcttgtgccctgcataagggtgccccactgaagggagactgggtattgaggtccagtccatggtctaaatggacaagcactaatccttgcatggcttgcatctatacatgtataataagcaggaaggatccaaaggtagagctagctcttctcactaaacaggcaatcagagatctgcattctgtggggtttgtattctatgtgatcttttatgtgtctgctttctagatatattccctcttttgtaaaggaagggttttaggtaaggtacagggtgaggggactatcattaatagagtatggaattcccaccaagcatagtgctgagtataaagcatttgtcttaatcttttcaataatccctttttaggttaattagtcccatttt

SEQ ID NO: 17016 - DNA, 986 bp, Artificial sequence
  DNA replication origin
aggagcccctctgcctggctgcccagtctggaaagtgaggagcgtctctacccggccgccatcccatctaggaagtgaggagcgcctcttcccggccaccatcacatctgggaagtgaggagcgtctctgccctgccgcccatcgtctgagatgtggggagcacctctgccctgccgccccgtccgggatgtgaggagcgtctctgcccggacgccccgtctgagaagtgaggagaccctctgcctggcaaccgccccgtctgagaagtgaggagcccctccgcccggcagccgccccgtctgagaagtgaggagcgtctccgcccggcagccacctcgtccgggagggaggtgggggggtcagccccccacccggccagccgccccgtccaggagggaggtggggggggtcagccccccgtccggccagccgccccgtccgggaggtgaggggcgcctctgcccggccgcgcctactgggaagtgaggagcccctctgcctggccaccaccccgtctgggaggtgtacccaacagctcattgagaacaggccaggatgacaatcgcggctttgtggaatagaaaggggggaaaggtgaggaaaagattgagaaatcggatggttgccgtgtctgtgtagaaagaggtagacatgggagacttttcattttgttctgtactaagaaaaattgttctgccttgggatcctgttgatcggtgaccttacccccaaccctgtgctctctgaaacatgtgctgtatccactcagggttgaatggattaagggcggtgcaagatgtgctttgttaaacagatgcttgaaggcagcatgctccttaagagtcatcaccactccctaatctcaagtacccagggacacaaacactgtggaaggctgcagggtcctctgcctaggaaaaccagagacctttgttcacttgtttatctgctgaccttccctccactattgtcctgtgaccctgcc

SEQ ID NO: 17017 - DNA, 1597 bp, Artificial sequence
  DNA replication origin
tcaaccctgagtggatacagcacatgtttcagagagcacagggttgggggtaaggtcaccgatcaacaggatcccaaggcagaacaatttttcttagtacagaacaaaatgaaaagtctcccatgtctacctctttctacacagacacggcaaccatccgatttctcaatcttttcctcacctttcccccctttctattccacaaagccgcgattgtcatcctggcctgttctcaatgagctgttgggtacacctcccagacggggtggtggccaggcagaggggctcctcacttcccagtaggcgcggccgggcagaggcgcccctcacctcccggacggggcggctggccggacggggggctgaccccccccacctccctcctggacggggcggctggccgggtggggggctgacccccccacctccctcccggacgaggtggctgccgggcggagacgctcctcacttctcagacggggcggctgccgggcggaggggctcctcacttctcagacggggcggttgccaggcagagggtctcctcacttctcagacggggcgtccgggcagagacgctcctcacatcccggacggggcggcagggcagaggtgctccccacatctcagacgatgggcggcagggcagagacgctcctcacttcccagatgtgatggtggccgggaagaggcgctcctcacttcctagatgggatggcggccgggtagagacgctcctcactttccagactgggcagccaggcagaggggctcctcacatcccagacgataggcggccaggcggagaagctcctcacttcccagacggggtggcggccgggcagaggctgcaatctcggcactttgggaggccaaggcaggctgctgggaggtggaggttgcacgagccaagatcacgccactgcactccagcctgggcaccattgagcactgaatgaacgagactccgtctgcaatcccggcacctcgggaggccgaggctgtcggatcactcgcggttaggagctggagaccagcccggccaacacagcgaatcccagtctccaccaagaaaatacgaaaaccagtcaggcgtggcggcgtgcacctgcaatcgcaggcactcggcaagctgaggcaggagaatcaggcagggaggttgcagtgagccgagatggcagcagtaccgtccagcttcggctcggcatgagagggagaccgtggaaagagagggagagggagagggagaggagactgactctaattttatttttattttttgtagatatggagtcttatgctgaccaggctggtcttgaactcctgacctccagtgatcctccatctcagcctcccaaagccctggaattacaggtatgagccaccatgcccagcagtagtaaagatgaaatgagaggtgaaaataacgagactaaacacataatgaaagccagaatacactgtcagtcacaaagaatagacacaactgtgaatgaagtctgactgagccacttcctcaatgtgtgccctggctgttctgagtctcagtttccacaatttatacattggagaaaataactccttcctcactaggctt

SEQ ID NO: 17018 - DNA, 1259 bp, Artificial sequence
  DNA replication origin
ggcgcccggctcagccccggccccggctcggggctccgggggcggccgaggctctgcttccacccggggccgccgccactgctgccgctgctgctgctgttcctgctcctgctgccgccgccgccgctgctggccggcgccaccgccgctgcctcgcgggagcccgacagcccgtgccggctgaagaccgtcacggtgtccacactgcccgccctgcgggagagcgacatcggctggagcggcgcccgcgccggggccggggctgggaccggggccggagccgccgccgccgccgcgtccccgggctctcctggctctgccggcaccgccgccgagtcgcgcctcctgctctttgtgcgtaacgagctgccggggcgcatcgcggtgcaggacgacctggacaacaccgagctgcccttcttcaccctgggtaaggctgggcgccggcacgcgctagatcccaaggaaccccgagcccctgcgtcatgccggacgggtgggggcgccctggggatccctgcccggggctgccccgagtggggttggcagagggtagaggaggggcccagaggtcgcacaggtggttggaaacgagcatgtgggaggaggtcctggagagcgcgcggcgggagcctgggggcgtgccaaccctcccgcagtgggaacctgcccctctgcctctcagtcccgacctggagctctgcttgatccatcccggaagccggagaccccattcactgaaggtgctctggctaggggccggagcatcccagatcctaagccagtttcaggtcgagcctcccacttctccgggtaccgtcactggccacccgccgtcaccgccccctcgctctcgcctcggagttgcgggttctgcccttccagatggattttcatgagagtaggaatggagtagttccgtgtggaatcgctcaacccgcaaaagcgtggcttccgcatgggctgagtgaccttggccaagtcgcttcccttctctgagcctcagttctggccatctgtgaaatagggctggagagacttgagtggttgctgagaactgggattccgactccgaggtctccacgtttagagcctccctctacccccgttaccgccttccctttctacccacctccaggcagagagccggtttgtccttgcagctcactccctgggctaataataattacttaaaggcaagaaaaaggagaggagaggagatgggtgtgggtggggggctccaacggaaaagttaatca

SEQ ID NO: 17019 - DNA, 993 bp, Artificial sequence
  DNA replication origin
aacgttattaaaaaatatatgatgagagaggagaaaagcaatttatatgaagggttaaagatagaaaaggggaatgagacagaagagggaagagctaagagaaaagtgaatgcatagagacagcacaaaaggtgcagatgggtaagctagacagagatgagaagttgctcacaaattataggaaagaagcatttgtaagattaaagtcaagatgagaaggaaggaaatgaatggagagatgaaacagaaaacagagacagggaagatgaagaaaagtaggggagtggggaaggggctgcacggcacttgacccatgcagaggtgtccgctccctggagggtctcaggtatgtgggtcagagacagagtcagcccaagaccaaagggtgctgaatctgaggacctagctcaacttgagtctagaaagactgcaggtgaagaattggtgagcactcccgttctctgggacttgggcagaggatctaaaagacccgggagccaaggacagacagaatagtaggtctctacctcacacccttttcaggaatttcacacagagagcagaagcagccaagtagagctgctccaagctgggagcagggatccaaaataaaaaagcgtgagtgggctggcttgcagggcggcagctagggggccagaacagcccggcttcagtcagttgtggggtcggcgttagacggtggagttcgacgcccctctgtccattagcaattagtgctagcacaaggcctggatggaggggagaggaaggtttgcgggcagtgggagaatgaatgcaggagttgtggccaagtgggtgggaagggggctctgaggctacaggaagttatttcagagactagaaaagggtaggagattggagaaaggacttgttcttgggcctgaggggagacaaagttaagtcttggctatccagggggctccctatccccaagaaggcggggccttgagcaaggctgggccaaggcgcgcc

SEQ ID NO: 17020 - DNA, 1114 bp, Artificial sequence
  DNA replication origin
caatctgatttctctttcttttccccacatttcccccctttctattcgacaaaaccgccatcatcatcatggcccgttctcaatgagctgttgggcacacctcccagatggagtggcggccgggcagaggggctcctcacttcccagacggggcagccgggcagaggcgccccccacctcccggacggggcagctgccgggcgggggctgcccccaacctccctcccggactgggcggcaggctgggcgggggctgaccccccacctccctcctggatggggcagctggccgggcgtgggctgccccccaccttcctcccggacggggcagctggccgggcgggggatgccccccacctccctcccggatggggtggctggccgggcgggggatgccccccacctcctggacagggcggctgccggtcggaggggctcctcacttcccagatggggcggctgccgggcggaggggctcctcacttctcagacagggtggccaggcagagatgctcctcacctcccagacggggtggcggttgggcagagacactcctcagttcccagacggggttgcggccgggcagaggcgctccccacatctcagacgatgggcggccgggcagagacgctcctcacttcccagacgggatggcagccgggaagaggcgctcctcacttcccagactgggcagctgggcagaggggctcctcacatcccagacgatgggcggccaggcagagacactcctcagttcccagacggggtcacggccgggcagaggtgctcttcatatctcagactgggcggcctggcagaggggctcctcacatcccagacgatgggcggccaggcagagacgctcctcacttcccagacggggtggcggccgggcagaggctgcaatctcggcactttgggaggccaaggcaggcggctgggaggtggaggttgtagccagccgagatcacgccactgcactccagcctgggcaacattgagcactgagtgagcgagactccgtctgcaatcccggcacctcgggaggccgaggcgggcaggtcactcgcggtcaggagctggagaccagcctggccaacacggcgaaacccc

SEQ ID NO: 17021 - DNA, 954 bp, Artificial sequence
  DNA replication origin
ggagagcgcaggcgagcgaacccgcgagagagggagagagcgagcgagcaacagcgagagcgagagcgagagagccgggaggcagagggagtagtgaccgccttccggagccgggattcatgcctgtcctcgggaccagcgaaggggactttacggctgagtatgagccaggctgctaggagccaggtacccccacgcctgcagtccccgcgccgtgcccggaatgcgagctgcacgcagggctctcccaagttcccaccgagccgaataaaaagcgtcctcccgcagctctccgccaaagacggacattgactccaggtaaggcggcgccgggtgcagcgccccgcagccccgctgcccttggacccggccccgggccgcattcggggcgtccccgcgctcctctgcccctccccctaccggcacccttgtccgctcttcacctggccgccccgccgcctccaagtcttctccagttctagggagggggttcctgtgcctggggctcaaagggctaattgcgggtttgagtgagtggcgtgtgtgtccccgcgcgctcccgacgtgtgcaccatggtgggaacttgatgtggtgctagtgtgtttgcgtgtgcggcgtcgtttgcgtttgatgcgtgtgttcgtggtgtgtgtgtgtgtccgtgtgtgtaagggaggggtgaagagagagaggtcctataacctacttacggcgcgatgtgtgtgtgcatgtttgtacgtatgtgtttgtatgtgtgccctcgtgtgtctttttaattaggtctctccagcttacacggaatgggacccttactataggatcacgtagtcaccgggaaacccgctgtggacttcctcttggggctctgggcttggggtttggggaggattatggggctgtagatggcaccttatttagcccaatgttggtacgcttgaaggaaaattcctcca

SEQ ID NO: 17022 - DNA, 1525 bp, Artificial sequence
  DNA replication origin
ctgcgggaggacgctttttattcggctcggtgggaacttgggagagccctgcgtgcagctcgcattccgggcacggcgcggggactgcaggcgtgggggtacctggctcctagcagcctggctcatactcagccgtaaagtccccttcgctggtcccgaggacaggcatgaatcccggctccggaaggcggtcactactccctctgcctcccggctctctcgctctcgctctcgctgttgctcgctcgctctctccctctctcgcgggttcgctcgcctgcgctctcctcctccccgcgcgccagatcagtttgcagccgtggggtccgggagcgaggcggctggcgaatggagagggaagtccaagtgcgccgcggtctccgggcggggagcggcggaggccgggctacgccgggggagggacttagccggcgacggccgaaaatgaatgggggagcggcggccggggggcggggagggaggagctgaacgccggggttgcttccgaggagtgttttgtacatctttaggcggaggaggaggagaagcgagaggaggagagacgggaggccgcctcgagggaagggcggcccgggtgggctggggctgagccgtagggagtttcgtgggtctggggcgtgtagggtgttgtgtctatgcgcacgagcatccaaagggaccgcgcatacgcgcaaacccggaatcctggtgcccttaagcgtgactgtactgtgtgtgtcgcgagtacctgagtgtttctggggcggcaggtgtttccacggccgcgtggatccatcgagtgtgggttttgtctcgggagttgcccgtgtgggtccgtttgtgtctgcgcgtctctctgtgagtgtttgacactgtttgtttctctcggtgtgtaggcgagagcccacgtaacctcccagaatgaagcaagagcttctctacgtaggcaggatgtaggagggagaagctgaggggacacgaagttctctggagaccaccagaggcggggaaggggcgagggtacagggactaagacatgaaaataaaaagcaaaatactctgcaatcagcctgaatgcaggctggggctgctaacatagggcctcttcctgaagcagaaaataaagccctcgtatgataattcccacacagcgcacatttggtatgtttgtttactttgcttcccttctgatttaaaccaaatcagcaatgcagatccctagtcccctgaagattaggcaagaatagaaagcattaaggctaccagatggaggggcaggaagtcataggaaaaggtgttggaatatgtaaaagagccagattcagtagaagtgcaggctccagagaggttggagtcctgtagctgtctggtcttggtgaaatcacttaccccttaagcctcaattccttgtctgtttaatagaataataatatatctacccatctaatagggttgatgtggaattgtaatgagttaatatatgcaaaggcacttagactgctcatgagttaatgtatgcaaaggc

SEQ ID NO: 17023 - DNA, 1504 bp, Artificial sequence
  DNA replication origin
cactcgcggctaggagctggagaccagcccggccaacacagcgaaaccccgtctccaccaaaaaaatacgaaaaccagtcaggtgtggtggcgcgtgcctgcaatcacaggcactcggcaggctgaggcaggagaatcaggcagggatggcagcagtacagtccagctttggctcggcatcagagggagaccgtggagagggagaccgtggagatggagagggagagggagaccatggagagggagagggagagggagagggagagggagagggagagggagagggagagggagagggagagggagagggaggggggagtggttgttttaatgactggcaaaagaatctaatccttactacctttcaggcttagtctttcaagttgttagccccatttacaggtgtaaatgctgaggctcagaggaagggaagtgactcacttaaatgacttaatcataaatagcacaattctaaagcttgtgccctttccacttcgaccagctgggtaagtgtttgttgaacgagtgaatgaatgactggaaagttggagaataggggaggctcagaagagcacttatgacttcatatgacctaattcatttcaggattggaaaggaggtgaggagttcaggtagaaaacctgttcaataaataaagtcagtgatgaactgagctctgcccatattccacccaacacagcccagttgagagtggcagggggagagaaggccttttgttgcttggtaaccttgggcccatcactcccatggggaaagagaaggctggagtctccatcttcgaagctccccttccactggctttctctccattatgctgactgtttctgtgaactcccacggtgatggtgactgacctcatgtcagtctccctgagagctcagagcagaggtgggatgtggatcagcctctgtccccctgcttctttccagcagatccctgatcatctcagcagctgacccaactcaaaggcgatgagaccatttcactccaatcgggaatgagcacactgtggtacagtcatctcaagtgaatctctgctcttgaatctgctgtgctaagaggcacttttacttgttcagtggagagaatagaggtgggagggagtgtagggtataagattcagtcataaaccaaatgctcttaaagtccattatctgatatggaaatgctgagtcccaaagtctctttcctcctcctttcccctgctcctcacccttttaagacacaatgatgttaaggctcccagaaagcctgtacgatcagcttctctctgcccttcccaggcgtgctgggctctactctaaggtggaatttgtataattgtggatgattttgcctgcaacgtcttccctctattttcttttccccatacaattgcagtgtgtttctctgttcattcattctacttctttccttcttcatttactcaaaaatattagtgatggcatctttgaccctctaggatccttagcttcctggtaga

SEQ ID NO: 17024 - DNA, 978 bp, Artificial sequence
  DNA replication origin
catgtctacttctttctacacagacacagcaaccatccgatttctcaatcttttccccacctttcccccttttctattccacaaaaccgccattgtcatcatggcccgttctcaatgagctgttgggtacacctcccagacggggtggtggctgggcagaggggctcctcacttcccagtaggggcggccgggcagaggcgccccccacctcccggacggggcggctggcctggcgggggctgacccccacctccctcccggacggggtggctgctgggcggagatgctcctcacttcccagatggggtggctgccgggcggaggggctcctcatttctcagacggggcagctgccgggcggagggtctcctcacttctcagacagggcggccgggcagagaggctcctcacctcccagacggggttgtggcggggcagaggcgctcctcacatcccagacggggcggcggggcagaggcgctccccacatctcagacgatgggcagccgggaagaggcgctcctcacttcctagatgggatggcggccgggcagagacactcctcactttccagactgggcagccaggcagaggggctcctcacatcccagacgatgggtggccaggcagagatgctcctcacttcccagatggggtggcagccgggcagaggctgcaatctcggcactttgggaggccaaggcaggtggctgggaggtggaggttgtagcgagccgagatcaggccactgcactccagcctgggcaccattgagcactgagtgaacgagactccgtctgcaatcccggcacctcgggaggctgaggctggcagatcactcgcggctaggagctggagaccagcccggccaacacagcgaaaccccgtctccaccaaaaaaatacgaaaaccagtcaggtgtggtggcgcgtgcctgcaatcacaggcactcggcaggctgaggcaggagaatcagg

SEQ ID NO: 17025 - DNA, 793 bp, Artificial sequence
  DNA replication origin
ccatctaggaagtgaggagcgcctcttcccggctgcccatcgtctgagatgtggggagcgcctctgccccgccgccccgtctgggatgtgaggagcgcctctgccccgccacaaccccgtctgggaggtgaggagcctctctgcccggccgccctgtctgagaagtgaggagaccctccgcccggcagctgccccgtctgagaaatgaggagcccctccgcccggcagccaccccatctgggaagtgaggagcatctccgcccagcagccaccccgtccgggagggaggtgggggtcagcccccgccaggccagccgccccgtccgggaggtggggggcgcctctgcccggccgcccctactgggaagtgaggagcccctctgcccagccaccaccccgtctgggaggtgtacccaacagctcattgagaacgggccatgatgacaatggcggttttgtggaatagaaaagggggaaaggtggggaaaagattgagaaatcggatggttgctgtgtctgtgtagaaagaagtagacatgggagacttttcattttgttctgtactaagaaaaattcttcttccttgggatcctgttgatctatgaccttacccccaaccctgtgctctctgaaacatgtgctgtgtccactcagggttaaatggattaggggtggtgcaagatgtgctttgttaaacagatgcttgaaggcagcatgctcgttaagagtcatcaccactccctaatctcaagtacccagggacacaaacactgcggaaggccgcagggtcctc

SEQ ID NO: 17026 - DNA, 866 bp, Artificial sequence
  DNA replication origin
tcctactcggccttggaggtgagcagggaaggtgtcctcgggtgaccctggatgaacagtaaaggccaactgggaattgtggggtggagaaggggtgggggtggggctcctaggcagaggaaacagcagggactagggtctgtgagtggtgcattggtctggctagagcttagaattcagtcagcggcataggcagtgcctccagtggcagcttgaggcgggtgggtgtcatcgggagcagcaggggaggcacgggtaagtttttgtctgggaaggggttgggggatgttgccgagtgtccagggtgcaggctggagtgtcctcacctggtcaggggccggcaacagagaggcagggtggatttgggacacttatgaggacctgaggacccgtgtgtgtgtgtgtgtgtgtgtgtgtgtgtgtgtgtgtgtgtgtgtgtgtgtgtgtgcgcgccctggcggcgggggtgaggaggagagggtccatgctgcaggtttctggcccagccagtggtgtgggcacctccacagagaaagagcagtacggaaagtatggaacagtatggaatgccaactgcatctttcaaggtgggcagaatctacagggttgtggtaggggaggaaacagcctgtgcaaaggcatggaggccactgagggacccatggtagtggagtgtggccggggcatgaaacacgaggttggacacaaggtactggagatttgggccttttttgtgtgtgtggcattgggaaaacaatggtgattattccagcgatgaaggagaaagccctgggaggaggcagaaagaaaactctagacgagaggccagtcaggggagggggtgagggactcggtcattgcccagg

SEQ ID NO: 17027 - DNA, 746 bp, Artificial sequence
  DNA replication origin
ctttagccaaaacaatggtggggtcgggggccacagacagagagtgaccaggcccagggctcctttgtggtggaagccagtggctgggagcccacctggagagtgtggagtgggtgtgggagggagagacaggtgggcgaggtgtggacactcaacataggaaagtatttggagacagtcacagttacacactcaacatctgctggcacctacccaagcccagagctcccagagccccgcgggcccccgaggcactcccagtcaagcatgggagacaggccagcacacaggtgatccgtggtcgtgataaatggtcacaaggggccgtgggcacccagaaaatgagctcctactcggccttggaggtgagcagggaaggtgtcctcgggtgaccctggatgaacagtaaaggccaactgggaattgtggggtggagaaggggtgggggtggggctcctaggcagaggaaacagcagggactagggtctgtgagtggtgcattggtctggctagagcttagaattcagtcagcggcataggcagtgcctccagtggcagcttgaggcgggtgggtgtcatcgggagcagcaggggaggcacgggtaagtttttgtctgggaaggggttgggggatgttgccgagtgtccagggtgcaggctggagtgtcctcacctggtcaggggccggcaacagagaggcagggtggatttgggacacttatgaggacctgaggacccgtgtgtgt

SEQ ID NO: 17028 - DNA, 934 bp, Artificial sequence
  DNA replication origin
aggggcgcctctgcccggccgcccctactgggaagtgaggagcccctctgcccggccagccgccccgtccgggagggaggtgggggggtcggccccccgcccggccagccgccccgtccgggagggaggtgggggggtcggccccccgtccggccagccgccccgtccgggaggtgaggggcgcctctgcccggccgcccctactgggaagtgaggagcccctctgcccggccagccgccccgtccgggagggaggtgggggggtcagccccctgcccggccagccgccccgttcgggagggaggttggggggtcagccccccgcccggccagccgccccgtccaggagggaggtggggggggtcagcccccctgcccggccagccgccccgtccgggaggtgaggggcgcctctgcccggccgcccctactgggaggtggggagcccctctgcccggccaccaccctgtctgggaggtgtgcccaacagctcattgagaacgggccaggatgacaatggcggctttgtggaatggaaaggcgggaaaggtggggaaaagattgagaaatcggatggttgccgtgtctgtgtagaaagaagtagacatgggagacttttcattttgttctgcactaagaaaaattcctctgccttgggatcctgttgatctgtgaccttacccccaaccctgtgctctctgaaacatgtgctgtgtccactcagggttgaatggattaagggcggtgcaagatgtgctttgttaaacagatgcttgaaggcagcatgctcgttaagagtcaccaccactccctaatctcaagtaatcagggacacaaacactgtggaaggccgcagggtcctctgcctaggaaaaccagagacctttgttcacttgtttatctgctgaccttccctccactattgtcccatgac

SEQ ID NO: 17029 - DNA, 1042 bp, Artificial sequence
  DNA replication origin
gcccggcgccgaccacccctgtagcgaccaccgtaccggcgcccacgactccccggaccccgacccccgatctccccagcagcagcaacagcagcgtcctccccaccccacctgccaccgaggccccctcttcgcctcctccaggtgagtccggcgctccctctcgggcaggacccgtcctcacctcagccccggcaatctagggttgggctcttgcctataatttatcgtttgttaccccaaagacaccccaggttccggctcccgaggggggatcccaggtccagctagtctccctcccgcccccgatcaatctggaaagtcttttgtcccccgtgggctgtgctccctcgggagggggtggctgctgggtggaaggcatctcatcttcttcccaacagggctttctggcctttttcagagaccagaatgggcgcaaacttttgggttgggttcgcgcacccagcctctctgcctgggttatttggggaagtttgaaagcccgcatagtacctccttcaaccactgggtcaaaagctgagggtaaggaattcctcccaaagctccagtttccctgttcatttcttcttgtttatgtaaatatcagatgtgtgtgtatgacaggtggaagagaggtagtgagaggattttgtttacaaacagtagtatggaccacttgagggcaaaaaataaaaacaaaaaaggcattgtaatccatgttgtccctgcaaataagtggattcagtaggtcatttgggacaggtgtgtatctaggctgagcacatttacaaattaggttaaatctcttcctcgcaccatttttttcttccacaattataaggtcaacatgtttggccaaatacaccatttaagcaaggatgcctatttttgtctccttaagccaggatgttcaactttgctgatgctgatatatgccaatttctgtttgagcccacgtagaaaaggcttttcttgctgaagtcttcaagcaaagttaaagacaactcgtattctttccccgtttaaatcttaagtgggccta

SEQ ID NO: 17030 - DNA, 1018 bp, Artificial sequence
  DNA replication origin
tgcgaggaagagatttaacctaatttgtaaatgtgctcagcctagatacacacctgtcccaaatgacctactgaatccacttatttgcagggacaacatggattacaatgccttttttgtttttattttttgccctcaagtggtccatactactgtttgtaaacaaaatcctctcactacctctcttccacctgtcatacacacacatctgatatttacataaacaagaagaaatgaacagggaaactggagctttgggaggaattccttaccctcagcttttgacccagtggttgaaggaggtactatgcgggctttcaaacttccccaaataacccaggcagagaggctgggtgcgcgaacccaacccaaaagtttgcgcccattctggtctctgaaaaaggccagaaagccctgttgggaagaagatgagatgccttccacccagcagccaccccctcccgagggagcacagcccacgggggacaaaagactttccagattgatcgggggcgggagggagactagctggacctgggatcccccctcgggagccggaacctggggtgtctttggggtaacaaacgataaattataggcaagagcccaaccctagattgccggggctgaggtgaggacgggtcctgcccgagagggagcgccggactcacctggaggaggcgaagagggggcctcggtggcaggtggggtggggaggacgctgctgttgctgctgctggggagatcgggggtcggggtccggggagtcgtgggcgccggtacggtggtcgctacaggggtggtcggcgccgggccagtggtcgtcgaaagggtggtcggcgcgggtctggtcggcgcctgagaggtggtcgaagtgcgttccgccgccggaggggtggtcggcgaggggccgagcggcgcctgaaaggtggtggaagagggtccagcagtcgcccaaagaggggtggtctccggggactgggctggagaagtcgcagccaggggtcggtggacggtg

SEQ ID NO: 17031 - DNA, 2127 bp, Artificial sequence
  DNA replication origin
caggcggccggccccgcgggcgggccccagcgcggagggagcgaccggaccgagcgcggaccgcccgccctcctcgattggcagccgcgcctaaccaatgggaagccacagtcgcccacgtgatccgcccgcttcccggcctctttgtagccccgtaggccaatcagaggacgtccaggagagggggcggtccgtgaggcgggagaagggtggtgcgagcccagctctagcccgccgggctcgcggcggccccggctttgtctgcccaaagagtggggcgcgggcctcgggcaccgggcgccgcggagcagacaaaggatgcgccccgcgcggcagacgccgggcctagtcatctgctccaccgggctgcgagcacgagcggggggtggaatcagcactcgggagcatccccgccctcctgaacaatggggcgccagcgccgcaccccagctcgggcggggaccgcgcgggaaccccgcgatgggagagggcagcggcagcgacgatgtagagcttggcatgccctctgctgctccagagagcctggtcgcagccttgcgaggtctctgccgccattcccatttcagagatggggaagctgaggcccttgctgagggcctccctgaaccgagacccacgccctcaccagaaacctgctgtgggccaggtgttgtgccagactggacaagggggcgggaccgggcggtggagacccctgagggcagaaggtgcaagcttcctgcgtggaggagacaggctcgcaagcacacttacctaaaccccgggaagaataggatcagacagggttgaacctcaacttgatgtcttttgctgaatggttttgtggcctgagcgcggttttttcaccactaaaatggagatgataggacacccctcaccccccacccccctcacagagctgttgtgagaattaagtcatggacgtaaagggcttagcccagagcctggcccactgttgtaaccctcattaatgctaactattctcagcatttgcgccagggcaagcccaggattagaaagcagccccaggccacagcccttcagtgcccccagagcctccggctggttgcaggggttggggtggggctaatagccgagcttgaccctggatgacactaaaccctgaatcaagctggaattcgggcacgcagcctcgcatcatccgcccaggatccagagctaggtcaggcgctgctgcttcggctcagcagcttccagaggaagccaggcagggcgggtttgtcatctgatggggcttaattcaagccccactgctaacccaatcccggcctcccctacgtgatgtttggctttgtgcatggtttcccattagtcattggtcttcaaccagaccagcaggatgagatttatgtgtgaacccgtgtatgttaattaaagcatgcatttattttcctgcatgagtagtgggtgggggaggctgtgtatgaatgcataaacatgtttgtgagtctgtgtgtatgagtgttgtatgtatctgtgtgagtttatgagtatgggagctagtatctattttcatatattgtgtcttaataatctgtgcatgtgtactggtgtgtgtttttgtgtattttctgtgtttttgcatttgtggttatctatgggtgtgtcttgataggtctatgtatataagacagcgggaatgagggagaatgtgagtgttctgtcttcaggaccaatatttagcaagcactaaccaaggttctatttttactttgctttgggagggtggacaggtcatgccagtcccccatattcccttgctgaccctccctggcccttcaaaccccaaccaaaatgtcacattctctaaaagacattcctggatttgagtgggaattaatctctcccttctcatttccccaccaccccttgtttatgcattgattacagccctgatctaccaatctacctctccgttgcctcttcctaaaaggattaaggatggctttcagaaatatatacaacaggataaattgtattgcccacatggctttattacttctcataggcatgcatcagccttaatactagaacttgttatttatgtgtctgtctcttacgtcagatgttctccctgttctgaga

SEQ ID NO: 17032 - DNA, 1369 bp, Artificial sequence
  DNA replication origin
caactgtagccagtggttgcggctccctcagtctggcgtcatctaggtcgctgctcagggaaatgcggaggccagtaggcttacgtgtttaccgcgtagggcaaagccttgccaaattcccggccagcggagcggcgagggtggggactcacgggaagttaaacagcctcgtcggcgtcctcgaggctccaaaaccaggctctaggcggggacgactgcagccgttatggaggccaccgcggctacggccgcggctgaggcctccccaggtggagcggtggcctggaggggaatcttgatcctgggccagccacctgtcaagaggaggcggagcgtcatgcctctggaagactggatgaatattctccaggagcctgacgaaggcgtgagtaatagggacgtgcgccgccttgttggtgttgatcagtccaccaaggagaagcagctggtcgcagtggccgtacctgtaatcccagcgctttgggaggccgcggcgggaggatcgcttgagcccgggagttcgagaccagcctgggcaacatagtgagaaacccgtctctaccaaaaagaaaaaaaaaaaaaaaggaaaaaaattagtgcggtgtggtggcacgcacctgtagtcccagctactcgggaggctgaagcgggagggtcccctaagtctaggaggtcgaggcttcagtgagcggtgattgtgccactgcactccagcctgggcgacagagcaagaccctgctttcccctcttgtcctccactaccctcaggaaaccaagaaagaccagcgtggagagttggtcgcccatctgctctaagctgctgtgtattcccctgtaatgtaaacatcgtgaaggtggagacccagttaaccttttaggtggaaggccagatgacagagggcggcatctgacccggaaggccctctgcaaccaggccaaatacatctacagggaaccaatgggaaacatctggggaggacaacccaaataagtatcatgcgagcaagggatggtttgagaactttaaaaatcgctgctgttttgcaacatacgaagttgatggggaggaaggacccttaaatcctgagtgggtatcgagtattccaagcaactggagagaggctttgtgcctcaacaggtcttcaacgccaaggagatgacccatcttttgcagtgcatgccttcctacttttggggcaaaagacaaaaatctggaaagcttagaggaagctaaggacaggatttccctcatttttttgtggcagtgcctcaggtgacaaaatgataaaaccactgctgctttacaaagactctaacaccccacttgtcttttagagataaacgccttcctgttttcttgtaatcacac

SEQ ID NO: 17033 - DNA, 1523 bp, Artificial sequence
  DNA replication origin
agggcgccatcgccaggacgctgcaggccgtgaagatggtgctgtcctaccagcccgaggagctcgagtgggactcgccccatcgcaccaaccagcagcaatgctactgctactgcggcgggcccggagagtaaggcagggggtcagggccccccgggcggcagggcaggtctccaagaatcgccagcagggaccgcccatagggagcgagcctggcgtgtcagccaaggcggggaccttgagggcgggcccagtgtgttgcgctgtgggggcggggcctcgaggggcgggcctggagtgtcagccgcgggggtggggcctcgggggcgggactcggggaggggggggtcagccgctgcggaggtggggcctcgaggggtgggcccggaagattggacctgagggcggggcctcggggggcgggcccggaaggttagaccttggggcgaggcctcgggaggcgggcctggcgggttgcgaccgcccaagcagggccccagggaggtgaggcaggtcgagaagcaccctgtggaggggcggggtggggaggagggaatagtaaggcctcgggaacaggacctgaggaggcgaggcctcaaggggcggtccctgaagggaagggctcggggtggggcccgagggggcgggacctcaaggggagaacagaaggccggctccgcgtggcatctagcactgtggagcagggctggagggcagaggtgttaccttggagctttgtaggaaacgaggaagtattgaagagtggttaagagcctgggccggacacagtgcgaatcctcccaggacgtccacgtcctagctctgctccttaccagctgtgcaaccccttagcctcagctctctgaatagtttccccatcatgtggtgattatgagcagagcatgaattacgtaattcacatagaggttctcatagtgcctggcatttggtaaacaaaaaaaatgtgagctgttactggtggtagtggtggtactaatgcatgaaagtcaagataaccttttcacagtcagagtcagtggaaccggctgctggtgagatatgaagatccttttcccgcctggcgcggtggcacacgcctgtagtcccagcttcgtaggaggctgaggtgggaggatcacttgagcttgggagatggaggctgcagtgagctgtgatcatgccactgtactccagcctgggcgacaaagcaggacgaccctgtctccaaaaatagaaaagattcttttccctggagatgtgcaatcaggcaggggtagggggccggggggcggggcatgctatgtcggggccactgtggagggaattcttgtcctggctctgcggcaagagtctttgattcttccttgccgacctgggcctctatgtagccatggcagttgagcttgcttctttgggctgagtgcacgtggcattgtggaaggaaccacagatgtaagagggagggtctctgccctcaggaagttcagccgtcaggaccccctgaagtcctgaatctcagcccc

SEQ ID NO: 17034 - DNA, 1618 bp, Artificial sequence
  DNA replication origin
tcacgtccgaagtcaggctgcggcagggttgggatgggggaggcttggcgtccgagcgactgaggagaggagcgctgaacccgaagggggtgcttctgcaagctttttcccccctcctgaacatcctttttaaaaagccaacggccgccctgggagaggccccggcgcatgaatcatcctcgcttcctgcccccgcccggccccgcgctcccggtgccgcggatttgaactggacgcagacgggaacccgcaaacaggcatttctttgcaaatgggtttgaatcagccaatcacagcccgcgggggcccgctccgggaggacggaggcgggggctgggggggcgccacccgggggcccccgcccggccagggtggaggcgggtgcggcgacccggccggctcctagaggcgcagcgggagaggaagtgtcagtttgtgaacctgcagcggccccggcctggcccctggccgggcgggcggggacctcgcagcgccgggcgagccaggtggcagggagaggacagggattcagaccgcatcccctgcccgggagcctgtgcgctctgcgctggagaaaaaggagatgggagtgggggtggagaaggtcgtggccacgccaccatctggggagccgagacccctgcagtgcctggctcgccccagggccccgcacatacttagcttcacacactccctggcacaatgccgtagacatcatcctgcccagtctcacaggagtacacacacgcaccacacagaaacaggcactggactctctccctgtgaacagatagtcacaacaccaggtgcccagcgccatggccacaaggaggagacccgagtaggcccgcggggaaagagagaggctgtgtgtggctgtagtggagagcatgtggagggacttggagccaggtgagcccagcagaaaggagggggcgttagggacggctttgagcaccagtgagggcagtggggagccccagaaagtttctggaaggaaattggtggccctgcggaagagtctggtggagaggcaggaatgcaggaacggcctgtttagcactgggtgctggtagtaccgttccccaccctaggtgcctagtggaggtaagcacaaggcccaggaaactgttattgggtgaatgaatgaatgaatgaatggcccaagcaaaagatgaggcctgaactgagaccagggcaggaggatggaagctagagctggaaagccagaaatcatggcacttaaaatgggccggctgtggcaactaattgcttggaggagtttgagatgcatgaaggcagtaccacaggcagggagagagaaatcgatgggtgaactgcacgttgaataggatggtgagagacaggcgtggagaggctggcatggggatggatgacttcactgcttggagcaaatgtgtatctgggtgaaagcataagtgggtttaaatgtcccagaattggtttccattaaatcatctcataattgagaacagaaggggggattacaaaagacagatgacccagtctacactagctacaagccacccagttttcctttctaggtgaattttctctggacagatctcaggttagggatggttgcaggggttggggg

SEQ ID NO: 17035 - DNA, 1260 bp, Artificial sequence
  DNA replication origin
tgggagtgttctgctcccatcatcagccctacccgcgttggacacaccttctcttggcagaacatggttaagtagcacaatcctagggcccctttgggacttgaaaatgtgctctccaggattgggagattttgtgccatggggctgctcccaggctttccttccaggttcaggcaggtactcagcagtgctaggttctgctgaggcgccaggatccagaatggggcagtgaggcaggtgagagcagggggatcaaggggcagaaggaagtgaggaaggaggtgaaaggactcctggatctctgctgagaaggtgaggtggggggctgcacagatcatgctccaaggccaggaggcagagggcccagagtgagcaactgacagtgaacagggaaggctctgggggaaggtgctgtccactggccacacccatgaaagcacatatccctgtctggtgggggtgtctgcagagtgggatggtagccacagaggtgggcgctgtggactgagggcaaggatgggggtggggttattggtaagtgttcttcctcccttcccccaagagtgagtctgggtggggccatgtctgcctttcccccacagggcagggtccctatgattggagctctgcccactgactccatctgccattcctatgactctgtgcatgttgtctttcattgtgtgccctttatttacatgacatgttgtgcgtgtggtatatatttgcgattgtaccatgtatttctgtgcactgtgtctctacgcaatttgttgtttggggctatttcggccatgtaggtttcctcttttgtgaattgccttttgatatccttaacccgtattttaaaaattgcattgttagcccactgaattccctccacctggcacacccactaacctatttccacaacctatctgaatgccactttttcaggaaaacttgtgtctcttgcccgtctgtgttgtgactttatgtgttatgtccgtctaccttacatgcatgttctgttgtgtgtctctgttgtgtacagtgtgttcccccttgtgtatctatgcctatggctggtgtgtacagtacttctctttgtggtgtgtttgtgtcctgtacatgctgtggtgtgttctgacctgtgtcggaacaacatgcgttgtgcactgtgtgttgtgtatctacattatacttgtgctgtgtctctgtgccgaacgcctgtgctgttagtgcaaggtgttgtgtggcctgtttgggcgtcctgggtct

SEQ ID NO: 17036 - DNA, 1523 bp, Artificial sequence
  DNA replication origin
actccaccggaagctccgggcctggccgccggtaggcggtggcggaggcggcgccgaggttggctgccctacacccctgccccgggaccgcagggcggctccccggcccccttcctcgccccgaactccccgctccagctcccgcttgctgaggcggggactcctcgggtgcagccggggacctggcacctcggctgcagagaccgccccggactcaactgcccccagcccagccgcgggcgccccggccccgcaggggctcattcctctttccgcgggcaccggcgctgcctggctcccagcgctgccctcgcaactggatatgtggaggtggcgacgcgacactcccccgccctcgggcgggctcaccgacctggctgggggctcagcctgcagagccgggcggcgggggctgtgctggcgccggcaggcgcgaggaatcacagagcggggcgcccagcctcatcatggggcggcccacggagacttcccgtgggagtggggtctggtgcaggggcgccccaaaggacgagtgggagatggggacacgcggcgcagagagactcctcgtggatggagccgatggaggcccagtgtagaagagaaaggggtcaaggagacggataaggagccaccagagacgcggggggaattccccgcagaggatgcgggaagccggggaaaggaagggattccggaaggaagggctgagagccgggtcaggtgctggcaggagggctggttggatagaaactggggcgggcccagggcatttggcgtccccgacatgcgtatacacttggagagatgattccctggagatccaagtgcctgtatagacaatcttttctagaagttctaccgttaggtgaggcgagagtagatgtagaaattggagacgagaataaagagtgttttaaaagcgtgcgtggttacaggactggctctgggttcaggggtccccactcactagctgtgagaccttgaacaagtcgcttagcctctctgtgcctcagttttctcatctgtaaggtggggatgatgatggcaatacctgcttcacagagtgaaaattagatgagatgatgtctgtaaaattacgtaagacggtacccaaaagtagtactatttttcccttttcttattagagcaggttgcgcacgttttgatgtccgtgggaatgagcaggtagagagggtggtattgaggccggaggggagagaagggacccacagatggggagagaagtcttgggtgcctgttttatcccaaaccaggggaaggagggaacaggtagggctggctgcaggaaagcttgcaggtatggggtacacagttaaaagggagtgtcttctgatagtcttgatgcaggcctggaggtcgtttgttatgggggtggaggtcctgatgtacattgtggcggtaagatgccgtgctgtctttgccaccagcctgtggcagccctggtgttacaccagggcaggtgggcagtttaatgtatctcaggccagatgacctgccct

SEQ ID NO: 17037 - DNA, 1199 bp, Artificial sequence
  DNA replication origin
acctccctactccttgcctaaactcttcttttgggcgtagaaagaagtattgcttctgggtaacctttgtctaataatgaaatatctaagacatattgagaacttactatgggtccctcactgttctaagttctttcacagagattcacttttataattatcaggaaaactggactttttttttttttttttttttttgagatggagtctcgctctgtcgtccaggctggagtgcagtggcgcgatctcggctcactgcaacctccgcctcccgggttcaagcgatcctcctgcagcctctcaagcagctgggatgacaagcgtgcgccaccacgcccgggtaatttttgtatttttagtagagacggcgtttcaccttgttggccaggctgatcttgaattcctgacctcaagtgatcctcccaccttggtctcccaaagtgctgggattacaggcatgagccacagcgcccggccaggattcacttttataattatcaggaaaactgtaggaagtgttaataggtaaaaggacctcatttcatagataaggaaactgagacacagagagagagggagtttctaaaagtgttatacaggtggcctataaactctgtagtgaagaaaggaaatgaagacaggatagaatgatcgcgagaaaatggtaagaacaagggactggaagacgcaaggaagtttagaaatacgctggcataggggtcttttgagcaggcacgctgctaagatgataggattatagtcaaggatggggagcgattgcactggggatttctggagcgggtgcagcctctgatggtaacatggtccagggtataccttcaaaacgggaggctactggagtgaaaggcgtcaatggtgataacactttaaaaaaaacttcagtgtttccctagcatccagcccagtatctgctaaattctttaaaatatctgttgaatgcatgtcgtgaacgccgtgctcatgggcaagccccagatgaagcctgtgcaagtgcttcttgctttaactcccttgtagcaatcagaggaacatcctctgcctaggattcccaagctccctgaacctcacgcgacagctggagcccaggctgcgtccgctttgaggttcatccgagcctgggcagttcggtccctggagggaattcgctttagatacgactgtcagagagaagtgtgctg

SEQ ID NO: 17038 - DNA, 907 bp, Artificial sequence
  DNA replication origin
accgcatcccgtcggccccgcgcggccggaagcctcgcgcccaagactccccggcatcctagcgcgctggctgcaaaagaggcgggaaacgcctccgcgtcccttccaacagtaccggagagggagaggggcgtggctgagactagccccgaccacgcgcgcgcggcccctcggcaaccggcacaacacaacaaaatggctgccgcgccgctgggcccctgaggaaagagcccgaacttctcccgctctacctcagcctgcgggactgctcggctcggcttctaggcggtgagcgtcagacctggccgagcccgttccccggcatccggcccgagcagtgggggccggcggcaaaggcgggaaggcccggaccgggcgtggtgtgggccggcttgggatggattcggggcgggggcgcgtgtctgggaattgggattggacgggaaagaggggagggcccggaacgggcgtggggcggtggatgaaggagggaggtttggatgggaagaggtggggacggcgggggcgattggggatgaagaaccagagtgtggggaggtgtggaagttagggtgcggcgcccagaaggttgtgggtcctgccacctgagctgaggggagagctgggatgtgccagctgtctgtggggagtgagcgggagaaaggacagtttgggcgtcctgacgggttgtcacggtatcggacggagtacagtgcgtggagaaagatgacaggatatggggacgaaatgctaaaagaaggggaagaacaaacacttccgttatattcgttaagggactagagaattttgaagccagacaaacttgggttgaagcctcaattctgccaccttgtgtaacttaaccaggtctgtgaccctggatatgtgtctgagccttcctgatcat

SEQ ID NO: 17039 - DNA, 1550 bp, Artificial sequence
  DNA replication origin
tgggtgttcactatttgtcagatccagttttaagcactttgcacgtattaacctcatttagaatttaaaataacttgtatgaggttatcatccccatttaaaaagtgatagcactgaggaccagagaggttaagtaatttgcctaagatcacacagtaagtggaaaatcagaatttgaactcaggctgtttcgttccagaatccaagcttttaactgttcaggtacattgccatttgtaaatcaggttaataattctgatcctatacagctaaatctttgaggatttaaatttggtattgtctaagtgtttagtacagtccttcagtcaacaaatatttattgtttatagaacaacagacaaaacctctgctctcttgtagcttatagtctagaaggagaaacaggcaacaaccaagtagtttcacaaataatggttataaaatgctatgaaggagactgcttggtgcagagatcatgggtaatagggagataaaatcttctgcatcttgagcttagattctagcatggttcttcctacataaaagttgctcaataaaattgaataattaatggaaagagatgggaagcttgagttttagggtatctgagcagaagaagagagatgggagaggggattcaggcttttaataggatggagaaggatacgggggctagagtattaggatggaaaggcaaataggcaggcagttgggttgggatgaagaggaatggatggaggtttgagtattttgtttagggaggggagtaattggaggtcagagtattggaacgcattaggatgtcagggtattttctggggtgaagagagatgagcagcttgggaagtctggatggatagagaaatgttgagtctgggcacaggaaagaaccatagagaaatgggggagactattactgtgttagggaactgggatagaatttgtgggaaaattggcaatcagaatgggataaagaagaatgggaggcagaggtgggtgggcagcacagaatgggggaattggctttggaaagaaaaatggctggagactttgcagaggaatcggaatcaggatatttgaaaggaggagaagattaaggagtaaaagtatttcagtaggtcagagggtatgggatgaagtagacttggaaagtactgaaatccaattaaagggctaaggagagggatatgggggttaataaatggggatgggtatttgcatattagggagtctgtagagagacagaaggaggtctgcgttatttggagatcagagaagatgggaagttaggaaggttaggaaaggctggatggaggtggagtttgcagtctgtactaagctgtgatggactgaattgttagatcagagcaactatctgggtttataggtggcaggatgggtagtgttttgttgcctggacgtaggattctgattatcatgtcattccaatggctttctcttgctctgcagacagcctttaaaatacaactgcagctctgaactttatttgctttttttttctctttatcctgctcctttactcgccctag

SEQ ID NO: 17040 - DNA, 1002 bp, Artificial sequence
  DNA replication origin
tatcagccggccggacactacggaaggcccgggttacctggggggttgctggtggctgggcagctttccgggcgggaggggggcgtcaggaccaggaacaggagtgcggacgcagcgggagagggggcgggggcggtcgaccgaggcgccggcaggtacactggcaggccgagaggtgcagacgcgccggcagcagtagcggcagtagcagtggcagcggtgactgctcctgtgctccctcagtatcttcctcgggctggtccaagatggcggcgctccctgcacagggtttcctgtcaccctcgcaatgggccggaccacaaaagaagggggagaagatgcgcgcgcagctggcggagcccggaagagggtggctgaggccagcccgctagccacgccccttcctcagccctcacctctggacttgtcgcgccgccgctgaggcccgccccacgggcgctcgcgcccggagggaaggtggaaagcgcgtatgcgcaagcgcagtcgcgtgtcctcgcctcttgggggagctactgcgcaggtctgcgtggaacctggtggggtgcgcctgcgtcttggagaactagggttgtcgctcgtggagacttttgaacaatttttaaagccaacatttaccacttattggacgcttaccgtatactggccaccatgctaagcatgcatttactgcattcattcaacgtgtatttatgggggcatttactgtatataccgctgtatgcttcgtatataccggtcctgtccaacaaacgtcggaggcacgcatccccattgtatccatggagaaactgaggctcaggttggtcaactctcttgtccaagatcacgcagctaggaagtgaccctgcatttcatctctattttgacttcactttggggttgcctttgacagggtgagagaaatgtgatatttttcacaatttgtctaccacctgccatcttccaacttgctctgccataatcactgccccagaaggtttc

SEQ ID NO: 17041 - DNA, 1223 bp, Artificial sequence
  DNA replication origin
ctctcctctcctgctccggcgtctccccatcccccaactcccatccacactctttggtcccttggaagacgggaaaagtgagcgaggaagcccttttccagcgatgcccccgcggccgggccgagctccaggcgcgggcgagataggaccgggaaggaagggagaggaaggactcaaatcagcccgggacccccagatgcccggggccggggccgcgcgcctcccctacctgctgctgcggcactggagacagcggctgctgggtccagctgcgctcagctggttccgggcggcggggcgggggcgttgtggtgcgcgcggccggggtgggcagggcgcgggcgggagccgccctcggggcggggcggccgggcaggcgggtgggggaggagcgccaggccctcccgtcggctgctgggcgggtggctccaagctcgccttcgtccagggggacccctcgcttcacctcgcaggaaggcaccaaaccaagccctctgctttcccctggaggaaactgaggcccggagcacggaggggagatctgaagaggcctagggtcggggaggagacccagggcagctcctgagctgggctggggccaaagagctcagatgggacgggcaagcgagcaatgctcaactagcaccagcggaggcagatttcagccctggagagaacggacttcaggaggcaaagccctcgaagagtgacataggctgcatgcaaagcaggggagattccctcccacggaagggaataaggaggaagagcgattcccagctcattccgaatgaagtaacgaaaatgccaagtgcatccctggtccttaaagtggaccattaagcaggcgcctcggagtcagaaggcctggtttggaaccccagacatcgactagtcctgtaactttgggcaagcgagctcacatgtctaagtctccgtttcctcgtttgtcaaatgggcatcctgaattgccgcttcatggggcggttgagaagactcagtgagaaaaagactctcagcacaatgacagggaccgtggcttctgcataaacggaagggatgttcttattagtgtcatggcagatactgttttaggagattgaggaaatccacattgggtagaaagatgagtgcaaggtcaattttaagcaaatgtaatactttgttgatttcaacaacatctcatatgcatttgagacgatagccgtttataatgcagcaag

SEQ ID NO: 17042 - DNA, 836 bp, Artificial sequence
  DNA replication origin
gtttgaaaactcagctcctggggtgtgtctgaatctcagggagagtgtaatgcttttcttgcccatagatggcagcatctgcactctttgccggctctgtgaatgtgtgtgtgcacgtgcacgtatgtgttacacacgtgtgcacgcatgggagtcatagtttcttactttggtaaatcttgagctgcggtggtcccagccctaggccaggctctgggatacatgggagcaattggggaggctgacttgcaaatagactattacagtagagtgtgaccgggcagattagggggtgtggaggtctgtacggagactacacggaggactcaggaacagagtgccattgcatctggctggagcctggtggggtatagtggaagacaggaagccatgagggccaaggctcaaggagttgaaggggacaggtcatgaagaatgtggagagatttgttaaggatcttggactttatctggggccatagtggagccatggtaggtctgggcagaggagtggcatggtctgggcttgctctaaggaggatgcattgtaggagggagaggttgcaggaggatcagttaggaaggttctgcagtcatgcaggcaagaggtgatggggctatggacccagatgttggcattggggtggggagaaggggggacactctggatgcagtcaggggttgaactagcaagacatggtgatacactggaggggagagtgacagagcaaaaggggtgagtggtgtgttgaggagggtgagggcctggtgtctggactggtccaccgggtggatggtggatggtggatggtagtgctgtttgccgagatgaggtg

SEQ ID NO: 17043 - DNA, 1542 bp, Artificial sequence
  DNA replication origin
gatatactatagccattgttgtgcaattgctttctgcacttggagatctccctgtgtttattgagtgcctactatatgccaggcacaatcagacgtagctcattcttttttcacagctgcatagtgtctattgtaatggtggctccatcatttatttaaccaggacttttgggtcctttccagttttcttcaaacaatgcttcagtgaacatccttgcacatatatttttgtgtttgttggtaagtaattctgtagaaagtggaactgttgttgcgttgtgtgttttgagtttggataaattttttatctagagaggtgaaactggtttatgcttccattaagagcctatgggagctgtggggttttttataatatcatcctccaaatggctagggggaagggagagctctctgaatttaggccagagctggcccactgcaggctgggcaggcccaggcctggacttggagcccggagaactcaggtatccctctggggccccccacagacaccgagacaaagttcagactcttcagtgtggcacacaggcctcggtgacccctgctgccctctgcagcctcctctgctcttgctccctgtgtttcatactggacccctggtaattcactggatatggttatgtttgcctgccctttgcctatgcgtcccctccccctggaatgtcttttcttcttaatctccgtcctccctgtccttcaaggcctgggtcacaagtccctttctccacgaagccttcttataatctctccagcctgaattgtcttctctgtgttcctttagtcttttatctgaaccatatccccccttaggtgggagcaagttgtgggtgggagagggcaaacttcagcctcattagatagaggctggacttccggaagagctgggaagggggaccatagtttctggggaggggtggagaactcacatttacctagctgctggccaggctattttcatacccacagaccgatttaattctcaactactgtactcatttagtagatgagaagaatgagacattgaaaacatgcacagtggaggtgggaatgaaagccagctctccaactctccagtcctctttcctgtcactgcatcaggctgcagggtgaaggggaggtctgggatacaaagagaacttagaggtggagcagttggattctgtgcagtgctaggagggaggagaggggttggagtaggtgggaagtaggcctccttcagtttggatagcacttcccttaacccaatgactctagtgggagggtggagggatggggatgggaagggagcctgggagtgaggaggaaaggcaaactctgtcttcccccaggggagtcaatgaatagtacctaaaatggaaaccaaacaaaacaacttcaggaagtaacaagggcttgcttagagacatgacggtaaaccctgaaccatcagctaaaagaggtagatagcagtggttgcccctggggagaggtaaatgtgatggagagggaacaactgtgtacaaacatgtgactttacgtttt

SEQ ID NO: 17044 - DNA, 1150 bp, Artificial sequence
  DNA replication origin
actctgccagggacctccagctaggaaacagtgtagcaggggttgccccaggctccaagatcacaagctctgggatgatgggtagacccctcagatggcaatagtaaatctaagggtccccagggcctcagcttgcttccttccagcatcttcaatggctcttgaaaccaaagggccctctgagagctcattatccaaccccaatctgcagacagagaaactgaggctcaaagaggggaggggactgaccgaaggtcacacagcctgtttgcttttgctctttggaagtggaaagatttccagcacggggcctggcagacagcaggcgctagctctgtgcacgctaagtgggtgcactcgcaaatcgaggtgagcccacctgagcctcctgtgatccacaggagccccctctcctctctgtacccatccccatcatacccccaagaagggtccaaatggctgagtccaagtggcctcctgcgctgtctgcctcctccctcctgccccacaacacaccacccccaaatttcatttcttggaagaggagaagaggatgcaccagggtctgcaggaggctgttggagatgaagtggttaaaaatggggaggctattacacatgcactggggctggggccggggagggtgcaggagggttaggctggagtcgaggacaaaaatcagcaggtgcaggtcacctctggccggagaagagatctggtgggagtaaaaatcagaggagagaagtcagagaaacaaggtggggagaactcaggcagaagggtggaaaaacacgaaaccagacagggcagggaagacagcagaaaggagagaagaaatgataataatgaccataagcagacaggcgaggtcatacaagaaagaaggaaatattggagaaggagagagatcaaatgagaacaaggaatcgtaaatggaagaagacatcagaagagagaaggagagaagtgaggcagaggggagaaaaaatcagagaaggaaaaggagaattcaggagacaggaggtaagatgttagaggaggacaggggaaaagaaatccggccaaggtgaggttagcttcctgggaaggaacagccagggccccgaggctcccaccctcgtctgcgagccagagccccggaagcagcaag

SEQ ID NO: 17045 - DNA, 945 bp, Artificial sequence
  DNA replication origin
aacctgcaacgttattagtagacaaaaagtgaggaataaagatttctgtaattcctttgatgctcctgggaaggaactgaacacagggatccctggacaagggaaatggaacttatagctaagatgctgtggataaagctggctttacaaataatcagaatagatgactccaatgtcatgttctttgaggggtcctggaaaggaccacccagccctctaaattgctttcactgccatcctgcctgaaattccatctttagaaacactgtaattcctctggatcactaagagctcctgagtgggtaccaggactcctgagaggtccaccatctctctttattggaaccccctccccagagtaccagttcctccacaggggaacgagactgagccacttacagctcctgccttgaagactgggaagggagggtgggggtgagggtgggagaactcagggttcctggcgaggaacaaaagccgggaaggagagttctccaaaacgcagaggaaagcggagggggaaaaatggggcagaaagtggagctagaaagagaggtaagaagaaagccagagagacttcttccttctgcaaatcggtctaagtttcgggaggtgggattgggggaggagggggttcaccctggggccaggccagggctgggtggaggaggcggccttcgagagagtgagtcgggaaagaaggggagtgggcaaagggtgagatgtggggtcccggtccccgcctcgctggctgccagttccctctgcgtttcctagtccgcgtgcgtgacacgagatagtgcagccctggcatggggcttggcatctggcggccgcgagataaccagggcccgtgcgatgggaaacgtgccgttggcagcccgccacccctccatcgtgacctcagtctgccaaacagggttcgtgatgctcagtttactaggg

SEQ ID NO: 17046 - DNA, 1809 bp, Artificial sequence
  DNA replication origin
ccaacgcccggggttcctgctctatcacctacaccaccaccaccacgtgcaggcccgagaaggcaaaagaggcccagccactctcaccggggattttatccgcctccccggcacacacacactctcactcacgcactcgctcgccggccttccagctgtctgtgtccggggcggggaccggcttggcgcagcccgctgtcagcgctcgccggctcctcgcgcccctacccgctgcgctctgcccagagcagaagcccggccggccggcccacgggcgggaggacgcgcctccgctcgggcggaggcggcgcggtggctgatcagagcgcgtagggcttcgccggggccgggagctgggcgcggtcctgctcagcccagctcaccgcgcgccggccctcggcgccctggttctgcggatcaggtgggtcccgcggggagccgcccaggtccccggaggccacgagcaggacacggacggggggctccgcgcttgggagagggtggtgagggagtggaggcgggccgctgctccggcgctgcccggtgtctgccctgcctgtgtccctgcttttgttcttgtcgctacctcggtgccaaatcggacccagtttctgtccctctgtccccatcctgtggccgtccctccctctgtccagccttccaagactggagcctgaagagctgcaagctgaggttcccccacgggtccgcggggttggggtgggggaagagaggggagacgcaggggacacaggatgcgaccaagtaagtcgcagtgagtgaggggtctgtccttgcctgtggggcaggacagaggaatggctcttgcccaggacaagataggaagggcgcgcctctgggaaggggaatctgggagtggggggataaagtgagggtcgcaggaaccccaaggaggaagggaatagagagggagatgtcagagagcttcggagagccgaggactcagtcagacgcccagcatggggaaagtttccgacactaactttggcatccggggtgcctgcagcactggggcgatgggaggcgggagtttcctccaactcttcaaaccttgctcctactcgaaaaggacaccaccccgcgtttggaaatggcaggaaaacggctaaacacaatgattgcacaaactcttgaagaaagtaaaaaaaaaaaaaacagtaaaaagaagaagaaaaaaatgtcagcgcgcaaagagccagagaagcagagggatttgagattcctcgatcttcccgctgtggcggccgggagggactgggaggcgcggagggtgtgagagccgctcctccggcaggaaggaaccgagacccgaggcaggtgttttgaggctttgctcttcctttgcactccttcgggctcctgagcaggccgggctgcctccttcctttacctggaaacaggcgtgtctgaggaagcaggagatgtagggtgcagccctggcctgccgcttgctgccagtaaggaaccaccttcccagacagagcctcagtttccccgattgtgaaataaggatactactggagaccttccttccagtctctgagtaaggaaatgcaagtgcatggcgaaggagggctctgggagtggggggtgtggaggacagggttattctgctgcatttctgtgcttctttgactacatcaggcactttctacctctttcggagttacatctgggtgaattttgcctcctctaccagatgggggcagcatgtggatctaagttatctcatttacatgtaacaggtgctcaatgactgaataaggcagagctgaacgagtccctagg

SEQ ID NO: 17047 - DNA, 1447 bp, Artificial sequence
  DNA replication origin
cagtcttggaaggctggacagagggagggacggccacaggatggggacagagggacagaaactgggtccgatttggcaccgaggtagcgacaagaacaaaagcagggacacaggcagggcagacaccgggcagcgccggagcagcggcccgcctccactccctcaccaccctctcccaagcgcggagccccccgtccgtgtcctgctcgtggcctccggggacctgggcggctccccgcgggacccacctgatccgcagaaccagggcgccgagggccggcgcgcggtgagctgggctgagcaggaccgcgcccagctcccggccccggcgaagccctacgcgctctgatcagccaccgcgccgcctccgcccgagcggaggcgcgtcctcccgcccgtgggccggccggccgggcttctgctctgggcagagcgcagcgggtaggggcgcgaggagccggcgagcgctgacagcgggctgcgccaagccggtccccgccccggacacagacagctggaaggccggcgagcgagtgcgtgagtgagagtgtgtgtgtgccggggaggcggataaaatccccggtgagagtggctgggcctcttttgccttctcgggcctgcacgtggtggtggtggtgtaggtgatagagcaggaaccccgggcgttggaggatggggtggggtctgtgctgtgctgctgggaggggctgcgctgcgctggcgcacggccaaactctgggaaactcagagccttggagatctgatccaccgtttgtttcccgaggaaggaagagcgcgaatgtagacagcggcaggccggggctggagtcgctcttgcgagagtcctgagctctggaagtgagggctgggcgttgggcacctggttcagggtctgcccgcgtttgcgcactgacttcatgatctgtgagcccagagtgtctcaaacggggctctaaggcagcccctaggctgtggaataactctttagtagaattatgtagaaaggaatccaaacattcgatttcagagtgtgcgcttctgtgcccagtgtggcagcaattcactcagagagttgctgtggccacaactggctgccctcagttctcttgtcttatactgatagcgacaaggtcttctcactcccgctcatatcaatctactttacaggtggaaaagtcagaacttcattttgccatttgccgttgaacgtcattttcatagactaagaaattcgcttcttaaataattcggccgggcgcggtggctcacgcctgtaatcccagcactttgggaggccgaggtgggcggattgcttgagctcaggatttccagaccagcttgggcaacgtggcgaaaccccgtctctacagaatatagaaaaattccccaggcctggtggcgtgcacctgtaatcccagctactcgggaggctggagactgagaaaga

SEQ ID NO: 17048 - DNA, 1408 bp, Artificial sequence
  DNA replication origin
cttattgacccatttcccagataggcacactgaggccagagcggggcgaacgcttttcggaccgtggtggcgggacagcgacgttttccagctaaaggtgggtttgctgagagctcctgcctccttttcccagccctacgcggatgcctgtgttcgtcctcaccttgccgccagtcgcggatctggggccaaggaggagaaacaggccccgggcaagtgcccgcgtagggcgagggcgcgcctggaggcgcacggccttacctccgcagcagagcgtgtcctcgcagagcgcgcaggctggaggccccagcaggggcagggaggcccaggcgagggcgcggaaggaggcaccgccagctcccatctcggacggcctcggcagtgcctcggccagcgggcctgccaccctccgcggcacctgtggggccagcgcggtgcccgcggcctccgcctccgtggtcggtcccgggccaggcccggggtgaggggtgtgcagggctcccggctccttgagccgtcccggctcagaatccaacggcggctcgcaggtcgagctgggcagggcgctatttttagcgagagctgctctcccagtcgtacagacagaaccagttaattcggccgctggggacgggcctgcacggtgaactccccgaacggcagccggagctctgctgaaagctgatccttcgcattcctgcctctcgaggcgggagggcgggaggacgcctgtaattccagggggaagccagcgtcctctctgaagacagcgcctgggcccaactgcacgccaaaaatggggctctttaaattggctctgaaacctggcgcgacttgatgctgatgccaagccgcagacgatgtcccataaaatgtccatctactgtctcacccttcccaccggtctccagcactgggaagagcctcccagaaatggggtctcagccccagcacccaccagaagctggcacggtcatcactcaggagctacttgttgaatgaaggcaggaaggagtgaaatccgataccagggtcagtggaagtcttcggagcatatgcgatggatgcacagggtggctttgaaatcttatagaacccctaatccaacactttctggctgtgcgaccttggcaaatcatcttacctctgttttatcttctcagttttaccttctgcctcagttttatcttctgcaaaaagggagttttagaactccaagagatagtatgcaagaaatccttttgtaaacaaaagcattatgtagatgttcatgtaaaacgtgatgagagagctgcaaaggtgaacacaagtttctactctcaggaagtcactagcactcctctaattcgagagaggaggtgctaaggaccccaaaatgtacaatcacagcatctggtattagcccaag

SEQ ID NO: 17049 - DNA, 1139 bp, Artificial sequence
  DNA replication origin
cccccctccacctgagccgcggcccccagcttttacctctacgcgcgggccgggccgctgggcgctgccatcccaaaggctccggagcctgagcggcccagggccagggttgcgaagcggcggagtcgcggtgtcgccgggcggctgcaggaaagtttccttcgcgccagctgggccgagtggagcggggcgggcggagtaggcggctggccaggcaggagcgcgctacggccggctccgcgcctcccccggcgccgccgctctacggctcccgggctcccgcggccacccggcctgcccagccctgccaatcgcaggcccagccgcccacagctccgcccgccaggcccgggacccagcgcgggcggggagcagaggggcgggggcgcacctgtttggtcaatcgacctccccaccaccgccccgcccaggccggactgggcagagccgaggccctccgctccgagcacacgctccccagcctggtgccggcccgagatgccggcgggaccacacgccccctcccctcccggagtccccaggcctccaggagtccagagataacctctgcttccgtttcggcgctatgagggtacgggaccgaggagtgggccgcgactttgctttacttatccctcttccaccctacagctccccttcccgctagaatcttcccgcatccgctgaccccttaaacttttatgtgcgccctgcgtggatctccaacctcaggagccggggactaatggggggaactagagcttgggaaggggacagtgcggggtgtcacagggaaggcaccccagcactcccaccaacagaaactcccgaggactccagctggctggagggaacgtcccgcgaacgtctgcgacccgcttcagcaagcgtgactgaatattaaagcgtgactatcttattgacccatttcccagataggcacactgaggccagagcggggcgaacgcttttcggaccgtggtggcgggacagcgacgttttccagctaaaggtgggtttgctgagagctcctgcctccttttcccagccctacgcggatgcctgtgttcgtcctcaccttgccgccagtcgcggatctggggccaaggaggagaaacaggccccgggcaagtgcccgc

SEQ ID NO: 17050 - DNA, 1436 bp, Artificial sequence
  DNA replication origin
gggaggggagggggcgtgtggtcccgccggcatctcgggccggcaccaggctggggagcgtgtgctcggagcggagggcctcggctctgcccagtccggcctgggcggggcggtggtggggaggtcgattgaccaaacaggtgcgcccccgcccctctgctccccgcccgcgctgggtcccgggcctggcgggcggagctgtgggcggctgggcctgcgattggcagggctgggcaggccgggtggccgcgggagcccgggagccgtagagcggcggcgccgggggaggcgcggagccggccgtagcgcgctcctgcctggccagccgcctactccgcccgccccgctccactcggcccagctggcgcgaaggaaactttcctgcagccgcccggcgacaccgcgactccgccgcttcgcaaccctggccctgggccgctcaggctccggagcctttgggatggcagcgcccagcggcccggcccgcgcgtagaggtaaaagctgggggccgcggctcaggtggaggggggctcggtggtttgccgggatccgagcggcatcccgggttcgagaggatccgggggctccgatgcgaggtgttggggtaggggactgaggaatgggcggcgactttgctttatttaccccgcttttcccctacagtcccctctcccgcaaggaaatctgcgcgatgcattgagcctttaaactttcctgtgcgccctgcccagatctcgaccgccgggacccagggctggcgctgggttcttgggagagtacaatacaggggatcgcgaggaaggcgcccccagctggggcccgcgggcggcgggagttgggggtggggggtgccagcctaccgatccccaaggcttccagcggtctcccaaacttcagaccttcctcagctcaccctgggaattggtgatagggcagccaaccaaacctctttatccagagccaggcaccccctggggcacccaagttttgggtgtttttgttcaatcctggccaatcctaaattatcagggaggcgattggcagggctgggtcgttgaagtgaggtctcttttccgtttcctgggctgctctggaccccaccttccgtgaaaacaccttgggctaagcagagtgggaacagggaccaacgccacctgcttccagtgctcagcctggtgggaatgactgcagggtgttctggtctcaggatggtccactcttgagctatctggtgtgagccatatggaaactcctctccctctggccccttctgctattaaggagggaaattttaccttaattttgattgtgagtgggtgagtaggtagcttgtcaccaataaggaccaatctttaacattagtcctccttaatgttaactcctttccgtgttttactgacccaggacagaatacctaagagtaaaaaaatggaac

SEQ ID NO: 17051 - DNA, 1304 bp, Artificial sequence
  DNA replication origin
tgtttgtttgttttagctcatcagctatggttagtgtgagtatattttatgtgtggcctgacaattcttcttcttccagtgtggcccagggaagccaaaagattgggcacccctggcctaacccaaaggaggctaagggtgtcctcttgggcaccctggttttccatcttcctgtgggattggccagtattcagggaagaggggaccagggcagctgatagctctggactcctcagactgagtttgctggagtaacacccctcctgcccctcccccctggtcagggaaggcgcctggcttccagctgtgagacaggctccgcaggactagggaccctccccgctggctgagagcgctagggagggggcttcccctgtgaggtgcaaaacccggcctggatttctgcccagacggccccgcccactccagggccccaccttccccactgttctggaggaagatcccctagccggcctcaggcacttgcggtgactcacaccccccacccctaagtctgaatgttgagagccccaggctaagaccacttgcctctgccactttccatgtgactgaggcaagacctccttgccaaggcctcagtttccccctctgtacttcaaaggaggcagctcaggcaggtgtcttaataatttaaacgacgaatattgctaaagagataaggggcggggagagagagagatcactgtgggccatggttagggaagggtggaggagctgggtcctgaaagggtggactttggtcgggtggagaaaatagccaagaaggcagtccctgctggcagcacagcaaagagaagtgagaattagggggagcagaggtgaggctggaggggactttggttggggcaagattatttggggtccaaataacaaggatgtttagacgtattgccattgtgctctggggagccacggaaagctcttgagctgaggagtgacttggagaaagtttttcagccaatgcaatagagggagttggtacctttccttctgccaccctgagtttctggtgcctacggtagggtagggattgttctgccctgccttcagtgctttgagtgcttgaaacagacaccgtaattttaattacataaaaatgatacgtgtatcagacgggacaacctttaaaacgtaaagaagaggcaagtatcctgcatcacaggggagtctttcaacctggctgggccagggcctgcggagcagtgagggtcgtttctcagcccagcgagcctggggcaggaacggaccctaattgaaggtgaccgtccccaagcatgcgtcct

SEQ ID NO: 17052 - DNA, 1107 bp, Artificial sequence
  DNA replication origin
caggtcgacggtcgaaccctcgggggcgggggtgggagccagaaccctcgggacgacccgtctggggtcccggggaaactccgggccgcctcgccccgccgattccaggccgggatttctcccgcactgactttccgggccggtgccagcccggcctccgggtccccagcccccgccgcggggccggctgctcggggagcgggagggggcaggaggcggaggaggagtttgagcgactttgtggggcagccagggcctcggcggccgctcgggcgagcgcgggagaacgcgtgggcgcccgccgggctgtccggagcggccgatggggcccgtgtgagcgcgcccaggcccggcccggtgcccggcgggcggcagcatgtccgcgggcggcagcgccaggaagagcaccgggaggtcctcctactactaccggctgctgaggcggccccggctgcagcgacagaggagccgctcccgcagccggacccggcctgccaggggtaggcgccaccccgacccctgacccctagaccctcctaaggccactaagccacctgatgccctgggatgctagggaccgggatcctccttccagccatttgccgggggtttcctcatccgccccttcctgagtctgccggaccccccattcccccagcttctgcttagtcctcctctcgccgggggaagccgaggctctagggtctcctcttaagccagggacagggagaggggagcctggaatctttctccgcatctcagatcagacctcctaccccactgtgcctcagtttactcagcagccgggcaataaagtaacccagggtggatctgagctttcccacaccttgccttcccagcccaggccgcggacttctttcttccctttccaggaacttaacgggctccccacctcttgggtgctaggacaagtgggtggacctcagggaaggaaccgtgacccctcgagcgggtgggcgccagctcctttgcaaagtttctctccatcaagctcaggaggcaggacgagacggagggggaggtgcgagcagcattttctttttccagtaacaggatcctcggctggaaatgcgtgtgatcccgggg

SEQ ID NO: 17053 - DNA, 985 bp, Artificial sequence
  DNA replication origin
gggggaagccgaggctctagggtctcctcttaagccagggacagggagaggggagcctggaatctttctccgcatctcagatcagacctcctaccccactgtgcctcagtttactcagcagccgggcaataaagtaacccagggtggatctgagctttcccacaccttgccttcccagcccaggccgcggacttctttcttccctttccaggaacttaacgggctccccacctcttgggtgctaggacaagtgggtggacctcagggaaggaaccgtgacccctcgagcgggtgggcgccagctcctttgcaaagtttctctccatcaagctcaggaggcaggacgagacggagggggaggtgcgagcagcattttctttttccagtaacaggatcctcggctggaaatgcgtgtgatcccgggggctgcgtttgggcgggtggtggccgggacttccttccctggctgagtaggagggagggaagcccctgggaggaggaggccttcaaaggggctctggggaggctggagtcctaggcagaggttcaggcccaccgagggtgcccgtggggtggaagggaggagaaagacggcgccttagcagggacctgggccgagttgacaccatcaggttatcttgaaagtgggaagccgggccctgtgccaacaaatgccatgcagggaatctggtagaccaagaggggccacattcccaccctgcaggctgccgttgtgtgacctgggctgagctgcctctgaacttcagttttcttgtcggtgtgagggtaaatgaagcaggcaggtagtgttcggttgcttccaccagaatggggaagacttttcccacagtcaggtctgagtagcactgtgcagtccagggcttcctcaggaagtagtgagttccctgtgcacagaagggttcaagctgaggctaagtgtgtgcacaggtgtgtgctggtagttcagtcctcaagggtctctcaa

SEQ ID NO: 17054 - DNA, 1170 bp, Artificial sequence
  DNA replication origin
ccgcgccgcccgcccgccgaccgagcgccgacggcccggcccgcgcagcgcggcccagcccaccccgcccgccacgtcgcccccgccccctaagccgctgttgccttggcgacgccgagccgagccgcgccgaccgcggccgaggctgcccgagccccccgggcgccggggcgagggggagtaccgggacgagggggcggggctgcggaggggcggagacccccggggaccgccagggccggccgccccgctcacctccctgccgcctccgagcttgtcctccccgtgcgaggtcacaccccccacacccacctggaggaatccacgcccccccaccccgtcggggattgacaaagcgccttcctccgctgcgaggtcgctgctctccagccctcggtggtaccgatgagagcgggcgcgtggtcggctgaggcgccggctggcctgcgcctggcagtgccctggccacttagaccccgattccgggcgactttccttcccagagcggcagtagcttgatgtcagggtggggcccctccccggaaccgttgtatgtaccccagcaaggacaaccaccttgcgggacgggatccctagtgctcagctcagggaggggcccgaggggctgaagggtttgctgagtatccccattaaaagcttcaagatttggggaaccttattcacgccatttatccacctaacaggttgcactgactgaaaacagagcttaatcccccacctcccccatcccaagagctcctggtctaatggcagagacagaggagacaggcgttcaatacacacaggtcaaaccaatcttccctttacaggtgacgggatagatgtgggggccccaggggacacagcctgtgtcctgccgggcttggaaactacaggcagcttgagggagaggaaaactggaggagggggagtcctctaaagaggggggtgttctgggggctcacccaccccagtctcaattccaggtggcaagtgggatattaatttaatttgaggttaatgtacataatccaaataccacattccatccatcacaaaataaagggtcagtttggcagccctctctgtgttcaagaggagcagtggatgtttggcacaggccctgggctgtatctgtccatcttcaacatgacaaggtcaaacatgggc

SEQ ID NO: 17055 - DNA, 1530 bp, Artificial sequence
  DNA replication origin
cgggtcccgcgcgggtcccggcccgccgccgccgcgctaaccccgcctccccttccccctcttgtccccccgtgcgcagggcttcctcagccgccgcctcaagggctccatcaagcgcaccaagagccagcccaagctggaccgcaaccacagcttccgccacatcctgccggggttccggagcgccgccgccgccgccgcggacaatgagaggtgagcccgccgccgccgcccggtcccccgcgccgccgccccgggctgcgcccctgaggacgcggggacaaagcgcgagcccggcccggggcgagccacacggcggtggggggaccccacgccgcccgccgggaacttatggggccacctcggccggactagggggcccgaggggaggaccctgtgcctccctccggggttaggtgagtagaagagaggagagcagagggtgcccgcggcggcccgggcgaggccgggcgcgaagtcccctcgcagggaagtcctgcctcgcctgtccgaggtgggcattgtttcccgggccgtgcggtgcccgaaccggggacggaagtggggcctctgccgccaggacccatccccctgccttgggagcccctgggtatcagatacaaaaggcattttcggccgggtttggccgagaccgggcgctgcccgtggtgaggggaagggtgaacatctggaggggaggagcagggggctgggccacttagggggcacatctgctctaagtagggcgcgtgctccactgggggctggcgctagcagagcgggcagtgcccaggccctgagctgggggcacagcctgaggctggggagccagggccatctcctctccagcctaggcagctgcttctctccttccctcacctctccactctcaggggtgtctcctgctttctgtttccttctcctgggccagccgggagcaggtgtggaaattccgcggggaggtggctggtggggcagaaggggagagggaggaggaggtggttcaacctgccgggagacgctggccagggagcaggcttcagctcgcaagggcaagccatcctgtcctccagggggcactgggcggacacagcctctcagggcccaggtcctcctcgagtggtgccagccacaggcacctttccacttaggcacaggcatggtgatggattccagtgccagttagaacatgtccctgcccagcctgtggaggtgaaagtacgggcaggcaccgaggagccttttcagcattcagcccgaacgtctcagaccactggcatctgccttcgtagggctgtgtccgtgttggcactccctgtaggggaggcgtaggtagcatgaaaatgtctctcccctcccccttggttctagcgggcagaggagtacaagttacagcccaactcctgcccaaggttgagtgactgtttaactgacccctagcatcttcctggagagtaacacttccacctcccagtagaatggctagacgtttaatttccatcgtcccagagccgcgctctccagtgcatc

SEQ ID NO: 17056 - DNA, 1139 bp, Artificial sequence
  DNA replication origin
ccccgttttgtgtgcatgtggtggttgtccggggagcaggagagacaacaggcagtccggcttctgagtgtgtctgctctcccgggagcaggcggcatgcatgtcatgtttacctccttacagcgggaagcctgtacctagaagccggcaagtgctggctggccaccctagccagaggtcggggcatggccaagacgacctcgtgcgggtcctgccccacttggcctcaggtcagccttgccacatgctgaaggggcgcagagtgggggttgggagtgaaactacaagcctgtttctggaaacagtaggaaacggtagcggttggagcagaatgtcactggcagcggtgtggaattgtcttattaattttctataaacaaaatatggcttggtggcctctctggcacaggaagggagcctagatttcccatggacaggcagaaagactgggtttgaaatctctctacccagccttggagctgaaataggctttcccaggactggggtctcctgatttgctgctttgcttaggaacagattcgtcggctgctgctgggatggatgggcagaaatttctctggggctgtccctggagtcatcctatttggagttcagtgagtaaaaacaactatggtgaccccgcccgccccccagctcatggccaaacctggatgagtggagcagtgcctctccctgctctgatgtggtgtggttgtgatgttgaaggctgggagggcaggatgggctgtctttggcttggtttagcagcaaggaagggttgtgtcctggctccatgggacccccactggctgccatgcctctggctggggagagggtaagtgccaagacgctagcctcagtgagtgggtgggacacgagtgggaaggacggtgggggcttctagggtgtcgagcgggagtcctggtccccatggccttcccgtgtagatgagcggcacagggcactctggggcggccacttgagttctgactttggatgaatctatctggtttatatggctgctgaagaggctttgttgaatgctgtctgcgtgctccgcaagctgctgtgttggggaggtggtttttttgcgctggaattctctcatctggaggttggaaaccagttggttctgtgct

SEQ ID NO: 17057 - DNA, 1077 bp, Artificial sequence
  DNA replication origin
tcatggtagacaaacccctggccttgtctggacctcagttgtgttcacttgttaaaatgttggaatggaaatgtggggaagggagagcgtttgccttggttgggtctctgggctgcgctggtctaagcccgacgaacccggggtggggccagcgggccaaactggaatgcgccgcgagagccgggccgcgggcaagtgaggggctggcggggccggtggggacccagactcgcacgaaggtggggaaggagttgcaaggcagagacccccgaacccctgctccagggcctgcgcgtcccgcccgcccggcgtgccgaagcgcagcggcgggtcgctagcgggaagtggctgcagctggaggcagctggccgcggaatgtcacccgctgccgggcctgggaagggctgggcctactgctgtggggtggggggcgggtgggagggcccggagggctggggctggggcgggccgcttccgggctggagagggtttggggcgtggcgcagcccgacgttagtccggaatgctctgggagcagcgctcgggggaggttaccttggcgcgcccccaaatcttttggttcccccgctcctgccttccactgctctggctgacctggctcagaccagcttgaaaaatgcattcattcattcagtacatctgtcgagtgtctactctgtgccaggctctggttcgaggtgtgctgggcttaccggggcgtgcaggtccctgttctcgtggaccggacattttcatgataggtaaaagacagaaacaaacaagatgacttcagggtagttctgtggagaaaatgaagcagggtgataacttgggaggtgggagttgcccctttagctagagagatcagggaaggcctcttcctgggacgggactttgggtctgagaccggaatgaggaggaaccagccttgcccacggaatggcaaatacaaaggcccagaggcggggcttggggcaggatatgaccttgggcggagtcagtatgttaggggaggagcctgtagggacggctcctccctctttcttgacccagacctctgtgctctggcctgcaccc

SEQ ID NO: 17058 - DNA, 1151 bp, Artificial sequence
  DNA replication origin
ctggggtggcaggagtgggagaatccggggaccagaggctgaggcggctgctcctgcacagaacctcttctttaggggccagcactgcacatttcaggccgcgctgcctggaagaccccttccctgttcagctgcatcttgggacaatgggtactggggcctggcttgctctggaaaactcctccttagctaagccctaagccacaactcagtggctctctgctatccacggatcctgcattgagaaccccaacttcagagtcactgggttccctctgcctcttccctcttgttcctaatcagactggtaactgaagtgggggcccggtgaaacctcctcttgcccagcctcctgctgccgctcccttgtttgactggcaggcgggggctggagttcctggcaaaaacaaggaatgagagcaggctctgtggagagcatgacttggtgggagggctgcacttgccctggcctcctcctcattctacgcttttctctggcctctccctggcccctccccagaagctagctccttggaagaaagcacaactgtggcggggtccaggggggctttggagagaagaatgtgggtggggggaactgaaggctgcaaggacttggggggcttgatatggcttggaatggggaatgggttggcttagcctcagacggagaggaagtgccactccctgagatgggctgcagtgctcacgggcctgggagaactggctagagcagcagatgagccaggaaagacggagagcagtgggggcctggctgcccaggccacacaccaggtcagtcttttcagaactcacgggcccggctgcctctcagcctctcaagggctgtctactgcaccccccactccaaactcttggcatgtgactctgcttgtcttcacttggcacactcactgaacagacccaatgcaagactcagtggacctgcatctctggcccctcctgggctcccctaaccccaggttcttgatctcagcaccctcccctgcttaaaagcctgccctgccaccaccttgggggagaccacactcccaactctgctgctacagctgcggcctcacatgctggggtaagaaggatcactggcgggagaggggagagtaggggtagagcagaaatgcttcaacatg

SEQ ID NO: 17059 - DNA, 875 bp, Artificial sequence
  DNA replication origin
ggggccggcctggcgcgccctcggaggtgcctggtgtggttggtgtctggcctgcccgccgcaccgtggccagccctgccaggttcactggggttgcccgggccggccacccggccaccagctgagctgcagcggcctgcccatctgtggggaggacgtcggggcccgccggggagcctgcctccccatccagcgtgcgggcgtcctggaggtccaccatggagaggctcttgccaccgttggccatctgaagatcaggctcgttggcttccgagtaactcgagctgcgggcaggtgagggctggaccccggaggaccttgtgacaaaaaacaagtccttgttttcgggggttggagacggtaaccgggtgaaatctatcagactgcagggagacaagcacacacagggaaagaaggggaaaagaagaactgtgagtgcagccaaggcgggtccaaaccgacagcacccgccaacctgccggggcctggcagcctgagccagcgctggggagatggatgcgctggggtggcaggagtgggagaatccggggaccagaggctgaggcggctgctcctgcacagaacctcttctttaggggccagcactgcacatttcaggccgcgctgcctggaagaccccttccctgttcagctgcatcttgggacaatgggtactggggcctggcttgctctggaaaactcctccttagctaagccctaagccacaactcagtggctctctgctatccacggatcctgcattgagaaccccaacttcagagtcactgggttccctctgcctcttccctcttgttcctaatcagactggtaactgaagtgggggcccggtgaaacctcctcttgcccagcctcct

SEQ ID NO: 17060 - DNA, 1894 bp, Artificial sequence
  DNA replication origin
tttcctggggcccagcggggcgagagcatccagaggggagtggagaagcgcctgccgttctggggcctgcgctggttcctccgtctacatggactgcagctggcagtaggagacaaaaactacccccagatccagagcagctgccacagctggaaggcttgggagaccaacgaagcatccccttgccccagcagatggcagagtgtgtggcagagtgagagtttcatttttagagtagattcttttcccgggggtggggaagaaaacatctcaatggcagcctgaccccaccccccaagctggtaactgctgtttctttcccaggccctggtggagaccagaggggtgaagagccaggccgtgggcaggcacaagccttgggggccaggctggggtggctctcccagccatcctggggacccatgcctctgcctcctcaggtaccaagttccctcaggggggcttctatatgtcacttgggcaccctcagccctcaacccccaggtcctcaggaagctcaactgcctcagttgcctgggctaaggagccttcccagaggtcccaggagtctgtatccaagacaattccctggtgattccaatctgcagatgggaagcctcaggtctaagctgctaatccatccctcttgttgcttttcttccagaccccactgactgctattctcacagggaacaggggctcagaggtgacgggcccttcacaaggacagcagcacccgttgctgggggacctgggggagagactcctaccagctgctgccgggaggcagccccgccctgtcccgagccgccagggtccagttttaccttttctgcttggctgagctcgtccttactccttagcctatccctgtggggggggtctgggcccaggccctcgtcttctaacaactgcgcgttcatggtcaagagccaagcggctgtgcggtccagggcattggggctcacaggtgaagggccctacaatgaaacacagctgtgaggggctgcagggaggtggagggcaagcaggaggggcgggagtggcccaggtgagccacaaggacaagcaactctgggacacggtgggaagaggggacctccagctgactgagcgcctaccgaggcagtccccacccgggaactgtctctcagacggcagccaaaggcagagctgacaggtgccaggtggcctcctgagcaccacactctgctgccaagaggacagtgagtgaccctgccactgggggcaccggggcaggctgcactgagtgggggacagggccaggctgggctgtcagcccaaggcacctccactccagacactgcctgcagcctttgggtgacagggtcatccatgctccaggtggttgtgcctgaaggcctgtccagcctgtgaaaacattttgggaggggcgtgtgggggcagagctgggtaggcgcttcgacaggcttggaaccgaagatgaatgcactctcctcctctttctctctgaccccagcctgcccctaggggcactgacagaggagcctggagttccccaaggctacagtgtccctggttcacaggattcaggaagaagccagggggagggggtggtggcgcatgtggcaggctggtgggatgggatggcagctgggtgagggtggaggtgaaatgaccgagaggaggagcatggtatggggtatgacagccccagctgggcccaagtgcccagccctgccctctgactagcagcactgacctgcttgtgcactgcccgtggcttcagttctgggctgtcccccttggaggaagaggactgctgcctcaggcgggtactggggcccacccaatcaggtgaggccgacgccagggttccgcttgagggtcttgggtactgcagggtgctcag

SEQ ID NO: 17061 - DNA, 1358 bp, Artificial sequence
  DNA replication origin
gcaccagcttctgcgtcgtctcctcctggcacttgaacagggtctcatactcctccagcttcttggtggagattcgcagcttgtcctgcagcaccgccaggtcctaccaggagggcagcgtccacgggcacagcacccaggacacagagagcacagcttcgtcagcccgagtgggaggaagggtaggagggagccccacttgaaaggccccagtggctgtgacccgcccacttcacatagcaaggagatgcccaaggagcccagctggtgggggctgcagccagacgcgtgcctgtgccccaccgtggggcctccactccaaactcccagcctgacctgtatggctacagcggggatgaagacttagacccaagtcccaggactgagggtgtaactagggctttgaacttttatatgacaaaggttaaaaaacccttggatacatgaaggacatgtgacagcaccctgagaggtgggagctctgcaggaggggaaactgaggcccagacaaggtgaccatgtcacatgaagagcgactgactagcagggtaagatcccagcttcccagcctctgtttgaatctaaagccagggggtggcagtggcatgaggaaatggagagagagagaactgaaaggcaggtggtccaggctctggatctgcctcagtccagcacagaccccaaccatcagggaggagcagggatgtggacgaggctgggaagcggcgtggctgcagagaggagtcaggtgctctgcgctgagcgaggaaaggccaacgccgggatcgagaggggccagacgccatgaggacacagggatgcaaaaagcctggagtgaggccagtcctcctcactccccagccaaactctggctctgggagcactgtgttccctgtcccccggtccccttcatgtaactatggtgaaagcaggtggatgtagcggaccggggatggtggcggtggcaggatgcagcatggagacgggcctcgcctgaggccggggagaaggagttctgccattctgaccccaatacccttgctcgagaggttgccacaggctttcctggggcccagcggggcgagagcatccagaggggagtggagaagcgcctgccgttctggggcctgcgctggttcctccgtctacatggactgcagctggcagtaggagacaaaaactacccccagatccagagcagctgccacagctggaaggcttgggagaccaacgaagcatccccttgccccagcagatggcagagtgtgtggcagagtgagagtttcatttttagagtagattcttttcccgggggtggggaagaaaacatctcaatggcagcctgaccccacccccca

SEQ ID NO: 17062 - DNA, 1606 bp, Artificial sequence
  DNA replication origin
cttttatgtcttcattataaatgcctcctatcagaaagaactcagagagtcaaatttggcattttctctaagtggaagctaaataatgcgtacacatggagtgtgaaatggtaggcactggagcctcagaagggtggagaggtggaaggggggtgggtaatgagaaattacttaatgggcaaatgtacactatttgggtgatggatacactaaaagtccagcttctgcctctatgcaatgtatccatgcaacaaaattgcacctgtaccccttacatttatacaagtataaaatagatgcctatcaacatcaaatgatttctttgtcccattccttgctgtctccttgagttctgtgttccttatgagcatctccccagcagagggatggtggtccctgaaacccagggacgggacagcagtgcagaggcaatggggcggtggaggagcgggaggtcaaagtcaggttttgatgggtggggggagaatgggggttgaggctgtggagatggcaggccgctgcaggcagtatacattcaagaagtttggctgaaggggagaaaagcagacagcctgaagcaagtggagacctagcactttaaaatgctgtaggaaagagcggggtgggggcgggggaggctggaggtttagaggccacggaggcagcaagaggcagggatgcaggaactggctaggggctgccttgggaagaaacaggttgcctcctctcctgccgctgctgagagctggggtagctgtgctggtggtcggcctgaggagagggggtggtggttgggggggtcacccagtgtgggaggaggcagggctcagagaagggccagttggctggctgggagatctgaaaagaggtacgagtttggattaactggggtggagaatgagagaggaaggcctagctgagaatggagatgggaacagacccacagggcagtcagaactggggtgttttttagttttctcctgcagtgcttggtggcctggagatcacggctgttgggtggcccctaggccgaagtggtcaaggaatattgtcaagatgggctgaggagggagcccacagggtttaggcttggtgggggaaggcagagagaacacacaggctggggaggaaaggggccggtctgcagaccagtgctgatgtggaggatgagcagggaaggcttggcagctgtgcccgctgtgagcagcacggatgacactttcctaggtcagaggtgatagcagcccagggtgggccccaggagtggctggctcaaagggggtcctggcaggaggctagagatggacagcctgagaagccagggtgctggagggtgggaggtgggacacaagggccaccggtgagggtgacggtgcagccctgctccggtgtgtggctctgccgtacttgcttccagctggctgcaggggcaagaacagggacaggcccgaggcttctctctggggcccaatccctagctggagccagaggcacctgtctaggtgacagacccggagctccatctggctttttgaccagaggtatccttgcccccagcagaagctcggcccaggcagtatctggtttctgaggggtttgggctagg

SEQ ID NO: 17063 - DNA, 1257 bp, Artificial sequence
  DNA replication origin
tcatctttaccttgggtagttctttaagtttgtcataattaatagctttgtaagctgcttttttaagcccttcaactacgcaggaaaccatgtaatcttgcttagctatacctggggaatttgcctggtagttccattggggatcctctcggggaactgctctaatgccttcctggaggtctggctcatgaagccggcggttatcagcatgagattgggctagagaaaaaaactctttcctgtgcatctggggagagggtagaagtcaggatgacattaagtcactccaggttaagttgtaggacagagttagataccggaattcctgtatgtatttagtggggtctgatgagaaagagcctaaatgttgactgatctgagagaggtctgatagagaaaaaggtacatgtaccctgactatgccttcagctccagccacctctctaagaggaaattgctgggcatgtggggaagagctagtcgcggaactaaactgtaagccggaccgggtgtgaggaggggaggtggtagaaggactgtagggtggaggagcagaggctgaggaagaattgggacttaggcctggggaggaggggaaaggtcagatgggtctgtagaaaaggaagactagaaagactcagtgacgcttggggttgggactgaggggacaggtgggagggaaagaaggaggttctgggaggaatcgcattgggaacagaggctagggagggaatgaaatgtgaaaaatgcctggacataaggcacctcagaccatttgcccatttttcgacaaaaattatttaggtcttgtaggatggagaaatcgaaagtgccgttttctggccatttagagccattgtcgagtttgtattggggccaagcggtgttgcagaagaaaataaggcgtttaggttttaggtcaggtgtgagttgaagaggttttaagttcttgaggacacaggctaaaggagaagaaggaggaatggagggtggaaggttgcccgtagtgaaggaggcaaacctagagaaaagagagcgtagagacacggagggaaggggttcgggggatcttaccctccagaaaagtgggaagaggggtcggggcatggaaataagggattggggcacagagataagaggttggtgtgcagaaataagggattgggacacagagataagaggttggggcacggaaataagggattgggtcgcagagataagaggttggggcgtggaaataagggattagggcacaga

SEQ ID NO: 17064 - DNA, 1100 bp, Artificial sequence
  DNA replication origin
gggcagggaacctgctctctggaaaggcctcaattgataatctgaaaagcgcgctagaccttccaaataaaaaggtctccactgcagactcgagaggcgtgccataattacctgggaagggcaggtcagctgcattttttcaaatttgcattttacaaagtgtttaatggatatttatatgaaagagcagcctattgggtaaatgcgtgactttaaattaggctgaggccttccccgctctgctgtgctggctgagctcggccatcagtggggccttcggtccctccctcccttattcctcctacatgcaggtcctgagggccccttctgcgccaggccctggctggggtgggatccagatatgagggggcacagccctttctggggtgtgcctggtagagagtcaccatgaagtggcttaaagagacacaccaaggggtgggggaaccacttgcaagagcggaggtggtgtacaccaacaagcccacatggggaggggcattacgggcagaagaaggacccggatgcagtgctggccagatgacagagcaaggggcatctggggagtggcgaaaagagagaggagccatgaaggagttcacaagagctgggcagggctgcctggtgggtccctgtaggggcgcaactcaggttatccgtgtgtccctgtcctctgtgcagagtgcagccttcacggctgcatgtggtggtcctgttggttggggagggaggttggtcttgttggtgggggagggaggaggctgggccccaaatggaaaagaccccccaaaccaggtgaggagtcgagctgaaccccggtgacgggaagctgttttctatctgtgtgggggtgacacgatcagtttggcatcccagaaaggctactctggcagcctgtggagaacgggctgcaggtggagagacagttggccaccagaaaatggcccatgtagaatacatgtttttaaaaacgatggcaaaaggctaattcttttcatctgcaaagatgctacaaatcaacaagaaaaggaccagtagaagaatgggtgaagaaagaggctcaactgcattcataatataagaaatgaaaattcaggcca

SEQ ID NO: 17065 - DNA, 908 bp, Artificial sequence
  DNA replication origin
cgggagggaggtgggggggtcagccccccgcccggccagccgccccgtccgggagggaggtaggggggtcagccccccgcccggccagccgccccgtcccggagggaggtgggggggtcagccccccgcccggccagccgccccgtccgggagggaggtggggggggggtcagcccccctgcccggccagccgccccgtccaggagatgaggggcgcctctgcccggccgcccctactgggaagtgaggagcccctctgcccggccagccgccccgtccgggagggaggtgggggggtcagccccccgcccggccagccgccccgtccgggagggaggtggggggggtcagcccccccgcccggccagccgccccgtccgggaggtgaggggcgcctctgcccggccgcccctactgggaagtgaggagcccctctgcccggccaccaccccgtctgggaggtgtgcccaacagctcattgagaacgggccaggatgacaatggcggctttgtggaatagaaaggtgggaaaggtggggaaaagattgagaaatcggatggttgccgtgtctgtgtagaaagaagtagacatgggagacttttcattttgttctgcactaagaaaaattcctctgccttgggaaaaaaaaaaaaaaagaaaatgtggcatatatacaccatggaatactatgcagccataaaaaagaatgagttcatgtcctttgcagggacctgaatgaagctggaaaccgtcattcttagcaaactaacacaaaaacagaaaaccaaacactgcacgttcctactcataagtgggagttgaacaatgagaacacatgagcacagggaggggaacatcacacactggggcctgtcggtgggtggggactaggggagggatagcatta

SEQ ID NO: 17066 - DNA, 1382 bp, Artificial sequence
  DNA replication origin
gacagtgttggtggtgctgtgggcttgggtgttaaacctgggcccaacttccaagctttctgtttgctccctgtgtgatttggggcaagctacttcccctctgttacctgtaaaatgaaatgaagaatacctatcttaaaaggttcttgtaagaattaaatgagataacacatgtaaagcagagttttacattcattcgtttactcattcattcattcacttactcattcaacaacctttgccacatgcttagtagcggtcagacattgtcctgggttctattgagacagcaagtcagggccttgcttgctgatgcatagagtctgttgtgagagacatataatttaaaaagcaatgattatggagggttttaaatgctagagtagaataagaaacgtctgaggtgctgagatcgtggggccacgtaacattctctgggcgggagtggcgtggtcagggaaggcttcccagaagaaatagcagttgaactgaaacctggagcgagagttagatgaagcaggagaaactgggtaggggtaggggaggcaaagggttccaggtggaaatgtgctgaagccagaggggtgagtgggaagcaggaggcactggaagaggttgagtatggttgctgggtggggtttaaggcagagatgcgggggagatgagggaaggtgaggtgggagagaaaggtaggggctgtgtcgagagcctgggtattggttcgggggggtggtccctggagaattttaagcaggggaaagatgcattccaatttgtatgtttcaaagaacagtgtctacagagtagagaacacactgagacaaggctggaagtggggaggtccctaggagacagttgctttcacataagctggagaggatggtggtatggactgggaaggttgtggtgaaggtaggggggatagacagatctgggtgccagggaaggagcaagaagggctcagcttggtgactggatgaggctggagagagaggagagatggtggcagtgagggcagggagaacctgaggctgatgtgcaggtggcttgggtacttgcatggatggaggccccggaagaggaccaggctgttgggggaaggttgggagttggacttaaagtgcctatgtgacatccaagtggagagattaaggggacaattggctatttggagcttggagttcaggagacagaggcctgggttggggacagagatgagaactcatcagcaaatggtgaccaaagagggtgacgagaagactgagaagacacctgtgggaatcacatttcactaagggaaaggcaggggagggggagggagccaggaaaggaggccaagaagcagtgtcttgagatagaataaatatcaggagagaaggagc

SEQ ID NO: 17067 - DNA, 1200 bp, Artificial sequence
  DNA replication origin
ggcggcagtttggtggcggactggggcggcggagcggcggcggcggcggcggtggcactggcactggccccggccctgagcaccatgcggcggggcagctccgagagcgagctggcggcccggtgggaggcggaggcggtggctgcggccaaagcggcggccaaagctgaggccgaggccacagcggagacggtggcggaacaggtccgcgtggacgcgggcgcggccggggaaccggagtgcaaggcaggggaggagcagcccaaggtcctggccccggccccggcgcagcccagtgcggctgaggaggggaacacccaggtccttcagcggccgccgcccacgctgcccccgtccaagccgaagccggtgcagggcctctgcccgcacgggaagccccgggacaagggccgaagctgcaagcggagctcgggccacggttccggcgagaacggctcccagcggccggtcaccgtggacagctccaaggccaggacctccctggatgccctgaagatcagcatccgccagctcaagtggaaggaggtgaggcccggcccgacccggccgcgtgggcacagtggggtggacaggacgacctcagaggtctcggcacggcccaggtcaggtcggcgggcgagggctgagctcctgcggtgcaccacgctcgggcctgcttgtcagccgcaaagtgctcatccttcaaggcctaccccccaaaatcacttcctccaagagggccccccagacccctccaggtcaagttagccactcactcctctgcctccctgcagctctttttatgtctcagccatcagcatttgcctctgcttgtagatatgtgtacgtctgtctcctccaccagcttgtaagcccctggggccccggacccgctctctcacttcttcattgaagttatatttgtttagcacttgctgtgtgactcttgggcagaggaacactttttattttggaggcagacaggcctagggtctcactacactttgctacttagctgtgtgaccttgagtaagttgcttcacctcttcagcctattaccttctctgtaaagtgaggccaattatacttatctcatcatcttgttagcattagaagactcactacttagtgttttatagcacaagtctgcaataaatggtaacttacgttaccaccttctcctttctctcttcttccacc

SEQ ID NO: 17068 - DNA, 906 bp, Artificial sequence
  DNA replication origin
cagccgcactgggctgcgccggggccggggccaggaccttgggctgctcctcccctgccttgcactccggttccccggccgcgcccgcgtccacgcggacctgttccgccaccgtctccgctgtggcctcggcctcagctttggccgccgctttggccgcagccaccgcctccgcctcccaccgggccgccagctcgctctcggagctgccccgccgcatggtgctcagggccggggccagtgccagtgccaccgccgccgccgccgccgctccgccgccccagtccgccaccaaactgccgccgctgcagccgctgccacgcgttccccgcccgagcccgttgccatgatcgctcaggctcgggttgacagcggcagtcaccgcatcgagacggggtccgggaagggacaatcgccggccgagccccagcgacctcataggcgaggctgcccacgtgaccctgcctgtcacagaggcagcggcggccatgttggaagagggcaaagagccgccaggacccgcccaccccgcggatgcgctggatctcgagggcgcagaactcggagtggcgaggagaagcgggagggcagattgagcgcgcgtggggctcgtgagcctggggactgggagtaaaaacaactacctcaagcaggaggctcagtccccgccaacactcgctgggataactctcgataggacggaggaggagccccccagtgggaccctcctcagtgcaatggatgggaccctcctcagtgcaatggatgggaccctcctcagtgcgatggatgtgagcagcccaggccctaggggagcagagagtgttccgctgaagaaaccctctgctggtcctttgagcgcccccagataagaggggaggcacttttccctgttctcagggagct

SEQ ID NO: 17069 - DNA, 1191 bp, Artificial sequence
  DNA replication origin
actgatagctcaattctaacctaactttggaaagcaagttaaaagtaaaaataaaaataaacaaaggaaaatcaatccaagtgttcccaagtggcccaatttgagaagaaatccttttccttctcggtttaaggggcgaaccggatggacaagataaaggtacataatgcatgctcctgcaccagtacctggccttccaggtgcctcaggctcaactgatgcttccttcactctggccttctgtgccaaggcctgtgctgggagctccacacagggatgagtaagacaaggcccccggggcctggtgattttctctgtccaccgagaggccaggcgcatccataaataacggcagagcttgaagtgatataatagacaaacagggcagtcaagttgggcctcttagccagggtgacctttgaatgggcatctgcagcagggagagctcaccaggcagatggggaggggtggggaggctttctaggcaggggggctggctcgtgcaaagacagaagtgtgaatcagcctggtgcaggtggccaaaaagaacagtgttatgtgggacatccatataaagcagtggatgggggaggctgcagaggcaggcagggccagcgagtgacacagggtcttgcaagcctggagagtgagtgtgagcaaaagcctgtgctcagcggcagggcactgcaggtttggaagcagagcgggacaggactagatcgagcttttccatatgtttctggctactgagtagagaaagacttggagggagggagtctggaggcagctggccagagcctgaactaggcattcattcattcaacacatgttcatggaacatccactgcgtgccaggcactgcttccagtgtggggtagtttggactgtggggatggacagaagggcacagacctagagatgtgggaagtaaggtgggaggtgaggaaggggtggaagtccaggggactctctggctgtggcttgcccaactgatggatggatggtgttactggctaaaatgaaaccagaaggagaagcaggtttgggagacaacagtgagctcagtcttggagtgttggtttgagatgtctgcggagcagtggagacctctccagcctacatttgcttcagtgctgtgtgacaatagcctggatgttggagttgtcagatattgtccctgtcttcaacttt

SEQ ID NO: 17070 - DNA, 930 bp, Artificial sequence
  DNA replication origin
agactggaggaaacccaggagagtgtggcatcactggggccaaggaaggagggggttccaagaaagaggacatgattagtcatgtagaaaacaagaggaggcacggagatgaggactgaagagggggcccggatatggctgtggggctgccaggcaggctcagtaaagcaaagctggtcacctctccacgtatctctgctcaagggggccagcctttggtggggacactcgggtgccctttgcccttgaggatcctccggacctacaaacaaggagggagtaagaccctggggtagggttgaggcgagctgacctcagaaggagaaaaggagaccaaatatttcagtggactcaaggcagggggcgcctctgggtggcagtccctcctctgaccacaagggggcagcataaaagcaggtcctgcgtgggctcaggcttctgtaaggagtcggcttccagatgctgttttcatctgtgatgcgtccttgggctctctgggcctcagtttctttctccgcaaaatggggcagttggacatcatattctcttggaccctgttgggatccccttcattctgcatccccttaccgccttcccagctcaatgtgacaccccccatctgaccacaataagtgtgttaagtgagtaaggtcaatggcacaggtatagcatgtggtgagaacacagaatgctagcccgaggaggcctacaggcgtgtgcaaggttagctgagtgaggacagaccatcccatgagcttgggttaaacctgcctgcagcgaccgtctgtgaaggtggcctctgcttcctcttacggggagtactggggtgggggtggggctgcctctgcctcttctgtctgcccccagggcagagctctggctctttgtgcaggctccttgtcctgccactgtttgccctctctgggacat

SEQ ID NO: 17071 - DNA, 1455 bp, Artificial sequence
  DNA replication origin
gccctgcaaaggcaacgccaaatttagtcccaggttccgcactcctccgcgccattgtctgccccggaccacctgcctcctgccggcctgattgcccgggagggcgcgagcagggaggccaagaaagttctccctacccctcctcctggcaaccccttccctcggttctctccgctccctcctccgactccccgtctctgtctcccttcccctcccggtgtctctttctccctctgttctctctctacttattctgtgccccgcacttcctctcctcgctctaggcctctatctgggtgcatcaccggtctagaatgtcagtcgctgtccctccccctccagcttcacattccctgcgttcctgggtccctgggtacagcaggggcagtaacggggaccgtctgctccttggaggtcacagaggtatgaggcgggtctcaagacccctgccttggctgtgagcatggggtggcttggctcgtccccgcaaccaagctgctggggagagaggcccctccctgcccgctgcctctgccgcctcccgcatgccaccagatccacttatcctgcggctcaggccccttggctgcccaggctgcgccctcacacctccctgccctgcacatgctgttctcttgctggcacgcccgtcctgtcttcccagacgcatcccaagtacagctcagagcagccttcccctgtccccaccaccgcaggcaacaggacagctccctcccagagcacgctggtgtccaggcatgtcctgcaggtacagcagcaggcagggtacactggcgtccttctcccgggcctgaccagcctgggggctgccggtgagtcaccaggaagctctggtgtccagctcaaggctgatcaaacggacacctccactgtgatatgggggtatagtctccctgtccttgttgtatggtgatggtgggcaggaggggagaggaggctgggagggagggactggggctttgcagcacctggacgccacagaccaggactggccctggttccagacagtgacaaggacaactaactggtccttgtcactgggtcattgacttaactgacaagtacctgaggcccagtctggctggaggctcatggtgggggtgatggtggcgagggctcttcagaggatggccgtgctcctccccgtcctgcctggggccccactgagtaaccaggcatctgcaccccttcctgggatggaaattggggtattcagacgtgagcaaaaatggacaaccacatataccaactggcctagacaacccccaaccctgccgccagagacacacaaagtaatagactcccacagtcacatacacacaaacatagacacgcagcctctccttgaaagacccacgcagcctgagacacaaaggcaggctggcccctgggcgtgtgtggggcagcactgccctctggcggctgtcttggcaa

SEQ ID NO: 17072 - DNA, 957 bp, Artificial sequence
  DNA replication origin
acaaggacagggagactatacccccatatcacagtggaggtgtccgtttgatcagccttgagctggacaccagagcttcctggtgactcaccggcagcccccaggctggtcaggcccgggagaaggacgccagtgtaccctgcctgctgctgtacctgcaggacatgcctggacaccagcgtgctctgggagggagctgtcctgttgcctgcggtggtggggacaggggaaggctgctctgagctgtacttgggatgcgtctgggaagacaggacgggcgtgccagcaagagaacagcatgtgcagggcagggaggtgtgagggcgcagcctgggcagccaaggggcctgagccgcaggataagtggatctggtggcatgcgggaggcggcagaggcagcgggcagggaggggcctctctccccagcagcttggttgcggggacgagccaagccaccccatgctcacagccaaggcaggggtcttgagacccgcctcatacctctgtgacctccaaggagcagacggtccccgttactgcccctgctgtacccagggacccaggaacgcagggaatgtgaagctggagggggagggacagcgactgacattctagaccggtgatgcacccagatagaggcctagagcgaggagaggaagtgcggggcacagaataagtagagagagaacagagggagaaagagacaccgggaggggaagggagacagagacggggagtcggaggagggagcggagagaaccgagggaaggggttgccaggaggaggggtagggagaactttcttggcctccctgctcgcgccctcccgggcaatcaggccggcaggaggcaggtggtccggggcagacaatggcgcggaggagtgcggaacctgggactaaatttggcgttgcctttgcagggcgcggggcgcccgttcatctcgatgcaaaggaga

SEQ ID NO: 17073 - DNA, 833 bp, Artificial sequence
  DNA replication origin
cggagagaaccgagggaaggggttgccaggaggaggggtagggagaactttcttggcctccctgctcgcgccctcccgggcaatcaggccggcaggaggcaggtggtccggggcagacaatggcgcggaggagtgcggaacctgggactaaatttggcgttgcctttgcagggcgcggggcgcccgttcatctcgatgcaaaggagagacgaaatgaatatgcagcgcgggctgtaattgggccgccgcggccgccgccgccgccgccgcactataattttccaaacaggatcttgcaatcagggccttattcattagcgcataaacaattttgtttctcggcactcgagcctgtcaatcacgcggagagggaacatcttggccggaggcgcgggccaccgtgcgcgctcccacgcgcgccccctcgagcgccgccaggtggctttgtgtccgggaggcccttgggtgctggggtggagggggcccggggcacgcttcggggtccacaccccagcccggcagatgggggtgggcggcctgagagaacacaggtttgggggcccaccgccccggcttgcaattctgcttctgacctcaccagctctgcccttgggcaaccccccttctcctccccagcctcagtttgccctctgtaagatgtgctcagcgcactcaccccgcagaactagagggggcatcgggtggaataatggatgctttgggtgctgaggctggggggtggggtgctgaggagggggccttctagctccttttattaaaggaggggatcagaggcccacagagagcttctcatcccatcaccacccccaccc

SEQ ID NO: 17074 - DNA, 1527 bp, Artificial sequence
  DNA replication origin
gagggtctctgtgccttcctttccttcatcctattgtttactaagcaccaagtaccgactgggtgcccagtgagttaaatagctcttctttccagatgaggaaactgaggcacagagaagtctggtgacttgcctgaggtcaaccagccagaaagtggcagagctgggttttaaacctcggtctcctcgtccaaagccattgcctctggcctctgcccagcacttggagatgccaatgggctgttcaccaggagtcactcatggcaactgcctcacagatggcctgggtccctcacaggcaggggtcagctgtgcatcatgcattgggacacgcaggagcagggaggctgccgggccggggaggctgcagggccaggcgcggccggattcacaggttgaagactgttcctctgggcttccggactccgtgccttcccccacagccccttcccgggccgcctcccttcctggcccggtgctgggggtgactagcgggtggggtggcatccgggctggggctagaactgtgaagagggtgtctgggtagagactgatggcctgtcagttggctgccagcacatcctcaaattctttgtctctgtgtggagtggggactgtggagggggcaggggttgggcacagcagaggaggaggatgccggggtgggggcaggagaggggcatggcgggttgcgggaggcctccgtggtctgctggtgcttacgcttgtcggcggtgtgtgtcttcgggaagtcaggtccttgccccctgctttggggccagagacaggagttcagatcctagctctgctccccacttgctgggggtgggggggtcccaggcctgtatcgttcctgtttccagtcctaggcctctgtttcttcatccatgcaatgggtctatccagctctgacctgctgtgatctctgtaaatctgagctgattagaacatttggccctgaaattccagaggcctttaggcttccctgatggagggagcatggggctgagtcttggtgctgtcagggaggcactgagggggctgggggtggggtcagagaggtggggaaggtgaaccctccccactgcaaggcctggcagtagggcaaaaccaggctgcttatctccccagcctgggcaccctggatgactgtgctggggacatggggctgatggaggggtcgccagggaggaggcggagaagacagagatgtcatctgtcctgaaagacacagcccttcagggcttcctgccctctctgcagttcttgccaggtcacctgggccccaaagaccccacagttctgttcaccagcccccttcagtccttgtcacctggctactgctaggcagccacactcagctccatgatctcaccagcagccaagtagctgaacacacagtcacagcgcccccgcccccacacacacacataggcacaaagcctgtggcacagtcacacatgggcttgtagagttataggtgcccccgcgtgcacagccctcctgggagccagcacgggagatcac

SEQ ID NO: 17075 - DNA, 885 bp, Artificial sequence
  DNA replication origin
ttttaagtgggatgattcctgtaggaaaggtgctgggtaggagtgactggagatgctgcggggtggaagggaaggggctgggctgcctttcagcaagcagagactgaaaggatggataggatttagtgaggtacctggagtgggggaacggaatgcacgcaggccctggcccagaaagcatcgtggcatgggtgtgttctggggagcagaaggccagtgtgatgggagtgtccagggctgtgaggccttaggcaagtcacctaacctccttgagccctggtttcctcatctgtaacctgggatgtcaataatgccagcctcacagggttgtgagacaccattcatgcattcagtagctatatcttgagtgccttctgtgttctttgcactgggatacgacagtgaacacagtagaccaaagcttctgtgctcctggggtttgcactccagcatgggagatggtggagatgataaagtaacagggagggagcaggcatgtccgtggcagggagtactgtggcggagatgcaggggcaagcgggtcatggtgaagtgacttgtgagcgggaacctggaggagtgagggaggagccccggggatttctggaggatgagtgttcagtgaatctgctgctgagcaggtgcctatcacagattgtctttccctttgaagttgttcccatcaattgtttcctctaagctgggcatgaccaaaaaaatgtaaatgactgcgatgcacacagacacaattcctcccttctctggctccatgtaagagggaaaaagaagggaaatcagacagagaactgctgcttactgaccatatgccatatattctactgactgtgtctctaaacatcagaggccaccatctccttgaataga

SEQ ID NO: 17076 - DNA, 1092 bp, Artificial sequence
  DNA replication origin
cgctgcagaagctggcggacatgacgggcctcagccggagagtcatccaggtgggacgggggtgggcggggcctggggaccgcgggcacgccccggagctcgtagctgggctcggcgcggagggtggtgcgtgcacgtggccatccttctccaggaggcgacgaggcagtcccgcctggggtctcccggcggcgcgtccgactcttttcctcgaggctgaggctgccgaggctgtcgttccaggtgtggtttcaaaactgccgggcgcgtcataaaaagcacacgccgcaacacccagtgccgccctcgggggcgcccccgtcccgccttccctccgccctgtccgacgacatccactacaccccgttcagcagccccgagcgggcgcgcatggtcaccctgcacggctacattgagagtaagtaaccgcagcgccgggagccgctgggcctgcggggagggggcgcggaggagcgcacgtgggcggctgaggccgaggcgtggggtggagggccttggggagcctcgtgggtgaagaagcgggacccgaagtcatttggatctaggagttgggggaagaagggtcaaatcttcggctctgcctcagtggagcgggatccttcatagaggcaagcgattcagcagccattcaaaaaatgccttcaaagcacccacaatgtgccagtgcccggagactggggagagaacaggctggacaaggtacctactctgtggagcctgcgttctggtgggcatggaaaaataggcagatgagtgtgtcgttttaagtgggatgattcctgtaggaaaggtgctgggtaggagtgactggagatgctgcggggtggaagggaaggggctgggctgcctttcagcaagcagagactgaaaggatggataggatttagtgaggtacctggagtgggggaacggaatgcacgcaggccctggcccagaaagcatcgtggcatgggtgtgttctggggagcagaaggccagtgtgatgggagtgtccagggctgtgaggccttaggcaagtcacctaacctccttgagccctggtttcctcatctgtaacctgggatgtcaata

SEQ ID NO: 17077 - DNA, 1187 bp, Artificial sequence
  DNA replication origin
ggaaaagagtcggacgcgccgccgggagaccccaggcgggactgcctcgtcgcctcctggagaaggatggccacgtgcacgcaccaccctccgcgccgagcccagctacgagctccggggcgtgcccgcggtccccaggccccgcccacccccgtcccacctggatgactctccggctgaggcccgtcatgtccgccagcttctgcagcgtctgagcgtcggggttgttgtcctgcgcgaactgcgcctgcataacctgcggggcggggagggcggtgaggcgctcgcacgcagagactccgagaccccggcccaatcagcggcgccagtccacaggccacgccccaggcagctgcggccccgccccgccacccgggtccggcccgaggggcggagccaggagacattgtcggccccgcccactttcggcccggcccccgcccccgccgcccactgcttgcagcggtacctgcagctgttccgcggtgaaggacgtccgcgcgcgcttggccggcttgggttgactgtcctgttccgagggcactgccccctccaacgtgaggccgttccctgggggcgatagaagcagctgaccacgcgtccccatctcttctagtggcagcctggaaaggacgggggtggggggagcttgtccctggaagggtcaggagcgggagttggctgggagcagggatcccagggtcctagtccctgagctcagtctttggggaaggggtttctgagcgtccgcttagtactggacacttcttacacgactggaccacgtcttacagccctaaggagaggtggcgttacctcattatacatgggaggaaactgaggctcagagagaaggaaagcccctgccctggccctttcaactagaatccgaaagctagctgaccctaatgtcccaaactgggctccctgctggcgaaactgggggacaccaaaggctagaggagataggaagcaagcaagtaacggaactatgctcctaattttataaaaataagcggaaggaaaaaaggttgtaagaatatacaacaaggtgttggcagtggtttacttcccaggaatgtgattatggaaactttttactttcagtattcctgtaacttttgaggtatttaaaaacaatcatatgttgccttacttctgtaaggtttaattttgttaaccggcgt

SEQ ID NO: 17078 - DNA, 925 bp, Artificial sequence
  DNA replication origin
tgtttttttcaactgacagttgcttgaatttgccaaggcaggcaggctgtaaccagagcctttttgccggactgtttcctccgtgcacacacaagcgattccgaatgctcccccgggtggaggggtgcccgccctggggacgcagaggcaaatcttcttggtcccccacacccaaccccgggaccccaactctgggaaggtggaaggggtggaagagaagagccagaaacgaaacatttacaaaccagtgtggtcagcgctgagagagcggtgcagggtgccgtgggactctgggggagggtaggtcagtgcaaaggcctgggggtgggaaagtgcttcagaggaggccataaagacctgggagtgaccttccattgtggctgactgggacacatgcctggatggtggggcggcatatcttgaaggttagggaggagatgggcctgaagaggatgtggtcgcttgggttttgcaaaccccaagggttttggaccagatcctgagggtagagtggagccaccataggattgtaagcaaggcagaaacaggatttcatgtgcatgctggaaactttgctttgactgctctgtggaggatgggttggcaggggcgagactggaaacagggagaccggggaggaggttgacagtgagggttgcatgatgggagcctggcctaggagggcaacagtggagatggtgagaaggagatggatcccagagatacttgggaaacagaaccaacagcatcgatgattggctggatgaggggttgaggagagagaggagtgcatgattatgattttcaagcttcaggggctgggtaagtggtggcaccattctctgaaatagagggtgtaccagaggaaacaggctgctagggttgggacagagtcacaggtgagtcatccactttaaagaacaca

SEQ ID NO: 17079 - DNA, 1208 bp, Artificial sequence
  DNA replication origin
cgctcgaggtcagaactgaagcctgagacttaggcaggacccgagacagagccagagacgataccgaaacccaatggaccgcgaggaccgaaggcagatccggggcgcaaacctgtgcaggcactggcgcgctgcctggagctctgggttcgcgccgctgagcgccggcaggttggaccagcgctgcgcgccggaagtgcactcgggacgccggggttctggaggagagaccacacgccgcaaaagtggcctccgaatgcgcccggggcctgccctcggcgacactgctggctcggcggccgcagcctacctgaagtagtccatcttgcagaagatctccttgttcttgatgtagcagctgttctgctgcctcagcgacgtgcgacacacggagcactcgaggcaccgcacgtgccagatgaggttgttgacctggggacggggcggggacggaggtcggctcagcgcgggcctctttcactccgggccccagccttcccggtctcatttacagtcagaggcgctgaagctcagaaggtgcatgcgattcccctatttttctcccgtaatactgagactcagggaaatggaaataaactcttcttatttttcagacggaacccgggggctcaggcagaccctaagtcttgcccaaagcttcgcagtcgggcagcagtggagccaggatttggaagtaagaggacctgcggtgcttccctgcagtctcctgcgctgcgtcccacgccccgacaacacgcacgcaacacctacccctgtctcaccttgagcagatatcggtccaggatctcgaggccgcagctggagcagatgttcttgcctgcagacggcacggaggaggcggcagagggcggtgagcagacagatggcgtgctgggcgtacatggggaggcctgaccctcgtccttgtccagagctcctgccagggcctcggcgtcagactgagcctgcggcgggggagagaaggagaggagcgctgatccgggcacccagagttggggctgccttggagacaaatctggggcccccgagcaccaattgacaacgaaatctccccaggacaatgcgccgtagactgaaggacagggatggaagggcctattggagaggaagggacggccccaacttttaacacgcgcattctgggtgctgggagcggttaaagccaacattccctgccggaaaaccga

SEQ ID NO: 17080 - DNA, 2447 bp, Artificial sequence
  DNA replication origin
ttgtagggtagttgcaaggattaaagaggataatgcgtgtaaacaacaaagggcttagcacataaatgctcaataaatagttattattgttatcactctaggagcacatgcttcacattccccctcattagagtgcagcagcttgtttgtccagcctctgaacctttgtggtcctctctctacctgaaatactttcttcttctccctgaacccatccaaatttcacctgccctttagttttagctcaagcctcttccatggctcatgtctaagaagttttgcaaagccagtacgatcttcatggtcttctttcctggggcccttctgcactcacaaatctggcatatgtgcagcattctataacgtttattaacctttcaattcccccagccacccaaaggggaggaagagaaggaggtaaagcaggtcctattgttattcccattttgccgatgagaaaacaggctgagcctataagtggtgaggctgggagtcacatccaggtcttttaacagataatgtggagtgtgtgtgtatgtgtgtgtgtgtgtgtgtgtgcacatgtgtgtgtgcagaaagtaaacatggtcatgtctgcagcctagaaatcaagagtatgagctctaatgtgagatgaatgtggttttaagtccttggttctggcaattagccatgtgcaccattttggatatatcacatgaactctctgaacctcagtctcttgatcagtaaaacaagcacgctgagagatgctacctcacgggattattgtgaaaagaaaatgagatcacgattgtaaaatgcctcgtatcatgcctggcacagattagtagctgtaataactgggaataatcccagtagtagctgaaattattatgtgcaaaggagatatttgagagggaggggttgttcttctgtattcatgtttgagaatgcatgtgtatgtgtgtacacatgtgtacctatgcatacacctcacccgctttcacattgcaacttgttctcttcgtataaaagattagggttcaaagagaaactcttttcactctgaatttctgtgtctgagagcaatgaatgactgggatgcagagggcgggaaatgccattagctgaggctggggctatttttgtgtaccttgatgccagtaaaggaacagatatttgtatctttggggaatatgggtgtggatctttagtatcgtgttggtgtgcaggcatcctctactacctgcgcctgtcagaacctgcctgtgtgtgtgcaaactgagactataactattgggaatctatggctgcagaagtgtgtgtgatgtgtctgcctataaatgcctatcaatagttgtctcaccatctgtaaggatgtaagtacatatttgagggtgcctgagtagaggacataaggttatacatgggtttggagctctgtgaaaatctgtgccctcttgagtatggctgtgtgtacaaatggaagaacaattgtgtgtgggggggtgtttacatctgtaaatgagggcaattatggaggtgatgacatgtgtgatgtggtgagggtaggctgtcatggtgtctgtagggctggatctatgtctgagtgtgcttatttgtttttagatgatgtatgtttacatgtgtctctttaggctcagtttgtgtgtggagaagggggctgagactctaagtgtccacttgtgtatgctgcagggcgttagtgtgtgtaaggctccatctttgggtttgaaggttctgtgtctgtgtgtctgggggcagtgtcttctgtctaaatgcctgggccttcctgccttccctaccattctcattgtcagtagaaccctagagaagaagggatgggcattggactgtgtggttaagcaaatcctgaagggaaggggaatgtgccaagcaatcccttccaagagaattcagggaaactaccctcccgtttcacctcagtccctgggagctggtgcactgtctggttcttatagagcagaggtatctgtgcaggtgtgtgagagtaagtgtggtgcctcgtgcccgtgtaaatgatgtgaacaggtaatcacttacattagtgtgtacacaaatgtaccaggcatgggattgcatcaacacagtgtaataacgtgtgacctcctacggaatctatctccgcagatggtatggccatgggtccctcctgtacctgtgagtggggcagtgtctgaggaagatgggtgccccttgagggaggagcggtagtgagagctgggtggatgtgtgcccgccggtgcctttgtgtactggcgtgtctccgagtctctctgtcggcagctctgagtttctgtgtgtctctgtgtctgtgtgtgtgtctctctctctgggtctctgcctcgtcgtgtgtgtcttgctctcccttggcggggaggggattggtcacgcatgactcatcttgaaccgagcggggctcc

SEQ ID NO: 17081 - DNA, 836 bp, Artificial sequence
  DNA replication origin
aacaaagcacatcttgcaccgcccttaatccatttaaccctgagtggacacagcacatgtttcagagagcacagggttgggggtaaggtcacagatcaacaggatcccaaggcagactaatttttcttagtacagaacaaaatgaaaagtctcccatgtctacctctttctacacagacacggcaaccatccgatttctcaatcttttccccacctttcccccctttctattccacaaaaccgccattgtcatcatggcccgttctcaatgagctgttgggtacacctcccagacggggcggctggctgggcagaggggctcctcacttcccagtaggggtggctgggcagaggtgcccctcacctcccggacggggcggctggccgggcggggggctgacccccccacctccctcccggacggggcggctggcctggcgggggctgacctccacctccctcccggacggggtggctgccgggcggagacgctcctcacttcccagacggggtggcggccgggcagaggctgcaatctcggcactttgggaggccaaggcaggcgggtgggaggtggaggttgtagcgagccgagatcacgccactgcactccagcctgggcgccattgagcactgagtgaaccagactccatctgcaatcccagcacctcgcgaggccaaggctggcggatcactcgcggttaggagctggagaccagcccggccaacacagcgaaactccgtctccaccaaaaaaatacgaaaaccagtcaggcgtggcagtgcacgcctgcaatcacaggcactcggcaggctgaggcaggagaatcaggcac

SEQ ID NO: 17082 - DNA, 918 bp, Artificial sequence
  DNA replication origin
agacggagtttcgctgtgttggccgggctggtctccagctcctaaccgcgagtgatccgccagccttggcctcgcgaggtgctgggattgcagatggagtctggttcactcagtgctcaatggcgcccaggctggagtgcagtggcgtgatctcggctcgctacaacctccacctcccacccgcctgccttggcctcccaaagtgccgagattgcagcctctgcccggccgccaccccgtctgggaagtgaggagcgtctccgcccggcagccaccccgtccgggagggaggtggaggtcagcccccgccaggccagccgccccgtccgggagggaggtgggggggtcagccccccgcccggccagccgccccgtccgggaggtgaggggcacctctgcccagccacccctactgggaagtgaggagcccctctgcccagccagccgccccgtctgggaggtgtacccaacagctcattgagaacgggccatgatgacaatggcggttttgtggaatagaaaggggggaaaggtggggaaaagattgagaaatcggatggttgccgtgtctgtgtagaaagaggtagacatgggagacttttcattttgttctgtactaagaaaaattagtctgccttgggatcctgttgatctgtgaccttacccccaaccctgtgctctctgaaacatgtgctgtgtccactcagggttaaatggattaagggcggtgcaagatgtgctttgttaaacagatgcttgaaggcagcatgctcgttttaagagtcatcaccactccctaacctcaagtacccagggacacaaacactgcggaaggccgcagggttctctgcctaggaaaaccagagacctttgttcacttgtttttctgctgaccttccctccactattgtcctgtga

SEQ ID NO: 17083 - DNA, 1352 bp, Artificial sequence
  DNA replication origin
ggctcctcacttcccagtaggggcggccgggcagaggcgcccctcacctcccggatggggcggctggccaggcggggggctgacccccccacctccctcccggacggggcggctggccgggcagaggggctcctcacttcccagtaggggcggcagggcagaggcgcccctcacctcccggacagggcggctggccgggttgggagctgacccctccacctccctcccggtcagggcggctggccgggccgggggctgacccccacacctccctcccggacggggcggctggccgggcggggggctgacccccccacctccctcccggacggggcggctggctaggcagaggggctcctcacttcccagtaggggcggccgggcagaggcgcccctcacctcccggacggggcggctggccaggcggggggctgacccccccacctccctcccggacggggcggctgccgggcggagacgctcctcacttcccagacggggtggctgccaggcagagaggctcctcacttctcagacggggcggctgccgggcggagaggctcctcacttctcatacggggcggctgccgggcggagggtctcctcacttctcagacggggcggccgggcagagacgctcctcacctcccagacggggtggcggccgggcagaggcattcctcacatcccagacagggcggcggggcagaggcgctccccacatcccagacgacgggcggccgggcagagacgctcctcacttcctagatgtgatggcggccgggaagaggcgctcctcacttcccagatgggatggcggccgggcagagacggtcctcactttccagactgggcagccaggcagaggggctcctcacatcccagacgatgggcggccaggcagagacgctcctcacttcccagacggggtggcggccgggcagaggctgcaatctcggctttttgggaggccaaggcaggcggctgggaggtggaggttgtagcgagccgagatcacgccactgcactccagcctgggcgccattgagcactgagtgaaccagactccgtctgcaatcccggcacctcgggaggccgaggctggcagatcactcgtggttaggagctggagaccagcccggccatcacagcgaaaccccgtctccaccaaaaaaatacgaaaaccagtcaggcgtggcggcgcgcgcctgcaattgcaggcactctgcaggctgaggcaggagaatcaggcagggaggttgcagtgagccgagatggcagcagtatagtccagcttcggctcggcatgagagggagaccatggaaagagagggagagggagaccatgggga

SEQ ID NO: 17084 - DNA, 896 bp, Artificial sequence
  DNA replication origin
gaggagcgtctccgcccggcagccgccccgtccgggagggaggtgggggggtcagccccccgcctggccagccgccccgtccgggaggtgaggggcgcctctgcccggccgcccctactgggaagtgaggagcccctctgcctagccagccgccccgtccgggagggaggtgggggggtcagccccccgcccggccagccgccccgtccgggagggaggtgtgggggtcagcccccggcccggccagccgccctgaccgggagggaggtggaggggtcagctcccaacccggccagccgccctgtccgggaggtgaggggcgcctctgccctgccgcccctactgggaagtgaggagcccctctgcccggccagccgccccgtccgggagggaggtgggggggtcagccccccgcctggccagccgccccatccgggaggtgaggggcgcctctgcccggccgcccctactgggaagtgaggagcccctctgcccagccaccaccccgtctgggaggtgtgcccaacagctcattgagaacgggccatgatgacaatggcggttttgtggaatagaaaggggggaaaggtggggaaaagattgagaaatcggatggtagccgtgtctgtgtagaaagaagtagacatgggagacttttcattttgttctgtactaagaaaaattcttctgccttgggatcctgttgatctgtgaccttacctccaaccctgtgctctctgaaacatgtgctgtgtccactcagagttaaatggcttaagggcggtgcaagatgtgctttgttaaacagatgcttgaaggcagcatgctcattaagagtcatcaccactccctaatctcaagtacccagggacacaaacgctgcggaaggccgcagg

SEQ ID NO: 17085 - DNA, 1232 bp, Artificial sequence
  DNA replication origin
gtggggcaaaggcgctccccacatctcagacaatgggtggccgggcagagacgctcctcacttcctagatgggatggcggccgggcagacgcttctcactttccagactgggcagccaggcagaggggctcctcacgtcccagacgataggcggccgggcagaggcgcccctcacatccccgacagggcggctggccgggcggggggctgacccccccacctccctcctggacggggtggctggccgggcggggtgctgaccccccaacctccctcccggacggagcggctggctgggcagagggtctcctcacttcccagtaggggtggctgggcagaggcgcccctcacctcccggacggggcggctggccgggcggggggctgacccccccacctccctcccggacggggcggctggccgggcggggggctgatccccccacctccctcccggacggggtggctgccgggcggagacgctcctcacttctcagatgggccggctgccgggcggaggggctcctcacttctcagacggggcggttgccgggcggagggtctcctcccttctcagacggggcggctgggcagagacgctcctcacctcccagacggggtcgcggccaggcagaggcgctcctcacatcccagacggggcggtggggcaaaggcgctccccacatctcagacaatgggtggccgggcagagacgctcctcacttcctagatgggatggcggccgggcagacgcttctcactttccagactgggcagccaggcagaggggctcctcacgtcccagacgataggcggccaggcagagacgctcctcacttcccagacggggtggcggccgggcataggctgcaatctcagcactttgggaggccaaggcaggtggctgggaggtggaggttgtagcgagctgagatcacaccactgcactccagcctgggcaccactgagcactgagtgaaccagacatcgtctgcaatcccggcacctccggaggccgaggctggcggatcactcgcggctaggagctggagaccagcccagccaacacagtgaaaccccgtcttcaccaaaaaaataagaaaaccagtcaggcgtggcggcgcgcgcctgcaatcgcaggcactccgcaggctgaggcaggagaatcaggcagggaggttgcagtgagccgagatggcagcagtacagtccagcttcggctcggcatcagag

SEQ ID NO: 17086 - DNA, 969 bp, Artificial sequence
  DNA replication origin
ggtgaggagcgtctctgcccagccgccccgtctgagaagggaggagaccctccgcccggcaaccgccccgtctgagaagtgaggagcccctccgcccggcagccggcccatctgagaagtgaggagcgtctccgcccggcagccaccccgtccgggagggaggtgggggggtcagccccccgcccagccagccgccccgtccgggagggaggtgggggggtcagccccccgcccggccagccgccccgtccgggaggtgaggggcgcctctgcccagccacccctactgggaagtgagaagcccctctgcccagccagccgctccgtccgggagggaggttggggggtcagcaccccgcccggccagccaccccgtccaggagggaggtgggggtgtcagccccccgcccggccagccgccctgtcggggatgtgaggggcgcctctgcccggccgcccctactgggaagtgaggagcccctctgcccggccaccaccccgtctgggaggtgtacccaacagctcattgagaacgggccatgatgacaattgcggttttgtggaatagaaagggggcaaaggtggggaaaagattgagaaatcggatggttgccgtgtctgtgtggaaagaagtagacatgggagacttttcattttgttctgtactaagaaaaattcttctgccttgggatcctgttgatctgtgaccttacccccaaccctgtgctctctgaaacatgtgctgtgtccactcagggttaaatggattaagggcggtgcaagatgtgctttgttaaacagatgcttgaaggcagcatgctcgttaagagtcatcaccactccctaatctcaagtacccagggacacaaacgctgcggaaggccgcagggtcctctgcctaggaaaaccagagacctctgttcacttgtttatctgctgaccttccctccactattgtcctatgaccct

SEQ ID NO: 17087 - DNA, 945 bp, Artificial sequence
  DNA replication origin
agtgaggagcatctctgcccggccgcccatcgtctgagatgtggggagcgcctctgccctgccgccccgtctgggatgtgaggagcacctctgcccggccgcaaccccgtctgggaggtgaggagcgtctctgcccggccgccccgtctgagaagtgaggagaccctccgcccggcaaccgccccatctgagaagtgaggagcccctccgcccagcagccgccccatctgagaagtgaggagcccctccgcccggcagccaccccgtctgggaagtgaggagcgtctccgcccggcagccaccctgtccgggagggaggtgggggtcagcccccgccaggccagccgccccgtccgggagggaggtgggggggtcagccccccgcccggccagccgccccgtccgggaggtgaggggcgcctctgcccggccgcccctactgggaagtgaggagcccctctgcccggccaccaccgcatctgggaggtgtacccaatagctcattgagaacgggccatgatgacaatggcggttttgtggaatagaaaagggggaaaggtggggaaaagattgagaaatcggatggttgctgtgtctgtgtagaaagtagacatgggagacttttcattttgttctgtactaagaaaaattcttctgccttgggatcctgttgatctgtgaccttacccccaaccctgtgctctctgaaacgcgctgtgtccactcagggttaaatggattaagggcggtgcaagatgtgctttgttaaacagatgcttgaaggcagcatgctcgttaagagtcatcaccactccctaatctcaagtacccagggacacaaacactgcggaaggccgcagggtcctctgcctaggaaaaccagagacctttgttcacttgtttgtctgctgaccttccctccactattgtcccatgaccctgcca

SEQ ID NO: 17088 - DNA, 1188 bp, Artificial sequence
  DNA replication origin
aaggtcacagatcaacaggatcccaaggcagaagaatttttcttagtacagaacaaaatgaaaagtctcccatgtctactttctacacagacacagcaaccatccgatttctcaatcttttccccacctttcccccttttctattccacaaaaccgccattgtcatcatggcccgttctcaatgagctattgggtacacctcccagatgcggtggtggccgggcagaggggctcctcacttcccagtaggggcggccgggcagaggcgcccctcacctcccggacggggcggctggccgggcggggggctgacccccccacctccctcccggacggggcggctggcctggcgggggctgacccccacctccctcccggacagggtggctgccgggcggagacgctcctcacttcccagacggggtggctgccgggcggaggggctcctcacttctcagatggggcggctgctgggcggaggggctcctcacttctcagatggggcggttgccgggcggagggtctcctcacttctcagacggggcggccgggcagagacgctcctcacctcccagacggggttgcggccgggcagaggtgctcctcacatcccagacggggcggcagggcagaggcgctccccacatctcagacgatgggcggccgggcagagatgctcctcacttcctagatgggatggcggtcgggaagaggcgctcctcacttcctaggtgggatggcggccgggcagagacgctcctcactttccagactgggcagccaggcagaggggctcctcacatcccagacgatgggcggccaggcagagacgctcctcacttcccagacagggtggtggccgggcagaggctgcaatctcggcactttggggggccaaggcaggcagctggtaggtggaggttgtagcgagccgagatcacgccactgcactccagcctgggcaccattgagcactgagtgaacgagactccgtctgcaatcccagcacctcgggaggctgagggtggcggatcactcgcggccaggagctggagaccagccccgccaacacagcaaaaccccgtctccaccaaaaaaatacgaaaaccagtcaggcgtggcggcgcgcgcctgcaatcacaggcactgggcaggccgaggcaggagaatcaggcagggaggctgcag

SEQ ID NO: 17089 - DNA, 2838 bp, Artificial sequence
  DNA replication origin
gcgctcgacggtgtcacgtgctcgctgccgccgctgccgccgccgaagcggagaccggagccgcgagcgccaccagggcagcagccgccgcagccgccgccgctgggcagaggagccggagacgcgagcgggcgaggtggcggcggcggcggagcgggagcgggtaccgggcgcgggcagagcgcggcggcgcgggtaggctccggcggcggggcgggcgcctgcgcggcgggccgtcccgggcgggcggcggttaaggcggcggttgaggcggttggcggagccggcccgggccccgcattgtttgttgtgcgtccttagcagcggcggcggcggtggcggccgaggcggagagcagggagcaatcccggccccgcggctccggcattgtggccgccgccgccgccgctgcggtgccccggccgcttcgggcaagggcagcgggcagccttcctcaccttcgcggggacggggtcccggccgatcaggggagggcgtgggcagggttgggggacgcggtgccgggaggtcttccgggacggagggctcggggctcggggcaggtgttggaggacattgggggcaggagctggggagaggcttcggggggcaggcggaaggtgtgggcagatttgggggtaaataggggtgcagagggatccggcccaatggaggaggagagccttcaggcaggtttggggggccccctgggccaggcgagtgcgagatggaggacattccgtccggtgggggggggcactatattgtggggttcaagagggaatgagggggcttttggggagggcagggacgagtggggtgggaatggagggagaagactggggactcgagcaggactggaaggagcgctgcgtgccaggggcagggagtggggcgggtattaggaaggccaccgggacgcccgtgaaggggaacgatggaggagggggtcggggcagggggaagtgagggcaggcagggagcgcctgaaagggagggaggggagcagggtgcctaggcttctggggtgatagggaaatgaagggtaggcccaggggctccaggagacctgcgaggggtgtgagggagtgtgtggccaggtgtataggggagcctgcagggaggcgggagggggttgacatgtaaggataaaaaggcaggtatctggtgctcagggaagaggagtatggggtggaagggggaagttcattggggcagagacttagtttgagggcttgcagagagaggtggggacagtaggagaagggtgatggggatggagagcaggaggtgtgtggggcatttaaaggatagcgggagaagtgcgtgaaatggagggtgtttatgcaggaagtatggaagaaggtgggatcagcaagagagggaattttgaggtaggacggagggtgaggggttcttggcaagtgttggaggacgttaggggcaggagctgggggagagggacaggtgtggggtggcgtggagtgtgtgaggtggagggcaaaagggggtggggaaagggaagtgttcttggagtggcaggtaaagtgtggggacaaatggaaggaaagatttctgaggcgggaagtgtggagcggttggggaggaggaaggtggaggggagggtgagaacgaaatcagtagagggggacaacgggatagactggaggggaaggtggacaggtctggagtacagtaggtggagggagggaagcacaggtttggggcactgaattttgtgctgtagggagaagggaggtagggagaaagaaggaaggtagacaggctattttggggtagaggatgtagaagaatgcttaatacctatagtggagtaagggaagggcaaggcagaggtgtatgtggacatgtctgtaactagaaaggcataggtgatggattggagtggtggtggtggtggtgggggaaataggatgcccaggtttagggcaggaaatgactgcttaagttggagagagctaggaacacaggttgcttaagagagtatggaagatccaaggagtggaagtatggggagagattggaacactttgagtttgagagatgaaaggggccaagatttttaggtcactgagagtctaaggaagatcaggcagagtgcagaagttggaaaaataactaaatggagaggattaaattccatactgagagaaactggagattgaggggtggggggacctggatcctggaatgatgttaatggaaagtggaggacattaaactcagtgtcatatctgaaagttcatactcctagggtcagagagatcgttgagcctgcttttaattccagaacccagtaaatgaggaagggggaaggggtaagggagagctgagtgcacatccccaaatttgggagaggtgtgtagtgggtatcatcctagcatattggtttgacgagtggacagaagggccacacagggtcacgaggagcgcaccaagagtgaatggaaatgggattgcagcaggtgcagggcagatgtctttgtgaaactggaagagaccaggcccagtggccagtagcattcaagggctatgcataagagaggaagaaagggataccttggtgcagtgtctcagataccctggtgctttctgggtaatgggtcagtattcaggcagcatggggtgatgtaatatctgagtcccatgctataggcagacagaagtaatgtacacctagctcctaaaagtggcagaattggagctttctgactcttaacactctttcaaggcgtgaataactgatctggattgttgactttttctcccaaatggttcaggtaaaatttagttggaggcttttggattctctggtat

SEQ ID NO: 17090 - DNA, 759 bp, Artificial sequence
  DNA replication origin
gctgctggggaacggaaagcccgccccctcgttcgccgcgcgccccctccacgcgcgtcctgccgcacctgagagcgccggccagcgcccgccgccgccttgctgtgccgccgcctgcgccaagtgcgcacctgggagcgcgcagggagcactcgccgccggcggccttatgcacctgccagcggacgcttacgtaaactgcgtccccgccttcctcccggccccaggcccccgctcgctgcagcacctgagccccgctgcgctagcggcgtaactgcggcggagcggagacgagctgcgctgggaggctagcgaaatgcacggaaacttcgtaacttccgaacctgggagctgcgccgagccgcggcggctagccgccttccccgggccccgcaccccagtgcgggatgccccccaaccccagcagccacacaaatggagtaggcgtcgcactgcctcccgaggtagaggggcaggccagtaggctttgacttgtgccaccgcccacctacttgctggctgtgtgaccttggccaagttaccaagaaccgttctgagcctcagtttcctcatcaggaaaactgggacaataattccaatttaggagctgttggggagatggcataagacaataggtgtgaatcctggcacacagcagtcgctgaacagaagctgctacaatcacctctccttcacctgcctataatgaacctcgctgggattgagtttgggcccaggacctctctgacctccttatgg

SEQ ID NO: 17091 - DNA, 854 bp, Artificial sequence
  DNA replication origin
ctagtgtgcagtgaatctggatctttacagtgtggcgcctcttctccctctgatacttatgggcatcctacaaaacccagctttaatgatctcatgtcatgtgcacgtgtagtcttccctaacacacttaggcaggaagatgaccctgtcctcaagggactgagagaccagggaggagacagacagctaaacaattacaatctagtgccatgagaatacatatagcttaacaggactatgttcaagccgagggagcttagaccatgtgtctgaggcagccaaggatctccagagaatatactctgagctgattgataaggatacccaggatttttttcaggagggtcaaggaaggtgtgagtggtcagaggtggggagagggtttagaaagggatttgcggcctggcatctgtctcaggagactcaggctcctacacacctgggcatactctggaaacaacagtactgtagttctgtgtggctggagggtcacattggcctgaaggaggggcaaagggaagggcgtgcaccttgaagcttaaggccagatcaccaaggccttttcagttgaaattgggttttttacactttattctgtgaatgaaacagagctgttaaaatatttgagcctggtgtgttagaaagatgaaaaggggccccaagggggctgttgtggggagtccctcctcaacccctgggctgttcaaggtcctctgtcttggcactgagtggtcaggtcgtttctgctccaggctgggaattgtcttagggcaaagacattgtctcatttgccagtgcatccctgcagcctgcaaaccccccggtatacagcagggactgtatactggcaagca

SEQ ID NO: 17092 - DNA, 2099 bp, Artificial sequence
  DNA replication origin
gcagaggctgtgtcttggttttgccggattcactaaaggtccttattgaatagcagaggaaggaaggaagagagggagagaggcaggaagggaaggagggagcaagggagggaggtaagcaggctgatatagtaggtaaactgtctcttgtcatctttatgctgctcctgccatagctccccacacacccccccacccagtaaaacatacactggaacacatgctcacacgctcctgtccagggtgaggtcagtgtggcccctgagccaggctgcctggcacgtggctgtgaaatcgacccaggcacttctgaggggccaggtgtccttggcctcccacaggaggtggcactttgccagacccttgcagagggtggcggggtctccaggcctgtccctggatgtgagcacagggacacggcagctctgccctgtccaccggctgctggcgggcctcccgggctgtgcagtgcgctgggtacacaggtgtttgggcttttatgattgcataggggtctgtgtgtctgtggatgtgggactggtgtgtttgtagatgtgtactgaggatatttttgaatcttgtaggtgtgttgtgtatctctgcacatatttgcatttgtgtggggggtgtgttctgtgagggttctgtatctgggtatttcgatttcgagtgttgggataggtgtgtgcgtgtgtgtgtgtgtggatgtgaatatgtttgtgtgtatttgggtgctctggggggcattgtgtggatgtacacacacgtctatccagactagtgcatgtctgtgttagccagtctatgtgtgtttgtagaatcttgtatgtatacagatatttgcgtatctgaatttggagagcatttccggcatgtgggagggtgtgtgcgcgcgcgtgtgtgtgtgtgtgtgtgtgcgcgcgcgcgctacgtgatgcgtgtgtgatgtcggatgtctgtgggggtgtatgtgtcatatgtgtggtttgtaaggtgtggagtgctgtgtgtatggtgtgtatgtggtctgtgatgtgtaggggttatgatatgtgtgtgtgtgtgcatgctgtgatgtgtgtggcatgtgatgaatgtgtgtggcatgtgatgtgtgtgcttatgcgatatatatggtgtgtgatgtgtgggggttgtgtggtgtgtataggtggtgtgtgatgtgtgggtattgtgtgtgatgtatgtgttgtgatgtatgtgtacactgtgtgatgtgtgggggttgtgatgtgtgcaggtgtgtagtgtatgctgtgtgtgggttgtttgtagtgtgttgatgtgtgtgttggtgtgtgtatgagggtgtgtggtgtgtgtgttgtgatgtgtgcaggtgtgtggtgtgtgatgcacctgtgtgggtgtgttatgtgtgcaggtgtatattgtgtgtgatgtgtgtgggttgcatatgtgtagtatgtgtgttatgtgtatgctggtgtgtgtgtgtgatgtgtgtggagggtgtggtgtgtgggttgtatgttgtgtagtgatgtatgtaatgtatgttgtgtatgatgtgtgtgttgtgtgatatgtgtgggagtgtgtgttgcatattatgtatgtgttggtgtatgagtgtgtggtgtgtgtgggtatgtgtatatgatgtgtgtgttgtgtgatgtgtgtgtgttgtgtacaggtgtatggtgtgtgatgtctgcaggtgtgtgttgtgtgttatgtgtatggtgtgtgtgaagtgtgggggttgtatgtgttgtgatgtatgtggatgtgaaatgtgtgtgtgtttgtgtggtgtgtgatgtctgggggttatatatgtgtagtgtgtgttgtgatgtatgtgggtgtgtgatgcgtgcgtgggtgtgtgtgatatgtgcaggtgtgtgtgttgtgtgtgtggcgtgtgatgtgtggggttgtatgcatgtagtgtgtgtgcgttgtgatgtatgtgtgtgacgtgtgggggtgtggacgggcatgacgtgtacagagagaggtccaagcatgaagatcaggagtctttgttccaactttggcatgtgacgtgggtcagcccctgcccctatcaagcctcggtttccctg

SEQ ID NO: 17093 - DNA, 859 bp, Artificial sequence
  DNA replication origin
gcagcaggagactataaggttagacaacaagaaggacttcctggcaggggagagcaatgcttgcttggttagagctgcctttcagtagaatgggctgctttggattgcagtgaggtcgctggagttgcaaacagcagagccagagatcaaggtcaagtggaagaaagctgggaaaggttcagtttggctggtgaagggtggagagggtaaagggaggcagggaccaccgtggtgcaggggtgaggtgccctgcagggagctgatcctgaggccgatggtgggaggagctgtgtgtggtcgggtgggacggggtggggacagcaggagacactgagaaggtggcatggccaggagctaggggctgaccgagtgtggggaggggggagtggggagggggcgttgggctgcccgatgggaggtgccttggctccgatgggagcactggggagcagcaggtggggggacgagctgggtgggaggggctgcagcttcccagcagagacagggtctgggaggcgactggactcgaaggcctgggcttgggagagaggcccgggctggagaggtggggagggggatccaggagaggggataactaaggacttgggagtagctggcatcacctggtgagacgagagtcctgaacagccccctctccaaggacagaaatttctccaaggaggctgacctgagaggtgggaggagagtggggcagagggtcaggagggagaaaccagtgggtgccaagaccaggtcagccccacaggctagggggcttgaggacttggggctgatgtctagggacgtccacgaggtggagcagcccaggaggcctgggtgggaggaggaggcggtggcg

SEQ ID NO: 17094 - DNA, 1261 bp, Artificial sequence
  DNA replication origin
aggtgggaggagagtggggcagagggtcaggagggagaaaccagtgggtgccaagaccaggtcagccccacaggctagggggcttgaggacttggggctgatgtctagggacgtccacgaggtggagcagcccaggaggcctgggtgggaggaggaggcggtggcggggaggggagggaggggctgggcctctgtccacagcattagtgctggttggagggacgaggggggtgcggagccagccaggccgccctcccgttctcacagcagccgagcagagcgcagagcgggctgccatggcgctggccaggcctgggaccccggacccccaggccctggcctctgtcctgctactgctgctctgggcccctgccctttccctcctggctggtgagttggggcccatgtctggaggggcctgggagagggtctgtcccccaagacagataccccaagccttggctgctggggtggtgggtgggctggtccgcgtgggtgcaggcctgagctgtggggtgcacaggagtgcgcggctgtggcccccagactctgtggggctccacggaggtgagtgtgttctgaggctcggggctgtttcatgttgaggggggttgtaagtttcggggttgggggatcgggggctgggcatgatttgggggagctgatgcgggtgagggatggggtgcgtgttttgggaggtgctgtgttgcatcctgtaaagggctgggggacttctgggtttctaggggctgagtttggggagttgcaggtggcataagcctcaccccagagcttgttctgtgtcgcatgctgggttgtggggcacaggttgtgggtgtgttagagttgggaggtggatgagctgtctggggtgagccgtgagttgtgtccgaggagttgggtgtggtgagctgtgtcctagcacacgctgtggggtgtaggttgtccagggttgaactaggtctttgctctcaacatgaggggtgtgggatgtgcacagccgaccccaactcgggactgagtggagaagcgtgagggagactcagggagctgggtgcctgcccgcacccctccatttgtgcggtagccctgcctgtgctgagggctgctggggatgctctgggtccctgtggggtggctggggatttgggaacatgtgtgtgtcccctgctgccccctccccagcattccaaggccaatctgaaagggctccctgaagccagaccacatttgccaagccctttttgcttttgtccaagct

SEQ ID NO: 17095 - DNA, 791 bp, Artificial sequence
  DNA replication origin
agttctagcatagacatacaaggtctcgttcaaactgtagtgttgacataccccagggatcgctgctgtctggagtgggataatatatacgtaagtgctcagaaaagtgactggcactaagggtaccttctccagagtgtggcccgtcccaggcccacccatggtctgagccgagaacatcctggagcggcttcccagagaggcctgaagtcgggaaggagggcgcagctggggacagaaggggcgcagtctgggagcgaagctgagtccagggcagagtctgagtctgcagtgtagatgctctggatcctacttcaatcctgaattcagacaactgtactctgagggcagagggcagtttgaagtcacttcagagcaagaggtacagattggggggctgggttccagggcagggggcctacagcgaagagatggcagctgatgaagagagatttgggaagctggttccatgcatctttctcatcgttccagtgtctcagcgtctgggtgtattagtgtacatgccagtgcaggtcacattcgtccatgtgtctcctagttccaagttctgttttgcatctgtaaagatctgccagtacctgggggtgtctgcagtctgagtgcatgtgtgggcagtgggttgttcgggcagtgggttgtgtgggcagtgggttgtgcgggcagtgggttgtgcgggcagtgggttgtgcatccggatgtgtagcactcacacacttcgggtgactcttcctgggtaagctgtggatgtgagtgggggcagcatctgccgt

SEQ ID NO: 17096 - DNA, 1187 bp, Artificial sequence
  DNA replication origin
aatcacacacacactctggtcccgaggacccagcgggcactcgcgtgcagccacacacctgccccaccgccccaggccgcacaggcgcacacctacccctccccccgccaggccgcgcacctgcacgcacacacctggccaacagaggcagcggaagctcccgaggccctcgaggcaggacgcgttgtgctcgcagggcgccgatgcgcactccagcacctcccgctcgcagtgcgtgccctcgtagccggtgcccgcgcagtcgcaccggaacctggggagggcgcaccggcggagctgagcgcgcgcctgccccttctgccccgcgcctggcctccccgccctcgggcacccggcgcccctgccgcctgccccgccgctcgctcacccgttgaccaggtcgtggcacgtgcccccatgtgcgcacggctggctctggcactcgtcgaggtccagctggcaacgggtgcccccgtagcctggcgcgcacacacagcggaaggagcccacgccgtccaggcacgagcccccgtgcaggcagggcgctgaggcgcactcgtccacctccatctcgcaggtcacgcctggacagggcaggggacacacagggtgcaggatggacacccagagcagggcggaagaggtcgcgccaggcctgctccagagttagagactcgtggattcattcattcagagccggatggtggtggtggtggttggggggtgggggacgggtcatgccagcaaccgcagggagagaaacgagacagacagccctgccttcatggggctcacagcagtctaggccaggacatggtggggggtgattcagccagtaattacctaaatgagctaggtgatgttgccaagttcaacaaggaaaggggttgggtcttgggaaagcaatagccggggtctgctctgttcagggaaggcttcctagaagaagaggcttttgaaggattcagataggggactgtgggcagcagttggattccaaagagactgcagcaagaggcaagttccactaggggcagggccatgatgccctaggcggggttattggagggttggaagcaagggagagggtggcggaggtgagtcgggtgggaggtgtcagtgccttggggaccaggtaacctctgggtccatcctgaaagtttcagacaggtaagtgacttggtccc

SEQ ID NO: 17097 - DNA, 863 bp, Artificial sequence
  DNA replication origin
tccatcctgcaccctgtgtgtcccctgccctgtccaggcgtgacctgcgagatggaggtggacgagtgcgcctcagcgccctgcctgcacgggggctcgtgcctggacggcgtgggctccttccgctgtgtgtgcgcgccaggctacgggggcacccgttgccagctggacctcgacgagtgccagagccagccgtgcgcacatgggggcacgtgccacgacctggtcaacgggtgagcgagcggcggggcaggcggcaggggcgccgggtgcccgagggcggggaggccaggcgcggggcagaaggggcaggcgcgcgctcagctccgccggtgcgccctccccaggttccggtgcgactgcgcgggcaccggctacgagggcacgcactgcgagcgggaggtgctggagtgcgcatcggcgccctgcgagcacaacgcgtcctgcctcgagggcctcgggagcttccgctgcctctgttggccaggtgtgtgcgtgcaggtgcgcggcctggcggggggaggggtaggtgtgcgcctgtgcggcctggggcggtggggcaggtgtgtggctgcacgcgagtgcccgctgggtcctcgggaccagagtgtgtgtgtgattgcaacctgtcggagcctcagtttcctgatctacaaaatagggctgatcgtagcgcctgctcctggggttgctgcggggagctcgaaggtgcgacgcctgggaagcccttggggagggcctgacagctgcaaagggctcagtaattaatgctagtaatagtagtaagactaggccgggcgcggtggctcaagcctgtaatcccagcactttgggaggctgaggcgggcggatcacgaggtcag

SEQ ID NO: 17098 - DNA, 995 bp, Artificial sequence
  DNA replication origin
gcgctctgacccggccctctacgggggtgtccaggccgccttccctggcgccttcagcttccgccatgctgcgggtttcctgtgccactgccctcctggctttgagggtgagcccctgctggggaagcggtcagcccatgtccagatgcccagggagggatcttgtgcccacccccccaccccccccacccccccaccccacaccccacacccgagtctgccctctctcttggactcagtctctctagctatagaatggaccctctcagcccctgcctggctctgagggtgcaggtgggacccacagctgggcctcttacaggagccgactgcggtgtggaggtggacgagtgtgcctcacggccatgcctcaacggaggccactgccaggacctgcccaatggcttccagtgtcactgcccagatggctacgcaggtgtctggggtggggtgggccctgggaccatcagaattggtggtcctcaggtgagaaggtcccttctgtctggatgtgtggattgatggggtcaaggagatcagggaggaggtgggtatggtggcccaggtgaccgctgagggtggctgaactgggactcgctttggaggtgagactggggctcaggagtgtagtcctggcagctggggccatagtgggctgaggttgtctgggagaacgtgtggagggatggtcttcagggaagacggaggtggttcagccaggacagagaaggaaaggggggctattgcagagagttagggggcagcatctgtagaaggatgactctgacctttggggagctggggcctgtcaggcaggagttgggggttcagaagtctgcccctgccttgggtacacgcagatgcacagacacaggaccccggtgagcccagggagctccaccgccaacactgaacgtccctgccccctctggaatgcctgcgacacctccctcacacccgcccgcattcctgctggggcacactgcctcctcccc

SEQ ID NO: 17099 - DNA, 2066 bp, Artificial sequence
  DNA replication origin
ctgctgccacctttggcttgggaggcgccccaagctctgcctcctttctgctccaagagctgccaggtcccaacctcacagtgtctttccttctccgcactcgggagtccgctggcctgttgctccagtttgccaatgactccgcagctggcctaacagtattcctgagtgagggtcggatccgggctgaggtgccgggcagtcctgctgtagtgctccctgggcgctgggatgatgggctccgtcacctggtgatgctcagcttcgggcctgaccagctgcaggacctggggcagcacgtgcacgtgggtgggaggctccttgctgccgacagccagccctggggtgggcccttccgaggctgcctccaggacctgcgactcgatggctgccacctccccttctttcctctgccactggataactcaagccagcccagcgagctcggcggcaggcagtcctggaacctcactgcgggctgcgtctccgaggacatgtgcagtgtaagtgtctggtggcggtggtggtggtggggtggggagtccttttcccaggatctgtcctgtgtcaccggggcttagtgtgtccttttgctgatgaggaaactgaggctcaggaggtgaagtgacctgcccagggtcccactacaggagggtggcagggcagatttacatctgtctcttcagcccagctgctcctaccctctggcggtccccgtgtctccccgagctagtcctggtgtgagagagacaccctgaccgagatagagagctgcctgagcctttctgcaggagctacttggggagcgggacacgcttttgatcatgaacagaattccaccaaccctggagttagaacagcttgggcatgaattctggttcctctctttactggctgggtgactcaggcaagtggctttgcatcactgagcctcagttttctcatctgtaaaatggggatcttagcgacttcctctcccctcgtttgtgaggagatactgtgtctgtagtaggtgctcagcgaagaagcactgcaatgccagttatggtgggtgatgctcactgcagtcctgagccaacccctgccctgcctctcccacagcctgacccctgtttcaatggtgggacttgcctcgtcacctggaatgacttccactgtacctgccctgccaatttcacggggcctacgtgtgcccagcagctgtggtgtcccggccagccctgtctcccacctgccacgtgtgaggaggtccctgatggctttgtgtgtgagtgtgtgtcctgggcagctcccgtgctgggtgctggacacctaagctggttagatcccatctgcactctcagggcttgtaggatactggtggaccaggcatgccaagccctagggcagtgtggcggggccaccgcatgtagagggacagagtttctggagaaggtgagcctgtactgggcttcagggccagactctgagagccacagggggaaggatattttatggagtggcatagcatgtgccaagtccctgaggtctgcaaggacagtggaagtgcaagggggtgagcaggaatggggtgggaaagttggtaggggctttgaggacacccagctaggcggctctgactttatcccaaggacagtggggagcctctggagggttttaaacaggagaggggcatgaccagatctgcattttacaaagatgactggctgcagtgaagggcaagcctcggccatgaggtggggcagcttcacggagaagggaaggggccagattctgccaggagttgctgttgcctggcttgtgacctggagggtcgcctaggcatcacgccccaccccccagcactggccgggaactgctcctccatgggtaggaaatacattgggagtagaagtgagggtggtgggggcggctgcagtttccaggattagatgataggtgggtgcgtgtgccccaccccaagtaagtggctgtctgccactcgctgggggaagtggggaggtggcatttctggagaaggctccgtgggctattccctgaggctccttctctccgcaggtgtggcg

SEQ ID NO: 17100 - DNA, 1489 bp, Artificial sequence
  DNA replication origin
ctgctgtggctggatggtgccgccaccccggtggcgctgcgcggcctggccagtgacctgggcttcctgcagggcccgggtgctgtgcgcatcctgctggctgagaacttcaccggctgcttgggccgcgtggcgctgggcggcctgcccctgcccttggcgcggccccggcccggcgcggcccctggcgcccgagagcacttcgcgtcttggcctgggacgccggccccgatcctcggctgccgcggcgcgcccgtgtgtgcgccctcgccctgtctgcacgacggtgcctgccgtgacctcttcgacgcctttgcctgcgcctgcggcccggggtgggaaggcccgcgctgcgaagcccacgtcgacccctgtcactccgccccctgcgcccgtggccgctgtcacacgcaccccgacggccgcttcgagtgccgctgcccgcctggcttcgggggcccgcgctgcaggtgggatggctgggcaggggggtgggctgcgaatgccccctggggctatggtggggcagagaagtctgccaggtctgtggatgagtcgcttcccttccctggtcctcatgtccttatctgtgacatgaggaggacagtttaatttgataaatttcctgataaaatacagatcaaaacacaaccagttagcctggaatttcagataaacagcgctgtggtctggggctgggagccgcctgccgcttacacggaggttcatccctattggtggctggttggggtggagggagggggtcaggctttggcgcttcccttattcatctggcagtggctctcccgggagcccagcgtgtggaaggggatctggctgtggcctgacccctccctctcccctcaaggaatgtccaggcgttgtgtttaggagctgcttttgttcagagtccttacactttgttgtcctgagtcctctgagactctggaaagcgagtgcaaccctgtgtcccttccctcccatcagggacctcaatcccatgcccaatagaggaaggccctgagttccatacatgagaacacaagctcaggtggcccacggtcacagcgctggggagggcaggtcccaggtgtcctgcacccactccagcctctgctctctccccaggttgcctgtcccatccaaggagtgcagcctgaatgtcacctgcctcgatggcagcccatgtgagggtggctctcccgctgccaactgcagctgcctggagggtcttgctggccagaggtgggtctgggggcctgggaactgtgaggaggtccaatgaatgtggagggctgttcctccagccagggtggggcgggggtcctcgcccaccttctcacccctccctggtatcacagtcaccattgtcacttgagtttccttccatgactcgcaagaccatcctctgtgatacagactgctgctgggcagtggttgcctggtggcagttctggaaacccagcctcagcccgcctgtgggagacca

SEQ ID NO: 17101 - DNA, 1259 bp, Artificial sequence
  DNA replication origin
acggtcacagcgctggggagggcaggtcccaggtgtcctgcacccactccagcctctgctctctccccaggttgcctgtcccatccaaggagtgcagcctgaatgtcacctgcctcgatggcagcccatgtgagggtggctctcccgctgccaactgcagctgcctggagggtcttgctggccagaggtgggtctgggggcctgggaactgtgaggaggtccaatgaatgtggagggctgttcctccagccagggtggggcgggggtcctcgcccaccttctcacccctccctggtatcacagtcaccattgtcacttgagtttccttccatgactcgcaagaccatcctctgtgatacagactgctgctgggcagtggttgcctggtggcagttctggaaacccagcctcagcccgcctgtgggagaccataaaagtgcagattctgggccctgcagacagtggcgtcagcgtctggggcacctgccttcacacaggctcccgtcaccctaatgggatgagagtccttctcagtgacggctgctcaggtggtcacctggcagggcccagctgggcaggagcagcgcatggggacagtggatggataagctctgatgcttgctgaagtggggatgggcagcagagcagctgggagcacaagaggcagccatgggggaagccgctttctcagcccccctccctctccaggtgtcaggtccccactctcccctgtgaagccaacccctgcttgaatgggggcacctgccgggcagctggaggggtgtctgaatgtatctgcaatgccagattctccggccagttctgtgaagtggcggtgagtgttgtcaggggtgaggggccgtggacgtggcctgctgggcccttggcgagatgctgctggggagagagcgcagcaccatggggctgttcctgggccactctgtcatggggtggggcagtgagaggagcctcaggtcccttccacaccccccacacaagaggtatttccactgcagggagagctttgggggctgtcaccgtctattgacaagagcacaaagctcctagctgggtcagcggcttcctcagagtgcccagggcagtggcagtgaggacagatggtctctgccaatccaaccaggactcagggccatgttggtgttctgggatttaggttggtgaatccaggagactcatctccaggggtttctgagccagtgtcctgagtaggaagacacggaggggcagggggcctggga

SEQ ID NO: 17102 - DNA, 897 bp, Artificial sequence
  DNA replication origin
gggcagacccccaggccccatccgggatagggcagaggaggtgctggcggccccagggaaggagggtgtgtaccccaaggccccctggctgtgctgaggggctggggtgagcgctccatgttcacatgagcactgctgcctcttcacttgtgggactttttgcaaacccaaggatgaactttgtgtgcattcaataaaatcatcttggggaagaggctggcatccccgtgtccttgaagcttttgggtcggggaggccccacacgggcccggagccatcctcaccacctgctcctgtagaggcaggggccaggcgcagagcagttagggaaggagtcaactccccgcaccctcccaagccggtgcccactcagggctctaagccagctcatgctctgcccctcacagaccaggcacggggttgggctggcaacaggcctgctcagccctgcgggggccatggggcagactgcaggcctccaacgacgttgagggcacccaggagccaggaaagagttcaaggggacacctggcaagtcgcccccacaggtctctcattagcaagaacagagcctgggactctgcctctgttggacgctggtgtttgcggggaggcgggcgggggaatgcagaccaatcgaccaccccatagtgagcgtggaacatgcccagtcacaccacccaccccctccgactcgcccatcatctgaccatgcccccacttgcaggactgactgactgacaggctgaaaacgacaggcacgcgggccgggcgcggtggctcacacctgtcatcccacacctataatcccaacattttgggaggccggggcaggtggatcacgaggtcggtcaggagttcaagaccagcctggccaagatggtgaagccccgtctc

SEQ ID NO: 17103 - DNA, 1045 bp, Artificial sequence
  DNA replication origin
gacctgtgaggggcacagaagccagcactggacagcaggaggccggacgcaaaagccggccccagggaagctggaggggccccgaaaggcccggctggtgtggagaccaggggcagggtgggtggggctgctggcatggatgggacaaaggggttgagtggtggctgtgggaatggggtgggtgtccctgcaggggggaagctgaattggggggtgaatggggtggctacattcggggtggcggggcgtgacgggagggtgctgcctgaccaggctgtgctgagcgggtccaggagggcgagcagggcgtcactgctcgtgcctgcagccccggggccagggctgagcggctggagcagttcagtggggccttgggggacaacaccaggcaggagccctggactcagggcagctcgcctgtcccgatccgtctgcagccgctctgagacgtcaccaagtgcggcgccggcagcctggagcttggccgggcggggaatgggcggtggaggcacgatgcccagctctggggtcttcctgccttggggccgggggatggtgatgctgcccagagtaggggtgggcacctcctccttgtcactggggttcaggatgctgtcccggttctggggccttcgaggcagggccagggagtttccgagcagggctgagggcttctcaggggaggcagctgggggcttgctggggatggccatgtcgtcctggcccaggctccagagcttgttgtacgggtgggtaagcttcaaggccactgtcaccccgcggctcctctcactcccgcccagatccagcctctgttgggagggaaggagggcggcagtgaccacgggctgagttgggacatatgtgtgcccattcccacaccacttctgtgtgctgaatgtgtgctgggcctagttgtgtggctgatcagctcctcggacttggaacagctgagggctcccccaggttaccagcagaggacccacgtgtgctgggactccaagcctgtgctccgggaactcaagacaaagctctcgtcccttta

SEQ ID NO: 17104 - DNA, 912 bp, Artificial sequence
  DNA replication origin
aggtatggaagagagcaggggacagggatggtgggagaggctgaccaagtcgaggaaggcagcaaccacctgggagaatgctggtccacagcaggacatcagactcaggtgaggggaggaagctgtcctcccgaaggggcaacctggtgttagagtccaagtgggaggagaagggtgtcccactgaggggtcattgggcatagtgtgctggggcccaagcagagtgaggggcctagtaagggaaagtcagcgtctgagcaggatgaggagggagtctcatgggggaggcctgacttggagtttcatgactcaagggggcaaggaggggttagacctggcatgggataaagacagcatctatgtggagtggagggcctgaccagcaatggtattagaacccagaagagtacaaagaacatctggaaggcagttcaatgtgggatgtcagagcctgaggggtgggagggcttccaccaaagtgggggtcgggggaggggagggaggcgaggcagagtccatgtggttgagaatgctgtccgtgataggaaggggcagcagcagctctgcctaaggtgccacagttcaaacagtagcacatgctactgtaaaaacagggtgaggagggtggcgctgtgtaggaagggggctgcagcagagggccactggttacaaacaaggaacagatcaagactgaccaagctggtaaatatataatgggaaccaggtatcttactatcagaagagagttacaaatccagttagggaaagaatgagaatgaaccccacggtgtcaaactggaactgaatgtaactgtggggcatcatgatgttcagtagacaggtaggaaagtagagacagataaaataaatagaaatacaaatctatgtacatacataccttccctagtttta

SEQ ID NO: 17105 - DNA, 1204 bp, Artificial sequence
  DNA replication origin
cggcggcggcagcgcgggcgggaggggcggtggtgagaggcggagggggcggcgcgcgccgggcacgcgcgccggcgaccatggcgttcgccgggctggagcgagtacattaacccctggaggcggcggcggcggcgagggagcgagcctcgagcgggcgggccccagcctgagggaagggaggaaggggcggggagagcgccagagggaggccggtcggccgcgggcgggcgggcagcgcagcgccgagcggggcccgcgggcccatgaggaggcctggggaccatgggctccaggatcaagtgagtgcggccgggccgggcggagccgggccgggcgcggggcggcgaggccgggccagggctgcaggccgcgggccgcgcgggggacttgttgccgagaccagaggggcgccccgcgtgacgccggcacgcggggagggggacggttgctatggcgatccagggaggcgcgggggcggggtgcgcgcggggtggcagggcgccgggggtcaggtgtcccctcctcacctgggggtcggaacagctgagattacagggcggccccctccccgggtttacggagagcccctgaaaatggtccttcaactgtggggaaggggagtgggaaagccccggaagcacctccccatgtttgggcatgtttggggcgcccctgaaagttggcaggtccggagaggttgcagcctggccgcttgaggcctgcggcccccacagaagtcgcgtgaggttcttagagggaggggccgctcatggtgtggccacctaaggtgtggatggccggggaggaaggcctgtctctctatttcccccctcttatctgtgaaaatctccacgcagcaaggtccaaaggctgtgaaggaggatacctctgtgttgtaaccgagcacctgctcttgataatcgttggaaaggctttgtaactcaatctggcgaattccctcactcattcattcacctggagttcccggtggagggttagctttccggggaaattgttgatacatgtaacttcagaatccactgaaacattgttgctgtccttgtagacttagaagttgactttggaaagtgcaactcttaagcggtccaatttgggtgtgtggctttcgactctatctcccctcccagccaggtcctcttgtggcctctcccttcctctgccccagaactggagatgtttt

SEQ ID NO: 17106 - DNA, 1284 bp, Artificial sequence
  DNA replication origin
aagactttaaattcaaaatgacagtttggacattttcactttttttttggttttcattttaaaaagtttaccctttgacttcaacaacctaaaggcagaggcaaaagggagaaactatctttattcagaaggtgactccaacagaagaagtcttctacgacttatcttctggctttctttcctcccatcctggccgggagctaggacgcaggaccagttacgtagaggctatggggtgggggtagggtggggaggcactccatgcatttataagaactaaaatggcagaagtgatgaatggcatttcgggacagaaaattggaaaaaaaaaaaaaaaaaggaaaaaaagcctaatattaaaaatgtctttggacttgtggccaaaggtgccaccttaaagcatgactatgtcacaggtgtctggaatgattcagtctggacactaatcttggcttcttcactcgttgctagttatgtgaccttgggaatgtggctcagtttcctctttgtaaattagggagatgaacacaggattattgtgaggattggcactaatgatgtacggaaatactgtgtctgatgcagaaagggcactcacccgctcattaaagggtggctaatggtagctgtgattattgcttcctttatgatccctctggccctagaggggatgaaattgaggtgttcatggaagtgaatcccaagggggagcaggggtaggtagcaggctggtgatctcggctctcaaatcctttcatttgcattgagttaatctctatcagggactgttgtgttaacaggaggcttcgatgttggagttcccaaaacggctgataaagggaggcagaggtcctcagcgggagggcagagctgagccaccacgtgggtccacgaagcccccaggtggctttcctgtaggtatgtggggtctccttcaagctctaaggggaaaggaagaggaaaggccttcagatggggaagtggacggtgtgatggagaagaggttctgcacggaacttactggaaggtgcgggatgttaaagggaaaacgtgttttcatggaggcctgggcgggggattagctctccgttagagaggctgggtgggaggcctccaatgggaggattggtggcggtttcatcgggagggcttggggtctccatgagaggattagggtctcttcagggcggctgtgagtggaggtttccagcggggcgcagtggggtgcagatgtgtaagggcctgcaacggaacgccagagtcctccggggcccgcgccctggg

SEQ ID NO: 17107 - DNA, 1426 bp, Artificial sequence
  DNA replication origin
tgtgtgagtgcatgtgagaaaatgtgtgtgagtgcgtttgagagaatgtgtgtgtgagagaatgtgagtgtgtgtgtgagaatgtgagtgcgtttgagagaatgtgtgtgagtgcgtgtgagtgaatgtgagtgtgtgagtgcgtgtgagtgaatgtgtgtgtgagtgcaagaatgtgagtgcgtttgagagaatgtgtgtgagtgagatgtgagtgtgtgagtgcgtgagagaatgtgagtgcgtgtgagaatgtgagtgtgtgagtgaatgtcagtgagagaatgagtgtgataatgtgagtctgtcagtgcgtgtgaatgtgagtatgagtgtgagtgcatgtgagagaatgtgtgtgagtgcattggagaacgtgagtgcatgtgagaaaattgtgtgagtgcgtttgagagaatgtgtgtgagaatgagtgtgtgtgagagaatgtgtgtgagtgcatttgagaatgtgagtgtgtgcgtgtgagaatgtgtgggagtgcgtttgagagaatgtgttagtgtgtgagtgagagaatgtgtgtgagtgaatgtcagtgagagaatgagtgtgatgtgagcgtgtcagtgcatgtgagagaatgcgtgtgtgagtgcgtgtgaaagaatgcgcgagtgcgtttgagagaatgtgagtgtgtgagtgcgtgtgagagaatgtgtgtgtttgagagactgagtgtgagtgcgtgtgagtgaatgtgagtgtgagtgcgtgtgagtgaatgtgggagtgcatgtgagtgaatgtgaattgtgagtgcacgtgagtgaatgtgtgagtgcgtttgaaagaatgtgtgtgagtgcgtgtgagagaatttgagtgtgtgacttccgtgtgagtgaatgtgtgtgagtgcgtttgagagaatgtgagtgtgtgagagaatgtgagtgtgagtgcgtgtgagagaatgtgagtgtgagtgcaaatgaaagaatgtgtgagtgcgtgtgagaaaaatgtgagtgagtgtgtctgagagaatgtgtgtgtgaatgtgtgtgagaatataagtgtgcattgagtgagaatgtgagtgtgtgagaatgtgtgagagaatatgagtgtgaaagaatgtgagtgtatgtgtgtatgagtgcaagtgcatgtctgtgtgtgaatgtgaatgtgtcagtgtgtgttagtgtgtgagaatgtgtgtctgagtgcgagtgaatgtgagttcatgtgagtgtgtgaccccccaatgtgtgtgagtgtgagtgcaagtgagtgtgtgagtgccagtgcatgtgtgtgtgagtgtgtgaatgcatgagtgcgttgagtgtgtgtggttgtgtgggtgtaagtgtgtgtttggagtaggggtggaggatatgataggaaatgaggccagagaggaagccaagggccaggtgacactcaggacctt

SEQ ID NO: 17108 - DNA, 2212 bp, Artificial sequence
  DNA replication origin
ctgcacaaaagtgcccagcacctgcctggccccaggaggaggagccccagaagcatcagctccctcccactacagagccctttgcctcctccttacagagcttcagaggcaggtctcctccccctttcttgtggctctctgagctcctactgagccttcatccttctatgtttaaactccacttttctttttcatcctccaaatacgtgtttctgagtgtctgccttggtgccaggcacagtgccacaccctgatgatgatgcgaggtgagaaaacacacgatggacctgccctcaaagagcttccagccccatgcctcaggtcccccatgagactccttcatcatggtcattgcatccctgtgtgctcaaaagtgtcttcccagaaaaaggagtgctttgtgaggacaggggccatgcccagcacagggcctggcacacaacaggggatcagtggccaaggacgatgcctcctgtgggcctgactttaagggcacaaacagaaaccaagcctgagtgtgtgctgccagggaggccctcgggtgggggcatggctgtcatagtaggcaatgacatctttgggtgcacagtgctgggacatagcaaaggagaggacaagagatggcagcccccaggaataaccaaaggcaaagaatgagtctgcatgctggcctggcttcttccttccagctcagaaaaggggaaatcgggactcatgtggttgagggttcatgagagcagtttctgtgcgctgaggccgggacttcccagcacagcctacaagacactgcctgcccacgcctggccccgcccacctctgcagcctcatcccgctccccaccccacaccggccactccggctttcgcgctggccttgctccctcgtgccaggaacgctctccctccaccacctcttttagcaccccctgcccacttcctaccaactgcaatcctggtgccccaattgacttcaggtctcagcttcgatgtcatcacactttgggaaaggccttcctgagccccagaccaggtcagtttccctggatatctggtcttatcgtactctatatgttccatggcacttgtataactgtcatgaaattctgtaattgctgtccacagtctgtctgcctcctagaatgcaagttgcatgaaggcagagaccatgcctgcctcgtgaattgctgtttcctcagtgctaagcaaaaagcttgaataaaagctggacagaataaataacctgtgggctgggcactttatggattccacgaatgatctcaatggcaatcctgaaaaagaggtggttattgctcccatttcacagatgaagaaactgaaacttggagcagtgtgacttacctaagcaagtggtcttgaactcacatctctctgactctgaagccacactcggtccgggaaacatccctgaagcttaaaagccaatcatggtgtgatggggaatggggagggaaggagggagggtagatttttctcctgcttgggtctaaggacagcgagagagcattgcccctctgcttggtgtcaaccagggaggaaccagcaggtgacagggcctatcagatccagcttaggttgtgcccactcaaaacctgaggacagggggaggggaaccacagtcacttttcaggaggggctttagggaccctggaggaaaccaccattaacttttcccgcggaactggcctctggtacttgtcctcgaggctgaggaaaggtgttttgtggggcacacatggcacccagcgagcgctgggtggccgctgcatttgaggaggcgtgaacttcaacaggggaccacaggcacggggcacctcctgcgtcccccatcgccaccccacctagagctgctcatcaactccttttagagacaggaaactgcagccctggcggggagtgacttgtccgaggtctcagagcagggaaatggcttcagttgcattttgggggccgctgttccaaggagagacagagaaagagatagcgagtccccctgagcaaggcgagaaaggggggagagtgaggggaggtagaaggaagccggagagggagggaggaagtggtgagagcagccgaggagagaggggtaagagaaaaagagagaggcagtgaggaagagagccggggacagccagagaggccgggagaggcgaggaaggaggcagagaaacgccgcggagaccgggagatggaaa

SEQ ID NO: 17109 - DNA, 1007 bp, Artificial sequence
  DNA replication origin
ccagtcctcggctccccgggcgccgggcctccctcccgcgcgcctagcccggctccgggccggccccgcaggctggagcaccccgcccgcctcaggagggagccctccgccctccggcccgggccccggcgcccctccccggccccgcgcgccgcgcacctcctccggctcggcccggcccgcccgagggccctggggctgccaacggccccctcacccccgctgggcaccgtgcccgcgcccccagccctcaccctgccgctcccccctagcccggcacccccgccccccgccccccggccctggcccggggccgcccgcagagccggccacacccgctgcggaggactcaccaaggtaaggaagcgcctcggcgcgccccgggggcctggagggctgcgcgtggtgcggggagggccacggcaggcacccgcggacccggaccgggaaccgccgctgccactgagccgggagcacgggagggccccgtcgggccgggagggctttgggcgagttgggcttgtcaaagggaggacctggtggcaagtggctggcagttgccgctctgtctggagcgtgggggagtctcacgctcaggtacagagatcttctgtccagatctttttctcttttaaggaattctcttcctctgtcactatcctctccgaatccctaaaattttatagacattattttccagtgtctcttttgaggaatcacctctttgccacccttcttctcaagcaggagtcttttcccattcctcttccccaattaagcacatcccctccctcctccaatttagaaggattttcttcctctttctcactccccagtttaaaaggaaattctctctccccacaatttggaaccaccttctgtggctcactttcccatttccaaggctagacccattcctatgctgcccttcacccccataatcctggctgtgcagatcaatttgtcttcagctggagggatctaccttgtgtttttctagtgcaggg

SEQ ID NO: 17110 - DNA, 842 bp, Artificial sequence
  DNA replication origin
cattgtgcgcgctggttttatgtcttcatagccggtgattgacaaggtgtaattagtcatctcactcggtgataaacatgggcaccctcctcccgcggcatcaggccgtgtgtaccagcagaggaagcgatagttgacgctgatataccattaaatcaaaatgaagacgttcagaagtgtgtgtttgctgtgacgctgtgatggtttatttctcaaatacggcaccaacagatttacttgatttgcaagttaactacaacattaactggttttatttattttgcctcttccttcctcttcctaggcagggatgttgctcttggagaatgtgaagacagtttgcttcttgacaagcgagcgaacgggcgcccagatttttgcagcctttccgagtctcccccgagggagaggcggcagagaaaacgccggatttgggagccaccagggaaggatccgcgcaggggagccgccctccttggccccagacccgcctgcctggggccccctttgctcactgtcaatgtatggtctgaagctctgaggatggtgctggggactggggtcgggggaagcctcttgaataataactgcaaagaagaaagaggcgagaacgtctccctaaccttgaagcagaaaggactgtgttcttaaagctgttggctgcagtcacagggccagttgcccgcctctgttccctgagtaaagtgtaacatcttctgtcctcctggcttgcttgcaccattcagcaaattatactccttccttaccaaagtgggaatgctcagggaagtgtgtgtgtgtgtgtgtgtgtgtgtgtgtcccctctgcactgaggctgctgt

SEQ ID NO: 17111 - DNA, 961 bp, Artificial sequence
  DNA replication origin
agccaagggaaaggcaaggggtggggggagcgggcaccgacaggtacggaaccttcgcaggcgccggaaacggcggcccctcgacctccccctcccccagaaagtggcaacgaatgcctaagtcccccgaacctgccttttgtgggaggtgacaggtgaacggaattcaggtctggccactctcgccgctgcctacctccccaccatctgcttcctcgcagacaagcagacccggcgcataatgaggtagcagcctccagccggccaccgtgactaactcagaacaaaagcgctccctccacgcctcctccaacaaaggggccaccagccccggcgctccccgaaggctgcggggctcccggctgccggctgcggagctgccgcgcgcaaacttcccggggctcccggggctgccggcgccacggagccggggccgcggagggaggaagcgcaagccgcccggagaaagtgaggccagacccggcgggggagaggggagggagccgggcggccgcggaaggagggtgattgatcagtgcgcggtgcccggcgctctgtcccgttattagaggcggccaaagcagggccacgcaataacctcagaatcgccaactaattgacgctgcaggcaactacttcattgtgcgcgctggttttatgtcttcatagccggtgattgacaaggtgtaattagtcatctcactcggtgataaacatgggcaccctcctcccgcggcatcaggccgtgtgtaccagcagaggaagcgatagttgacgctgatataccattaaatcaaaatgaagacgttcagaagtgtgtgtttgctgtgacgctgtgatggtttatttctcaaatacggcaccaacagatttacttgatttgcaagttaactacaacattaactggttttatttattttgcctcttccttcctcttcctaggcagggatgttgctcttgg

SEQ ID NO: 17112 - DNA, 1463 bp, Artificial sequence
  DNA replication origin
gctttcacgccgcgggcatcgcccgcccggcttcagcgcccggggcgcaaagcaagggcgcaaactctgcccgaggcggcgacggctgcggtcggggttcaccctgaagccgctaggtgtccgcggcggcccagctgcctggacccctcccctccctggggtgcgcccccagcccaaggcgaccctcttgggcgctgagtcggcgactggagtaggggtttctccgaagcctgcgagccgagtcgagccaccgggagaattgaagaggaggaggaagaggaggaggaggaggcggaggaggaggtggaggaggagaaaaaagaggaggagcagagtgggaggaggagccgccggccgcgggcccagccgcgcgcaatgctctccaagcgcgcgcctagcccagccccggctctgcagtccgcgccagcgcaagcctccgcgccttttctacagccgcgcctgacatcacgtcctgccgccgtgccattggccgctcggcgccccaggccctggcagcgcgtgctccgggaaggcgggagacccaagagggaggggagaggcaagaggagcagaggagagtcgagatggtgggagctggtgggcgaggctggagggcgggggtgggggggaggcagggaggagggagagcgcggggtttggagtttttaagatacgaacagcttcctgcgatatcttcagaaaggaaaattaaaccctctatcctaagaaggcgcagcaaggggatgctcgtctcactgcggtctcccctcggcctggagccgcggcctcaggcacccgcctgggaggcccgggaaggcaggcctgtggcagagttgcaagagccttcggccggccgtttcccatcgagctccgccttcggcccgggctctgcacagcgggctgcaggcggccgtgcaagcctcctgggtacccggcagagcctgagtggcgagaccggcgagagctgtgactcccggggaggggggccagccagcatatccacgctccaagcccgctagggcccaatctgcagcccagcgtgtagcttctcgctcttcccggtctctccccagcctggaagagtgggggcgagcatggctttaggaactcagaaaggccagggttcgaatcctagctctgccatttacatgcactgtaaccttaggcagtgacttatcctcccttagcctgtttctgacctttataatgggcgacaagaagctctcctccgcatggacgtgttgattgaaagagactgtggatgtaaaatgcctggaacatagtaggcacttagcaaattatttcattactctctcttgctccttttccattaaaaactttctcactccaagacacattcgatatcagtgaggttcttaaaaaccacaggcctattctctgcccactgggcacaccatgtctcagaccccgctgatggcgcgagtcctccttacccgcctggc

SEQ ID NO: 17113 - DNA, 1754 bp, Artificial sequence
  DNA replication origin
gagagcgtttcttccgaactggaagcgaagtcccatccgcggcccggggcggctcccttctcaccttgcccggtgccggggtcgacagccccgcgctctcctccacctctcggctccggttgctggcggcgccgcgagcggcgccagggaagggcgaaccagctgggagcattggggctccagccggcttgggccgctcccagctttccggcaatcggggatcctcctcaacccccagcgcagtttcagaggccgaagtcttcggggccaacatttgtcgttgatcgcgtccccagacccttgactggtcagacttagccaggccagggctgggagttcaggctccggcctggccctcgccgaaggagactccatttggatctctacacctggctccgcgggcccagccccaaatagccagttcctcgcctcaggcctccctgggggccagacgagcagacactgcccgaccagcgggcccagaagtgacctttaggaggccgcggaggtggggagcacgggagaagcttctctgctccgggagcaggagcagcggcgccagtgtcctcccggcctctgagcgcttcttcggttagaccttctctgctggtcagtttggatagggaagtatttgggttgaacctgtccttcacccacggactttgagggtgtccctgcaccccacttacctcatccccggacccaagagggccccagcccgtgtggcagaggagccagaagttggctgacttgtcctggccttaacctctggtctaaggatccagggatcactggagctggggcccaggaactccgctgtctctccaaagaggattctgtgtggagggtgacttaatggtcaccttatcccccgggtggctcatttaagaagcagtttagggaaagctcttggagggcttgactggagtagctgtcctggtccctaaacacagcccgagcattttgggggaaaggacagggaggactggaaggaagagaggtaagcaccagagccatttaggccaggagcccggcctgggcccgtggctggcgagggctgcgcaggcaggcctgggttctgaaccgcccagaaatggaaatgggccttttggggtggggggaagcgcgccgcatgtcctggcagccccctccgcgttcagggtagccaaggccacagagggagttgtgggtgccggtttcccggcggcggaggggccgctggctgacgcaggcgctgctgtcttccgcctccctcccttcgcagaccatgccgtccatcagcagtgaccgcgccgcgctgtgcgccggctgcgggggcaagatctcggaccgctactacctgctggcggtggacaagcagtggcacatgcgctgcctcaagtgctgcgagtgcaagctcaacctggagtcggagctcacctgtttcagcaaggacggtagcatctactgcaaggaagactactacaggtagcccccccacccaactgcccctcaggacccctccccccaatctcaggcacagtcttacagtttggccctctcctttccgtttagtcccaggagagggttcactactcaggactcccccgctccccccccaagttctccaagccaccacaagttgggtgataaccttttaaagcagcaatttggggagctcttggaaaggtctacgaagtaggagaaccagaaaaaaagcagaagctgccctcctgctcggagcttagaccacaaaaaagcttgagttgggatcc

SEQ ID NO: 17114 - DNA, 1061 bp, Artificial sequence
  DNA replication origin
ggcggacgccagatctaggaagactgggctgggccccgagaggccggggagatgccctctttccccaacctagtcccgggagccccgaaagagccagccgcatagccaccgccggcgcaccgaacgccgtttctctcaggactaggagccccggccaaggtcggagaggagggcacgggaacaaacacgacacacacagagacagagatagagagaaaggacggagagaacggaaaggaaaaaaagagagagggaggccagagagaaagtgagatggctgaatggagggtgtctcttgtagaggttaaacaaggcttgaaattcagcctccagcccacctcgctggggcaaacggcggctgaacagcaaaaagcagaaataaatctctgtaccttctactctctttttgcacaatcctaaaaccggcgccgaacctccgtgcccaggaaaacaatacagctccccagccaccaggtgccctggagccgagccccgcgaggtgcttccgagtggaagttgacccacttgataaatagaagcggcttggtgttgggggagccggtctgaactcggttttgtctttttttggggggtggtaggagaggagggatggaagttccagagagctacatctgtggtagtgccttcagcaaatcttaaatccgcgccaccgaccggcctaccgctgcttcaccatttaccaaactgggggctgcgttttcctcccagttccgcacacagggacacacgccccatgatcctccaagcgatttcgttggagcgaacacccgcccctcatttccctctctattcaactcagattctttaagatgaaaataactgacttcttcccgccgtagcaccctctgcacagtcttgggtttgtttttgtttttgcttttttctgcttgtgcattagactaaagggaaaaggaagaagaacacaaaatctccaaatctaattctgttgcaaacgaaagaaagaaaataattgcacataaactctagttcggaagcccggagagtcataaacctttccgggccttgcagacttcgggcag

SEQ ID NO: 17115 - DNA, 1167 bp, Artificial sequence
  DNA replication origin
aacccatcgggtttcgagctcttgtcgctgggactgaacctgtaatcaaatctgacttcgcctcattttactaaagacgagattgtaggttcaattgtctaaataatggattggaatcaaatcagtaattacgccgccaggcacacacacacaaaaagctggggctgggggaggccgggcgtccggccggtccgcgcgggactcccgcggccgcggcgcgcaaacccaggcgcaaagtgcgcggcccgggcccctcgcccgctcctgccgccgttttcgcacccccagcccgctggcagcccctcccggggtagggggaggtttccgttccaccggggcccgggcccgaggggctgcgggaagaggccgctgcggccccgccccggaaggactttccgaccccgcggcccgcggctctgctgtaagcccagcgcccggcgccccgacggcgccccctccccactcggcccccagctcgccgcccttcagtaaggtgccgccgcgcctcggagggactgtccccagagcaagaggctttgcaaggggtcgtcgtggctgggccacaggatgtgggacactgccacaaacaagctcgtgtccccgtggtcggaaccctgcacgcacacgcacacgacccgcgcccgcacaccccgtccgcgatcgcaccctccagggtccccgctttccagtcctagctgccccgcggcccacactgcggccatttctctcctgccagtgcgggaggggagggaagggcggacgccagatctaggaagactgggctgggccccgagaggccggggagatgccctctttccccaacctagtcccgggagccccgaaagagccagccgcatagccaccgccggcgcaccgaacgccgtttctctcaggactaggagccccggccaaggtcggagaggagggcacgggaacaaacacgacacacacagagacagagatagagagaaaggacggagagaacggaaaggaaaaaaagagagagggaggccagagagaaagtgagatggctgaatggagggtgtctcttgtagaggttaaacaaggcttgaaattcagcctccagcccacctcgctggggcaaacggcggctgaacagcaaaaagcagaaataaatctctgtaccttctactctctttttgcaca

SEQ ID NO: 17116 - DNA, 896 bp, Artificial sequence
  DNA replication origin
ttccaatttaactggggatgctgcattttgcctggccacactacctccaaaggacttttactctgctggtgacctcccccttcccctgcccagatggggaagagccccttgcagagagaatttgcaagatacaagtcttgcccctgcctttggagctgttagctaggggctacacctcctaggggcctctttccaccggcactcaggtcccctcacccccggggctgcattcccacagagagcacgcccagagtgaagagcgcgggtccggcaatttaaaggggatcagaggatgcctctgaacctgatccaccagaactgcttggaacccgctgaggtgagcaacccttttctttcccccagtccccagctccactgggggtggggcagcctccctacggggtatctttgggcccatccctccaccgagcccccgcctgggcctggctgctgttaatgagctccgtggggaccccggcgcccccatgggcccaagggacctgccctgagtgccgcctaggtggggtagtagtgcgggggagggggacagaaagggcagagaaaggagagaaaaagacaaacacagaaaggcagaatggagggagagaaagagagagggggtagggacggaagatggacagagccaggaaaaagagaggacagacagaggaaaagaaagcgaaggagccaggagaaccacagagagacagctacaaagacagcaagaaatagggagagcggaggggaaagcgagtcccggaaacaggcgcagcttgtggcgagggtccggtggccgagctgaatcccggggctccgggagacccggtccctgcgggggaggccttttccgaagccgttattggcgggggagtagagaaaaggggaaagaaggggag

SEQ ID NO: 17117 - DNA, 1196 bp, Artificial sequence
  DNA replication origin
tttcagagcttggggtgggggtgggcttggggcggttccgggcatgggggtggccgcgggcctggagctgtaagaggaggtccctggggactggggagaggggggcggaagccggagccgaggtcggatccggcgaggtgggcagagcagacatcctgcgggggcgcccccagcccggaccgaggcacggtcccgggggagccggcccgggcaccgcggccatcggagctgggacgccgggtctggggctgcagagccgccgcaggggccggacgagggcgccccctggcggggcaccgcggcatcgccccgggtctctcacttcctcagcaggctgggtggggtcttcgcggaggaaattcccctcagggaggggtgtcggggactccggagagctgtttcgggctccggacgctttcctgggctccaaaactgggagtgacgcttttgagccctcacgtgtgccgcgtactgcattaggcagatggcagctcacggcacaggcattggcacgcggtgggtcccccagggtcctcttctcccttagcctcattcctcgggcttctgggcaggggtgttgggctcaagcctgagagggtcctccggtatggaaggggtgagggttgtgcagctccagaccgccatcctgggtgcccccagggctcactctccctgcgggccccccactcccaggactggaccctgtgtatggcgtgtgatgagtgggggtggggctgcggtggggctgggtggaggtctgtgatgtgtgctgctgtcagggaatctgagtgtggctgtgccgtggtgttagtgtgggagcgtctgtatgtgttgagacgtgtgtgtttttgtttatttttagggggatgtgtacaagtatgtccgactgtgagtgcgtctgtgatcagcggtgtgtgtgtgtgtaatcagatgtgtgtgtactcagatgtgtgtgtctgtgttcagaggtttgtgtgagtccgtgtgatgactgttcaggtgtacacagctgttcagggtggcttctgctcgtgtgatgcaggttggggtgtgtgttggggctgaggggtgagctgagcctgcctgaggagggagcgaaagccctaatcaatttccacctaacagaagggtggcggcccccctgtcctgtctgcttccctcagccccatcaggaccaatattttcctttcctgtct

SEQ ID NO: 17118 - DNA, 1419 bp, Artificial sequence
  DNA replication origin
ctctcctcagacatgtcttaaatgcctactgtgtgccaggcctgtgctgggcgcacagagagatccagggtgggtctgaactcaaaaacctcacactctaatgaaggaagtggaaacataaaaaacagcccttcaaacccagcttgaccactgaggcagggagggcggtgcaggggactgtcagaggccaggaaaggtggctagtgcagccccttctctactaaaaatacaaaaagtagccaggtgtggtgacatgtgcctgtcatcccagctactctggaggctgaggcacaagaatcatttgagcttgagaggtggacattgtggtgagcccagatcgcaccactgcactccagcctgggcaacagagtaagcgaagcgaagcaaagagggaggagaggagaggtgaggggaggggaggggaggggaggggaggagagaggagaggagaggagaggaggaaaatgtagggatccaaacacggtgggctatgcacgccaggctgaagattctagatttttcctaaaggcatccatgcagtaccataaaaaatttcaagcaagagagcaacaggtctctaactacaggtacccaaaagaaaaaacatgctaacaacatcacatgcaaatcttaggggtggctccctgtggcctccagcacatggaaatggctccagagaaggccatgcagcagagaggtacacagaagctgtgcagtcaaacagatctgggtttgaattttagctccattattttattcatgcattcattgattctgtcagctaacaaatatttcctgaacacctactatgtgccatgtactgctcggggcactgggaatacatcagtgaccaaaatgtgaagcccttgctcccctagagcttgcatcctgccatacccagtgaacaagctcataaacgtgtaacatgccagacagtgctgagtgccatggagggaaatagagcagagaaggggacacagagggaaggagggatgcttttttagaccaggtggtcaaggatttcttgaggtcaggagtttgagaacagcccggccacatttcagtcactgatgtattcctggtgccctgaagtgaagcagaaacgtggaggcagtgaggaactgacctgtggcaatgtccttggcaatgggaacagcaagggccaaggcttggaggcatcatgagcttgtcattgcttgaggagtggatggaggccagccagccagagagcaagggagggagggtgacagcagatgaggcagacaggggctgtgtcacagtgggccttgccagctatgttggcggcagtggtggacaggctcagagctgatttccagccccttccagagggctggggccaaagaaccagaagccacagttcccagacattgctggtgacttggacctagaatgcccaca

SEQ ID NO: 17119 - DNA, 905 bp, Artificial sequence
  DNA replication origin
cgcttctcccccggcagagccaagggccagctgcctggagagcaggacctgccggccgcaggctcattagagccctcgcagacgcccctctaccgggactccccacccagggtctgagggggagtttgacacgagtctaaaaatagctgctgttttgttcctttgttggaggggaggggctggcagagggattcgggctcctcttaatgaccgacccaccaagaacaaaggcttttctttgcgttggctctgcttccagcagcagcaggcccccggctccagtatcatccttggggctcaagtggaacccaagctgctcctgaagagccagcttgagggcaaaggcaggcccaggcctctgaccagggcagccccagcccaggctgaccggcgggcacatggtgggcagtggggtctgtgggcagggctctgcaggggaggggtctgcctgtgacactgtttgtgatgtcagaccccctggcaaggctgggggcggcaagcatgggacggcaaatgactgtgcgtggctggttgcaggcaggtgactctgtgggattgtgtgtgactgtgcctgggacactgcgtggctgtgtgcaggcaacaccatgagggactgtgtggacgctgctgtggaaattgcatgactgtgcctgtgacactgcgatgggactgggcgtgagcaggtgaggtcgtgagtgactgcgtggctgtgcaggtgacagcatgagtgagtgttggctgtgcatagtgagactcgctaatgggcaggtgacgttgtatgtgttggattgacatggggtgatggggctgatggtacagggaacattctatgtgactctgtgactgtattggtgacactgggaggtggggctaactgtgcaggtgacattgcaagtggccctggg

SEQ ID NO: 17120 - DNA, 1183 bp, Artificial sequence
  DNA replication origin
gttccagaagcccagggctatgctgttcctgaggcagggctgcctagtgattggccacacaggcactggaattagacaatctgccgtgcactttccagctcaaccacttaccatctgggtgactttgaacaaaagaatttgctttttattgttgttgtccaggttggagtgcagtggtgcgatcatagctcactgcagctgctaactcctatgctcaagagaccctcccgcctcagcgtcccgagtagctgggactgcaggcaggcactaccacacccagctaattcttacatttttctgtagacatggggttttgctatattgcccaggctggcctcaaactcccagcctcaaggcatcctcccacctcagcctcccatagtactgggattacaggtgtgagccaccgcacccagcctgaaatttcatttctaagcctcaaagcccatctgtaaaatgggcacaagggtaacgttggcacacgtggtggacgctccgttggtgtcattattacagatcacggccagttgaagcacttccactcatttggcaaacagaagccagacgggcattcaccctgtgcccagtacagtgctgcgcccaagcaggcagtcagtgtccctggctccagccctcctggggtgcagcacagttttgaatgtggaggggaggcagcaggggtggaaacagcccagccaggagcggccgctctcggtgcggggaggaggtgaagtgagaactgagctgcttgggtctcagggaggctctgacttctagagggggcgttcaacattctttagtggggacttttactacttccagaaacctctgcacattggctcttgctggtcccccgggggccacaggaagtgggagctccagatgaagagtcgctggcactttgagggcagggggcagggccttcccctcatcggaatactcttggagcctacttcagtgcctgcattcagctggtgcacaataagtgcttgttactgtgccaatttcagtatgactagggctgtggtaggagcaatgctaggcgatggggaatccgaagacgcacaggagtccaagggttggctgactgcagaccctcatcataagtctagagccggagaagatggggagacgccggcctgcgccctgtgagtctgggcctcagtcttcccatctctgaaat

SEQ ID NO: 17121 - DNA, 1619 bp, Artificial sequence
  DNA replication origin
cgaggggtccaggcccaggaaggacgccgccggggcgccccccgcccctcaagcttgcgtggcggcagcgcgcacgagcgctgggggcggcgcggccccgcggcggggaggggcgggcgcgcgggcgcgcgggcccgcgcaggcggtggcggcggcggcggaaccgagctgacgggcgtgcggccgctgcgccgcaaactcgtgtgggacgcaccgctccagccgcccgcgggccagcgcaccggtcccccagcggcagccgagcccgcccgcgcgccggtgagtcgcctggggctggggccgggccggtggggccccgcggcccggagaagggcgggggccgggcggcggggccgtcacccccagccgggccgagggcgggcgcgcgcccacggctccgcgggggagagcgggaggcgggcgcgagtgtggccgcgcggggctgagcgtgtcggcggccgggcgggcgggggcggcgtgtccgcgtgtcccggggtgtgcgcgtccccggcgggtgtgcgtgtgcaccccggagcgtctggtggcgttgttggggtgagtgcgtgcggggacgcgggcatggctccccgctacccacttcccgagtggggacgacgggcggaggagtgtgccgggcgccgcagggagtacgtgcgggtctcagggagtgtgtgtgtgcacgtgtgtgcattccaaagtgatttgtgtgcaagcacatgcgtgagcctagaagggcgaaagtatgcctgtgtgggtgtgagtataacgagtgtgcagggccgtgcgagcgtgtttattactgaggttgaggggccggccccctttgcgcccaccaggcctttgcacagtgatggcccccgagccagggagcccgtggagagagaagcggcctggcatgggctgggggtcggggctgggcctgatccggtgaaccaggggccaggagggcagactcagagcctggctgggcctgacagaggcaaaggtcttagagccaggctgcggcagggccactggcaggaccctctctgcatacacaggctgggcgagcggaggctgtggtgggcccctcggccgggcacccgaggacgtgtgttttcctaaatatcctccaggctctcctgtctttgttcttgtctctctccagccaggcctggggggctgaccctagacttgcctgtgtatgtgggggcctctctgcctgccctgctaagtagacggatcttttgatttatttatacctctcctaggctccaagtgtgaatcccaggacagtaacaaattgatcacagcgggcttgggacaccagcttccgaggtctgtccttgcagttttgactgacaggcttttgtgtgtgtgcgtgctctctaactgttgaaaatctttgcagctgaaagtcttaattgctttaaggcaaactttagaaattccagagctccctagttggtctgacttttccaaattcagcttgccttttttgggggaaaatgtcgccttagtttggtgtacagtacgtgcaggcaggtcttggaggcacgtttaaaaaccctgtcgttaatggaagaagaatttcattgaaagggacgcagagccgtctggaagcgcctgccccggactca

SEQ ID NO: 17122 - DNA, 864 bp, Artificial sequence
  DNA replication origin
tcacacctgtaatcccagcaccttgagaggccagggtgggaggatcacctgaggtcagtagttcgagaccagcctgaccaacatggcgaaaccccgtctctactaaaactacaaaaattagctgggcgtgatggtgtgtgcttataatctcagctactcgggagcctgagtagtgtgtcagttcctccctgccagccagtctgcctgggcgtggtagtccttccagcccctgggcttgtgctaagtttctttctgtaattgctccatctggctggtctgagaagcaggttcaaatggcaggagaatcacttgaacccaggaggcggaggttgcagtcagcagagatcgcgccattgcactcaagcctgggcgacaaagcaagactccatctcaaaaaaaaaaaaaaagtgccgagatgaaggagggtcgagagatctggtcctggcagacaagtgggactttgcccattgagaggcaccgatgggtctttagtccaaggctggtgcatggaatgacatggaaggaccagggtgctgtgttgctggggagggggaccgctcatttaatatggctgcacgcaaggcctgggggatgttgggggcaaatgcatgagggcaggctcgtgtcaggtggtcagggaatggcttgctccggtgtgcggaccttttgctgtggagtttcaggagagattggcaggttcaggcttgtgtgttaggaaaacctttccatggtgggctggaggctgggctgcaggggagtgtggaggctgaaggtaactgtagggacccaatgagaagggacaaggccagcacagagtggaggccctggggtgagtgaagacatttggaggaagaatggttggga

SEQ ID NO: 17123 - DNA, 869 bp, Artificial sequence
  DNA replication origin
cagggctgggcggagccaaggacactgggcttggagtcattcgggctggatggggctgaacccgcccatgtctatggcctgctgagtcctgtcctcttgcagagctcttttcgtcatctgcgcaatggcaggaatgagacggaaaccagtgaagcgttcctcgcagggcctggtatggtgggggtggaactaaatgttactcttcccctcctttgcattctaggccagtgcaccccttggatcacagacttgcttagctgggggactgggaccctccctggggggatccctcataccaacctggggcccaagggttccttgattcacctggggagttggagggggtcccagagagactcctgatctgggagagaagaagacaggtgggggctgggacaaccctcccctcacacttgcagttgttgaatgcctactctgggggtgggtgggaggggggcattcagtggaagctgcagactctgcagtcagacctggattcaaatcccaccactcagagtgtgatctcgggagggccctttgctgccctgagccttttccctgtgtgaggagtaaacaggctgatgagtaagaggggtcacccttagtgagtgcttttattccgtctgtgccaggacttatcttggataacatttgcagtgaccttatgaggtaaggatggccacttggaacccttgaagctgtgagtccccttgacttcctcccaggcactgccctcccagaagtgaaggtaccaggaggcagaggaaacagtagcaccacggtgccatcctggatccaacggagcaggtgacagacagcaggggtcacaggcaggccaacttggactgaggaaaaaaaagtcgcaggaa

SEQ ID NO: 17124 - DNA, 1570 bp, Artificial sequence
  DNA replication origin
cagtgggcagcagcgagggcgtgacgtccagggcgcccgggtcccagcggaagagcaggccctctgagggcggcgcgcaggcccgtgcccggtgcagctgagcggggctcagcgcccgcgcccacaggtggaagtcggtgaggttgccgctgagggcgtgacgcaccgagaagccaccgcccagagagtcctgatcctggcccagcaccaggatgccgccggacggcaccgggtggccggcgcccagcccccgcgccccagcgcgccgcctcccatcggagaacagcgcccagcgcccgccccgctgctcccacgtggcgcacacatggtgccagcggccgtcggcgcggaaggctgcgaggaagggcgcgtgctgcccacgcaccaccagcgcagcgcgcacgacgccccccggctcggcgaaggcgcgcagctgcagcgcgttgggcagcgcgggcgcggcaacggagaagagcgctgcggggtcgggcgaggcacagtcccactgcacgtgagtacacgcggtcagcgctgccagctcaggcagagggctccgcagccgcgccgcccggtcagccgtcctctcgtcgaacaccagcacggcggtggtgcgcgcacctgcagggacacgtgggctgcgacctcagtttcctcacctgtgcacatggtcctgcccctgccctttggctcagcggtggggtccttccaggctttgggatgcctccccacctcgggaaggaggaaatgggggctagagttcccctgcccaagagtcaagccccgacgcccagtccagggcaaaggaacctggagatgcaatggggtcttactcccggctcattctgcaaatattgtcactgtgggctcctatatctgaaggtcaccagagcctctgccccttgctcccatttcccaggggcccacactcacgcctctgtgggggtctccgcagaggggcctctctttggcccacccagaccggatcgcgcagccgtgaagcaagaaccccatcagggggctgcagtgccaagtggccaaactgctgctcgcaggactcttgggcctgccaccagctcagtcgctgtccagagaacttgcacaccccacctgcagtcttcaccacctcgccggcggccacgggggctaaaaacgataagagagacggtggggggtgcattttgtgggcatctgactcttccagggctgggcggagccaaggacactgggcttggagtcattcgggctggatggggctgaacccgcccatgtctatggcctgctgagtcctgtcctcttgcagagctcttttcgtcatctgcgcaatggcaggaatgagacggaaaccagtgaagcgttcctcgcagggcctggtatggtgggggtggaactaaatgttactcttcccctcctttgcattctaggccagtgcaccccttggatcacagacttgcttagctgggggactgggaccctccctggggggatccctcataccaacctggggcccaagggttccttgattcacctggggagttggagggggtcccagagagactcctgatctgggaga

SEQ ID NO: 17125 - DNA, 1227 bp, Artificial sequence
  DNA replication origin
tggacgtcacgccctcgctgctgcccactgtgtgggtgcgccttctctgtcccggtacgacccgccccgccccggccccaccccatggccccgaatccttcccttccgaccctggaactcgacccaccccttgccaaccaagccacgcctagctctggccacgccctctccaggccgcagtgcctgcaagctccagcataaacctggtcccagcagcctgggggtctgcgctcgtcccccggcccccttacccccaccccgagctggcaacagtgtccctctctcaggtttcacattgccacctaaccccggggccgtgcgtcctggctcgccagggtcccctagggagccctgacagctcccctgcccctgccagtgccctccgaggagtgccctacgtggaacccgggacctcgcagtgagggctctgagctctgcctggagccgcagcccttcctctgctgctaccggacaggtgcgccctggctgtacccctgggctctgctgaagggaaagccggtgtggaccggagtagactgagagggggtgagctgctggcaaagtctgggaattcagaataaactcagagcttcaaggtctccatggagtctaggccacagagcagtgggtccagacggacctaagggtgaatcgaaattgtgtgaccttgggcaagctcttttgccattctgtgcctcagtttccccatctagaacaccgtgtgtaagactctggacacacagccatcaaggtgctcttccttccctgggcagcacgtggtgggtggaggtcactgaacaggctggcatctctgggcaggggtattgcccggggcctagcctggcatccactcctttgcagagccctatcgtcggctgcaggatgcccagtcgtggcctggccaggatgttatcagccgagtcaatgccttggccaacgacattgtggtgagctccctctcaggggctggaaagcctgggggctccatgggtcacctcgctgcacctcagtttcctcccttgtaaaggggacacccacctggtgtgtctgcaggaataaaggccattcaggctccctattctgtagcccctgagagttggcggcttgtgacaagtttaatgggtgcccaccaagaagaccctggcaaagcccaagtgtggcccttggggggatcccctcataacaaccagacccagagtcagtggctcctctgtccacagctcctcc

SEQ ID NO: 17126 - DNA, 726 bp, Artificial sequence
  DNA replication origin
attaccacacgggccaggatgcaggtgttggcctggagacctggggtcagtgggcaagaggacttccccatccccaacacgcccctcccctgcaggtccccagctcacagtcagcacgaagagcacaggccccacgaaggcccagatggcatttgtgtgcacattgagccagcaatgtccgggggccacgtagtcatgggggagcatggccagggtgaccgccacgatgcccacaggcacgcctgggagagggagaagggggcctcaaggctgggtcacctgctttttcctctccaggacccaggatccgccccccaagccgcagctgtcccctactggaggttgtactgggggcactggggaggtccaaggagcagggctgggggctctgatgctgttggggtggcattggagccacagtagtttgggagtcgggagagctgaggctgctttggaggctacagctgggcgtctctggagacggaggctgggcaactggctggctacagatttggggagatagcactgcggatggagaggggaggctgtaaagtggagaaggattatgaggaatggggatgggtaaattggaggttaatagaactgaggaaattgaggtcatgtcagagatgggactggctgggtggtgctgggttctgggtgacgctaaatgccggatgctgagtggtgctgggtgctgagtgctgggtgtggggccatgttaga

SEQ ID NO: 17127 - DNA, 739 bp, Artificial sequence
  DNA replication origin
atgttttaaaccaggggagggggcatggtggggtcaaatggtggggagacatgaggggtaaggctggcgagaaatggggcaggagggagtgtggggggcagacagagtggggtcctcaaagctgttgtaaagagctcagacttggccaggtgtggtggctcacgcctgtaatcccagcactttgggaggccgaggcgggtggattacctaaggtcaggagttcgagaccagcctgaccaatatggtgaaaccctgtctctactaaatacaaaaaattagctgggtgtggtggcacatgcctgtagtcccagctacttgggaggctgaggaaggagaatcgcttgaacccaggagttggaggttgcagtgagccgaaattgtgccattgcactccagcctgggcaataagagtgaaaactctgtctcaaaaaaaaaaaaaaaaaaaaaagagctcagattttgtcccaggggtagttgggagccatgcagggcgtcaggcaggtgctggtgttcttgggttcgcatttggaaagatgcctttgggtggtaaggagtgggtagaaggaaatgggatggagaaggcagtgcagaggctacagagaaagatcaggctgggcctggagacctgggaggctttggggtctgtcttggagaatgggggtggtggtatcatctcagttggtgcctggacaccagggggaccagtcaggctcttggactccagctttcagccctggga

SEQ ID NO: 17128 - DNA, 1625 bp, Artificial sequence
  DNA replication origin
ggggagaccctggcccgtcctcgctgtgagtctcagcttctccatcctcggaacatccgcatgccctgagggctccgcggcctttcaggaggggcggtggcggccccgcgaaggacacagcccggcagcctccgctgccccgcgcttccagctcgggccgctgagtggcccgcggggtggggtcggggctggaagcgggggcgtccggagagccgggccgggtggggggtccggagggtggggcccaggtggaagctgctctgttgctacgagcggccctagcaacgcacccattcagcggagacaaaggcgccgtcacttgagcgcagaggcgccgccgctctcttgttcctgcagccgcggcgcccgcgggtgggggcggggcaggtgggggaggggcgctggccccggggggcgcctgggcgggcctgtggggggcgcctccagcccattctgcagaaagggaagctgagactccccgggaccgagatgccagccggggatgggggctggtcggggcctgggatcccacaacccgggttcacgcggctctacgtttacacccgcgtggctactgctgtgcctgcagtcccccatctgcgccagtggggacctggctctggctctgtgcgggctctggctagcggctgcgcctttctgtgcctcaacttcctcatccgcgcaatgggtggagaaaggcacctccccctccccctctctgaatcagaatcactgggtgcctgggctgagcactgaacctgcccctgggaggggcctggtgaacagcgctcttgccttcgctggaaacagtcacctggcggaggctgaggcgtgtgggtttcagatggagtgctccctcagggaggcggccagcggtcagggtccgcatggctcccctgggcccggctgagctccccaggcttcagtcctctccctgagccggagctggggtgtcctcaccctcccacagtacccaccctgccactgctcagcccccgtcatgcccccatcagctgtccagctggtgacccgcagccttggaggaaagcacttctccctcagcgggtttggaaggctctggatcctagggcatcaggccggggccttcagagggtgacggggggtgctgggcttagggggcagaaagagggggaggacagagaaaggcaggctgtgctccttggcagcgcccccctgggcagagagaggggaggacagagggaggcaggttgtgctcttggcagcgcccgctcagaatagggttccatgacctactctctaatgaagtcctcccaaggggtactgcctggtccccgccaggcccccagtgctcccaggggacctgtggagtgaggggagggcctctgcaattgcgggaggttgggcgtattaatttgaaatcacttccatcctggtacggggggcttagggggtgtccaggcccaaaaagaaaagaggggaccccgtgaggtggggactgtacctgaagctttgaacgctgtcagttccacagcctgaggacagaggggctgtcacgggggtggcccccactccttctgctgccccttgccctggggacccttggctataggggcctctgccagcttgccgccagcagctccccc

SEQ ID NO: 17129 - DNA, 1203 bp, Artificial sequence
  DNA replication origin
gcttctcactcagccctgccccacctcccgggagctgcttggaggtcctggctatgctgtgtcacctgtcacctggccccagcaagatgtgagccaggctggcatcggcaggacagtgttggctgcctgggtgcccccactcccagagtctgggccctcatttccctgccgccagccttggggtccaccctggcaccaggcctggtgcagagccctcacatccttgctcccctccctgctccgaaacccattctactgagaagagaccaagattcagaacgaccttgcccacagccacacaactgtggcagcaggtcctggttccatggtgtgacttggaggtatccagactcacaacttacctgtgagctgtctgcctgggtggcccccactcacaccaaccgtcacccctgccccctgtgctacagggcctgggagaccccaggcctgagtggtatgagcctgtgtcctcctctgcacagcaggagtgatggcggctcaggactgcggtgaggatccatgactctaaggtggtaaagggctcagcaccgtccagggatacagcaagcgctcataaatgctggctgcgcctaccctgatgatgaggctgaggccctggagtcccaaagccaagtggcagcttctctggtttcctccctcctcccagagggcctggcgtcccctccctctgcccaggccaggacgactcccagaggacaggagagcccaacagtcctatttattaccagacacggcagagcccgttggaacttcggagcatgggggaaggagcagatcacagataggcaaagactgggggaaagagcctggggacctggtgggctaggggaacagggggctgaggcccacagtcctttagggaaagccagaggctgaggccacgggagctggggccgctgttggggctcagggactcccgctgcgccgttctggggtctggggtcccagcagagctgagctgggcagggtttggcgacgagtttcccagccactctctagaaacctggtgggaaagtgcgcccttggggctgggctggcagaggatcctggtggagaacccggggatggaagggctctgggaactgaggcttggggagaccctggcccgtcctcgctgtgagtctcagcttctccatcctcggaacatccgcatgccctgagggctccgcggcctttcaggag

SEQ ID NO: 17130 - DNA, 1068 bp, Artificial sequence
  DNA replication origin
ggggccaggtgacaggtgacacagcatagccaggacctccaagcagctcccgggaggtggggcagggctgagtgagaagcagccgagacccagtgaggcacgcacagctcccagaggcctccagcttccacgctggaccctgcctgggttgagtccgggacaaaatctgtccagggtgctggccccacccacacaggtacagggcccaggtgcttcttgctgaggatggctgcgtagcctcacgatgccccatccgtcttctgtcgaatgggggacatcatactcacccagcgggtcatgtgaggggtccgcgcagtcctgcacttggttcctggcacggccctcagcaagcactcagagtgtcagctgtggcccgagacagatgttcggggctgtgggggccagagcctgtgccccagaggacgttcaaggccttgaaggcgccaggctggggaggcagtccagagagaagacagcatggctccgtggggccagcagagcccctgccctgtgctgggaacgctgggccaagtgcggcactctatcctcagcggggacaggaggggcgggacgctgaaggggcagcaaggaggcaggcagggcacttggtggccccccgaccacctacatctcagcatcttcaccttcaacaggctcctgtctcctcaaaaacccatcatatgggctgtggggaaggggacaaaggtgggaccaaggggtcctttcccatcccccacctccctccattccatatccctcttgtcccctatacacaccctctctttactctccagccagagtaacttctcctagatccccagacacggtggctgatacccctccatccttctgctcacactgttccctctgcctgaactgtccccagctcctatctagctggtgaactcctgggcatccttcaaaacccaatttggatgacacctctgctaaaaagtattcctgttccccagacccatctctcccaggagcagggtcaatcacttcctcaccttgtctgtctcaggcatatatgcagtatcacatcagactacagtctggtttaagata

SEQ ID NO: 17131 - DNA, 934 bp, Artificial sequence
  DNA replication origin
ccaccctgtgaggcagagatgaattttcccctgttgtgcagatgacaggaaactgcagctcagagaggggaagtgacttgcccaaggtcacccagctggttgtaaagccgggatctgaacccctgacacatgaagggggcgtctccaggtttgtttgaccccgctcccgtgtctgctggaagaacggtgtggtgttctgtgcgttgctggcaccgtcacatgtgttatccgctggaatcttcacaatgatctctttagagactgggggttcagggaggcttggggaaggggagtgacttgtacaaggtctccagatgaggaggaaggcaagtctagagtccagagtagcctctctgggggaatcctagaaccccaggggtgggggatctcggacagaactcatggatggcatgggacataaagttatgtccaatcccacaggaacatgcatcccagcttgacccagctcctgggcagggggccccagtcctgcttgcctatcatgggagacttgggctttggtgtcagagagacttgggtttgaatccaggctctggcaccttgtgtgtcttgagggggccctggttccctgagccctggggatgcactgccctgcctgtctggatgtctgctgagatgaaccgagctgggtgcaaggtgcctggggggtgcccgggaaactgggtctgggcttctggactgtagccactgaggctccgttagcgactgtgcttccctcccccggccctgtggctgacctctgggggcagtcgggggtttccaacctgctgagagctgggaagccatagaactgctgggggtgggggcatccctgaaacctgtcctccttctgcacccacccccgcacccccgcttcggtgtccctggcgcagtgctgctgagaacagtaaatcccggtaaagccgaggccctg

SEQ ID NO: 17132 - DNA, 806 bp, Artificial sequence
  DNA replication origin
ctgagttgaggggagaagggtgcgtgcgtgcgcactcgtgctgtgtgtgtgacagaagcaaggtggcacagcgcttaggaaagggaactaggtggggatgaggagtggattctaaatctggtctctggtctctttctggctgtgtgcccttgggcaagtcactcccctctctgagcttctatttcccccatctgtagagtgaccctcctagtaatccctaacttgttacaaggattaaataagagaattccccaaagtgtcccagtgcttggctgacccctgggaagtgtgtgtcggaattgttttaatcataatcaccattattaagttaatgtgcatatgcgtaagtgaaagaatgaagtgaatgaatgaagcagctcacagtctccatctgtatcattgtgtctggcacagtgccttatccttgggcacaggaacatgggtctggctgatgtgggtgggtgagccctgagcccagcaggccaggaacctggtgaggttgggggtgccagaggaggaacaggaggagattccaggaccccagctgatggcaagcagtgagagagggatgtagggggctgcagaggcctttggctggccagttccaggttgggagaggaaccccatcagttcagtgtgatcagggttgggtcagaggggagaaaccagcaccacttggctatccgggaaggcttccggggggtgggggctctgagctgggcctagcagtatgaataggagcattctgggtgaaaaaaaaacaagcagcactaatagctttccagactcaaggaacagcttgcaca

SEQ ID NO: 17133 - DNA, 850 bp, Artificial sequence
  DNA replication origin
ccccttagagcagggaatgaggatctggggagtagaaagtccagatgcagcaggggtccggggagagctttaggaggaggagggacatggccaggtggtatctgaggaggcaggcggaggggtcaggatgggaggtggggggccagggtggggacacgggggcacagccacggaggaagactcacctggagagatgggctgtagggaaagagagggagggggggaggcagagaagggggttgatggccagggtccagcctgctggcaggagtgccactctcaggtggggacacaggaagggccgtggggtcggtgggtgctgtggggtggggaagacagactctgctcccagctccagccctcccaggcccccactgctcatctccagctctctcctcggtgtcacaggccatcggggcaggaggacgggacgggcagcactggtcccaggggggtgtctttggggctccctgtgagcgcaggtgcctgcagtctgcatgaagtgtgggtgtccgcaggctggctgagtctctgtggccatgggaatgcctgtttgtgtgtgtgtgtgtgtgtgcctgcctgtgttttattgtgcaaaatctccacacacatcagtgtgtgggtgtcactgtcttcccatcaacccgtaaatgtgatcacatacatgggtgtatgtgttgccgtgagtgtgagcgtacaagggcgggtgtggccgtgtgcacacgtgtgtgccttcacttcacagagtgggcgaccccatgactgtgctcgtgtgtgtgtgtgtgtgactctgagctgagctgtgacccagcgtgtaggtgtgaacatgggggctctgggaagccatgtg

SEQ ID NO: 17134 - DNA, 900 bp, Artificial sequence
  DNA replication origin
cagcatcctgctggtcaccgggcaggaggtgaccagtccctcggccccgcccctgggccccgccctggccccgctgtgcacttccaggattcagggccccggagaggaggacccaggcctctcggggctggctctgggcaccctaattatcagccctttccccacgttcatggaacacccactggcccaaaccctctgtgagcagccctggcccaggcttgagaggcgccggcccctgggagccctgctcttggggagcagctcagggggtgtgggcatggtgaggagaggctcatggaggaggaggtgatggtggccctgggtctggaaataacacactggagttggctggggaatgagggatgaggggggcagtccccacgtctaccgcaggctcagagagggtggaagtgtggagcccccgggccctgctggtgccggtgtgggggtggcatgaggtgagagatgagggaggctagggggttgctagtgctggcttagcaggcaaaccttgcaggccctaaatctcgaatgaatgaatgaatgaatgaatgggcaaagggctccagagagctcagagtcggaatttgggcccccttagagcagggaatgaggatctggggagtagaaagtccagatgcagcaggggtccggggagagctttaggaggaggagggacatggccaggtggtatctgaggaggcaggcggaggggtcaggatgggaggtggggggccagggtggggacacgggggcacagccacggaggaagactcacctggagagatgggctgtagggaaagagagggagggggggaggcagagaagggggttgatggccagggtccagcctgctggcaggagtgccactctcaggtggggacacaggaagggccgtgg

SEQ ID NO: 17135 - DNA, 1425 bp, Artificial sequence
  DNA replication origin
cagtgggggacaattgaattgcccccaagaaacccaggcccctctttgcctccctaccctcaaccccagctctcagcccagagaggaggaggtaagttttggcaggaaagatttgagcttctggaggtggccggtcactggactgtgtgctgaacaggcagtggttgattaaggtcttggaacagtgtagaaagccccaggtggctctgagagtggtggaccacatgccctgccacctggagaaaggactcctggatgggagaggggacatcctgtcctgtccccagagcccatgcccctagtgccaggtcccaaggggccagatagctggctgttgtgggcagtagaaactcccgtgcagcctgcgagcagcacagcgctgcccaccccagggggcaggaagattggccaggcagccccccagccatcatccctgctgagcaccaccaccccctctctcctgctctttcccctcgcccagatcccagggtggggccctgtctgagcaggggcggggggcacactccagctgcagagatgtacctgttgggtctggctgatgacacattcctcgccaggcggaggagcttctagtcggcaagagaggtcccctcccccagcatagagccttggccagctctaaacttggcttcacattcgcagccagtgaaggatacttgagtcattttgaagcaggagctcaacagtcaggcagtcagtcaacaaacagctggaccctggggccagcggtgaacaaggctgaccagggtccccttccggtcaccatctccctgccaggccttatgctagacacctgagcccagaacttagcccgcaggagcacatggcatgatccactcagcatgataagagtgggcaaggacagggcacctggggcaaggacagtagagcccgtttgcatgaatccaggagtgcttcctggaagtagtgacattgaggctgggtgttcagcaagcacaagagaaaaaaaaaagtttgagtcagaaggaaaatgaaaggcagggtggaggaggaaggagatgtgtcaaacagaggagtggaggtgagttcggtggagtggaaggagaggggtcttagcagggattgcctgaaaagctgagcagggccttgaatgccaggcaaaggagactgacttcccctgtggtcagtgggagccatgaaagggtgttgagcaggggagagagcggtcagatttgtttggaaaggatctgtggtggggcagcatggaagggggcttagagagggtgagtctgaccctctgcccctgcccacagccgtgcgcgctgaccgtatgaggggtggccggaacaagtttgggccgatgtacaagcgggaccgggccctgaaacagcagaagaaggcacagattcgggccaatggcttcaagctggagacagggccccc

SEQ ID NO: 17136 - DNA, 1064 bp, Artificial sequence
  DNA replication origin
aggcctggcagggagatggtgaccggaaggggaccctggtcagccttgttcaccgctggccccagggtccagctgtttgttgactgactgcctgactgttgagctcctgcttcaaaatgactcaagtatccttcactggctgcgaatgtgaagccaagtttagagctggccaaggctctatgctgggggaggggacctctcttgccgactagaagctcctccgcctggcgaggaatgtgtcatcagccagacccaacaggtacatctctgcagctggagtgtgccccccgcccctgctcagacagggccccaccctgggatctgggcgaggggaaagagcaggagagagggggtggtggtgctcagcagggatgatggctggggggctgcctggccaatcttcctgccccctggggtgggcagcgctgtgctgctcgcaggctgcacgggagtttctactgcccacaacagccagctatctggccccttgggacctggcactaggggcatgggctctggggacaggacaggatgtcccctctcccatccaggagtcctttctccaggtggcagggcatgtggtccaccactctcagagccacctggggctttctacactgttccaagaccttaatcaaccactgcctgttcagcacacagtccagtgaccggccacctccagaagctcaaatctttcctgccaaaacttacctcctcctctctgggctgagagctggggttgagggtagggaggcaaagaggggcctgggtttcttgggggcaattcaattgtcccccactgcccggccccctcagggcctggctaagaacatgacgggaaggaatctcactggctgagccaataaaccagagagccctttggatggacggacagacaagcagatgggcagctgaatgtgtgggggctgggcggtggtggtgggcagatcctaatggaaagcgtgatgggcttgacagctaacctgcggcaatgaacgcctaggcaccttcagcttgcctgcaccgatccccacactcactcactggaggaaggcgctgccgtt

SEQ ID NO: 17137 - DNA, 1078 bp, Artificial sequence
  DNA replication origin
gtctccgccggccctccctgacccgctgtccctccgcaggcggacgccgcgggcatggactattcgtacgacgaggacctggacgagctgtgccccgtgtgcggggacaaggtgtccggctaccactacggactgctcacgtgtgagagctgcaaggtgagcggcgagcgcgcggcaggggtgcggcagacgggcgctgcggggcctcgctgactctcagctcccgcagggcttcttcaagcgcacggtgcagaacaacaagcactacacgtgcaccgagagccagagctgcaagatcgacaagacgcagcgcaagcgctgtcccttctgccgcttccagaaatgcctgacggtggggatgcgcctggaaggtgcgcgccgcgcgggcctcgacccctgaccccccacagcctgagggggtagggggtgggggtgggagaggggctgaggggatagtaccattggccttcgcgaaggcccctcgtgcgacattagggcccagtcgctgcaagagaaccgggcgctggcgctgggtgggcctcgggcggggaagggacgctggcaaggccagcctgggttgggctgagaagtatccaaaagtgaaccctatggagatgactctttccccagcccctgccagggccccagcacagggtcggcagagctcctccctctgtgaggaggtccccatgcccccaaaatacccaaccccagccagcagaggccaagtcccagtgcccgcactgtcagtcaggctgggtgacattgggcaaaatccttaacctctctaaaccgcagatttcccatgtgaaacatgggcttggccggatggagcggctcatgcctgtaattccagcatttgggaggctgaggcaagaggatcacttgagcccagaagtttaagaccagcctgggcaacatggagaaaccttgtatctataaaatataaaaaagtagctgggcgtggtgacatgtgcctgtagtcctagctactcaggaggctgaggtggggggatcacttgagcctggaaagtcgaggctgcagtgagctatgatcacaccactccactccagcctg

SEQ ID NO: 17138 - DNA, 1021 bp, Artificial sequence
  DNA replication origin
gctcgccgctcaccttgcagctctcacacgtgagcagtccgtagtggtagccggacaccttgtccccgcacacggggcacagctcgtccaggtcctcgtcgtacgaatagtccatgcccgcggcgtccgcctgcggagggacagcgggtcagggagggccggcggagaccggcagcctggggtccccgcggccgccgccccagccgctgtcgccggcccgtcgcgtaatcccctctctgtgcccaggcgctgccgccggcacccaccgagcgccccgcgcagcgtcccggggtgggtccggtgcagtccccgcgcccggccttcccctgccaggccccacgctcccgccccgtccggggggctcctcccgcgcggaccccgtcgcgcccgatctggggccctcgggttcgatgcgcttcgattgggattcgtttgtctgagaacaaaaccccgattctgagaaaaagagatgggctcagccgcggggaagacgccaggggacccaggagcgctggggcgcccggcccgggtgttctgggaacccgacagagacgaaggaggcagagacagagtccgggggagccagagatgggaagaaactctggcgagagacaacgaccgacgccaccgggcgcagacacgaggccagtccgagagtgccagagacacagacactgagacgcccagctagagagaacccggcggggacgagacacagggagggatggagagagacagggagacagagagagagagagagagagagagagacgagagagagagagagagagagaaacgaggggtgggggattggatcagagactcggagagacagcggaggcccgaagagaaaacccaagagagactgacgcagagccagagacacaacgatagacgacagacagagacgccgagacgagaggagccccggagagacgaggccggggagctacagaaacacggagagaaaacctggaggcggaagcgcccagcccgagggtcggggacaggggacgcgcgg

SEQ ID NO: 17139 - DNA, 939 bp, Artificial sequence
  DNA replication origin
ccgcccgcgcggagcccgcacctctcggccgcgccgccgccgccggcgaggagccgcacccgggcgcagcgccgcccgcccgcgatgacggccgctcgggccggggacggggaggcgggggcgcggggctggcggcgcgggggcctcggctcccccctcccgcctccccgccccccatcctgcctccctgttcccccccgcaccgccgccggggccgctccgaggcgcacctgggacccgggcccctcagccgccaccccgccctgcgccaacccgccgcgccggggccgggggccggcccctctatatcggcgcgtgcggtatccgggggcggaggcccggtcgtgtcctccccccaagcccggcccgcgccggcaccctctccgcagtccagctcgagtcttcgccctcatcctccaggccccccagccgcagcccggctccccggaccccgagcgcggccagagagctgcggagcccgagtgccccgcgatctgggcaggtatagggcagtgggggccttgggtcacccgcctgcagtgggaggaggcagctcctgtctgtgaacccagctgggtcgtggcgaatgccacgcgggtggctggtcgcactacagcgtggaagtgggtaagggcgagtggcgaccgtggccgaggctcggattcacgggtggaagccagattctcccatggggcccaccacatctcctcactcgagcctgtagcagctctctccccgtctcgggtcttcagttgccgcatctgtgaagtgggtagatgaccgctcttcctcgctaagggtgggtcgtgaggatgaacccaagcagtaggggcaaagcacgcgtgtggcctggcggaagcgctcagtggcgcccctctggggagatctggggcgaaccccttctgctcgctagcctcaggtcgctgggctggaaatggg

SEQ ID NO: 17140 - DNA, 1958 bp, Artificial sequence
  DNA replication origin
caaggagagaggagcaggcggcaggccgggtgggggagcagcccataaatcaagccccactcccacccggtttctaacaagcggggctgcctacccgcctctgtggggtccctgcctctgggctcccacagcgggcctggaacagccagctggccaaggcctctgcagtgccttggcctccgcccccaccctcagcccccagatagataggggtattttttttcttttaggagaagaagaaaaaatagacgtaaatgaagagaaacaccaacaaagaaggcgagaggcctgcagagtcacgtgggggcagagaccaattgggcctccggtggcccccccaccagggcggggaggaggaggaggacggacggacagggccagcctgctgtccggctgccgcccgccgtggtgtgagggggtttctgcgcacccacagtcgccaccgtcccacctgggctgccggagcctccccctggacccctggtgcccactgccaccctcatccggtgtgagagcgctgcttccgcttcgtaagtgagggccttggcccaggcctctaatggccagcctccttctgcagtgcctccctgcagcctgggccggccactgcctgctccacttagtgaccggtgccccctgctctgggcagggaaggtgccaggggtctcccagactcaccctcccaccatgctaccccctcttcttccctgggctgccgatgggaggagccaggcctgtgaccacaagccccatggaggtccgctggtgtcccgctgtctctggccaggcatccaccaggctgtgtgggtctgagcctagaggtctgtgagtgtgtctggagggctctgggcctgtcttggggctctgtcccccacctgagtttctgtgttgtctctgtggctctctctgagtcttgctgtgtatccgtgtgtctgtctccggcatccatctgtcagcctgggttctgcggccgggccaggtctaggcttccctccctgggtgggtggatgaggggctggaactccccaggcggtgggctggaacctggaacctgtgggggtgggtgcctcggagcctggagtgcagaggagccatgggcttccagccggtgagagtagaaacccttggggagaggggattggagatagagggagaagggcctgagcccagcccccacccaaccccggcggctggggcctgtgtgtccagctccaggtttccaggagacctcgggtgagctctaccttagaacagccaactggggcaccccagcccatcatccaccaacccccttccctcctgcagtcactgtctgagggctccattgtggtggggagctgttcagaggcggcagtgacccccacctccagctcgggcagatgctcttgtttctcaggggtttgggggtgcggggggtacgattaacagggtctctggctctttcttccctcctcatccaagattcttgcatggaaaccgcagtaccccatctgtaaagccaacatgttccactttatgctcggagaaaactgaggctctcgtttcagagaggagaagtgacttgcccgagcttgcacagctagtctgcgggttctgctccttctgtgggtgagccagctgagtgcggtctgcgcggggggttctctggccacaacttgcaggccccaggcccagctccaaccgaagcccgaggcctccaggcgggcgggagcccagatggagccttttggtgggttgcgccgctgtcaatgcaaaattgcggtattttcctgcttgaagatcgcagctttttggcctcatggtccccaaactctctctgaccccaggtgccagcgggggcggaggcaggatgcaagcaggccccttcctttcgggtccgtttctccagctgaaaaacagtggccccgcggatggtccctagcccagagcaactgcttggcccataggcccgggaaccc

SEQ ID NO: 17141 - DNA, 1030 bp, Artificial sequence
  DNA replication origin
cggaggcccaattggtctctgcccccacgtgactctgcaggcctctcgccttctttgttggtgtttctcttcatttacgtctattttttcttcttctcctaaaagaaaaaaaatacccctatctatctgggggctgagggtgggggcggaggccaaggcactgcagaggccttggccagctggctgttccaggcccgctgtgggagcccagaggcagggaccccacagaggcgggtaggcagccccgcttgttagaaaccgggtgggagtggggcttgatttatgggctgctcccccacccggcctgccgcctgctcctctctccttgtgaatggctacctccctggggcctggcctggcatggtctggcccagcccggacattggagtagagtcaggacaggccagtgcggaggcaaggccatggcgacttgactaggcggcctgctgcttccacctctttttcctcttccatcaggtggaagaagaggggggccggaaggggagcaggtgagcggcctggacacctggtgcgtgcatgccacggtggcctctgaatgtcctcatctgctgtgggctgctgatgttcccagtcgatggctggaaaaactgaggctgggctgagactgcctctgaggccaagtggtggctatagtggccccaggttgaaccaagtatgaagctagtccaggataggacagggtagcaggaaggggcccttatctagaaggctaggcctccctagacaacctgggacgtccccatccaatctctgggcccagatgggctctgaaatatcctgttcctgtagggcccgggttgcagggtgttgtgccgctcccacggtgactggatcttttgtgtgttcctctgtttgtctcacatttactgagcgcacacttaggggtcaggcactgttccaggcaccagggatcccataggaaagagaagaaaagtctctgtcctcagaggatttacctccgtgcctttcatcttgggagagcagggaggggcacagggtgactatgggg

SEQ ID NO: 17142 - DNA, 1321 bp, Artificial sequence
  DNA replication origin
cctcacacctgccaggtcactgtcctgattgagaaacctcttggtgaagcagttaatttttagtgcctcctaactgtcccgggtgtttgcattcaatttgaaatctgttacttgttagacactgttcggtcctagatctctcagagaactgcgagtttatggcgcagcgaggggaggaggcactgatctctgagagcctccctttattcggaaatgaggagatgtgaaaggtggaaaacagggcaaataaataaatcgggtttgccgccggagcgtttgccggccggtgcgagcaccctttgtaatgcaggcctcccggggcgatcgcctgcgctaattgctccagggcgctttccaagttcaaaagttcaccttttacgacctcacaaaagctcctaacacgttaccaataaaaacattccgcggcaaacaccgaggaggaaaatatcaaacagatacaaataaaacaccccgcagggggagggagcgaaggggaggagggcgaggaagccccgaggaacctgaggacccggcccgggcgagggggcgagggacgagcggtaggaagggccgggccaggtgagggattctcagctcccaaggtcccggatcgggacaagaaagaggagaactgagactaagaggtggggaccgggacctgccgggcagaagccgggaggaggcaggtgtccggggccccggggcgggctggagccctcggccagggaaagccgttgcctggcggagaggggagctgagcaggggcggagaccggccagagcgcgcggggcgttgaggaaggtgaggcgcaggggaagcaggaggcgcgaaggggtccgaaaaaggaaacgactgggggatgtctagcgaacgggggttcggcagaggtggggggctcgtagtattcaaggaagaacgctcgaggctgcagaagaggaaaacgctctagaaagctgagcggtacaagggtgctgtggagtcgggtcaacagggcaagaagggagcgtcctcggtgggaggaggaacccctgtaggggaaaagagaggctctgcgttaagggaacccgagtgaggggatgcccccactgacggaccgcggtggggacttccaacctgaggagcccggggggaggggaaggttcggtgctgggaagacagggggaggggacccggggggaggagggaggattggtgctgaggggacggggggaggggaagcctgtgcagaggggacggggggagggggaaatgaagctcggtgcccagggacccgggcagggggagggtccgcgcagaagggaacagggacgaaggaggagga

SEQ ID NO: 17143 - DNA, 1199 bp, Artificial sequence
  DNA replication origin
aggggccgcggggccgctgcggcttcccagggcgagggtcggcagagaggagggggatccctggcggaggctcaggaagccggttcctgcctggcccgggcgtcgcaggcccctcacccaccgttgcgcggcggcggagggagcgcggcgggaggctccaggaaccccgccgagcccccgccgcctccccctccgctaggcggcggttcgtcccgctccatgcggtggtgcctagggtccgcgccgggtttgttgctccgccatgaccggcgccctagtcgccgtggtcgtcgtccgccgaggggaggaggttgtcaggagcccgcgagctcccggccgcggctctctctgggccccgagccgcccggctccgcgccgctccgcgcccctccgcgccgcgccccctcagcactggccagctccctcccctgacgtcacacgccgctgccgcgcaaggccctgcggggcacgctggaagttggagtccgctcagcgaggccggccacgccgaccgcaccaactgaaggggtggaaggagggataagaagtcctgagaagggaaagctaaagtctgtcaatatcaagaaccatgacaaagcgtttgatgtctatgtagtaagcggatacttccgggccttgtcttgattgtgatttctacctgatcaaagttccctaagagtcctcgtaaccccccaccccaacaatgagtctttgcgaggaggtggatcgcgaggcagccgggtgagcacgtgcaacgaagcccagccctgtgggcggggccctggaggcggggcttgaaggtactcacgtgggcctctccctgccgctgcgggacaaattggaccggagattaaaggaccggagtttaactcgaggtgactgcgttcgtatgcaaatggaatatataaaactcttctttccggggtagtctttaaagactttttacctccgggtgggcggcaaagactaaagtttcccctcctcccctttcattttccccctgcccatagaacagatgggcaaactaagctccgggccattggggctattaaagaaagccctaggctcttgaccccaggtgtcttgaaaccttccgtttaagagggatcccttgcccagccttgtttgccttcccctttcctcagtttccctatctgtaaaagggggttggaataaggacaggatcaagttggaagatc

SEQ ID NO: 17144 - DNA, 1173 bp, Artificial sequence
  DNA replication origin
tcatcaactaccaaaactccagggctgcacgtttctgcagtgccacttaggctctgatggcatctccagggacagagaactcactaccaccagaacctgtgacaaaaaggtagattcctgagaaaggccagatggtcctgactttttttttctttctttttttttttgagacggagttttgctcttgttgcccaggctggagtgcaattgcgccatctcggcttaccgcagtctccgcctcctgggttcaaacgattctcctgccccagcctcctgagtagctgggattactggcatgcgccaccacgcctggctaattttgtatttttagtagagacgggttttctccatattggtcaggctggtctcgaactcctgacttcaggtgatccgcccgcctcagtctcccaaagtgtggggattacaggcatgaaccacggcgcccagcaaggtcctaaagtattttagaacccacagctgagggaatggcaggccgtcctctcttagtcacagggtttagctcctgaaacactgctacctagcagaggggatctagttgtccctcggtggaaggtattaaggaagatgccactgaagaaacatttgaacaggatcttgaaagatgaataggagtttgggagtgggtcaggtgaagtcagccgcgttccagcttgaaggagccaaggattaaggttctggtgtgtgacagaatggagctggaatccccatcacttctggtggacttcatcagtgctggaaagggacaatattgttgctatctcatagagcaggtatgaggtttagacggcagagcgttaatgtaagtctcccagattacgtatgaaatacagtttcaccagggttggtaaggtccagttgcccccaagtgcagagaagcgttgcaactttcgtagcaggtgagggacggggtatggtgcgaaatgtgggcaagggtcaggccaagcagggatgcgaatgccaggacgaggacttaaaattaggcaaaaaaaaaataaaagggctaagggattggtggggcgggtggggcaggagagggcgaatgagcggccaccgaggaagctgcagcataatccggcagagcagaagtgggcaaagcaccaacgttctcgttctttgtcttcaagtgggccaggtaggccttagacccttggc

SEQ ID NO: 17145 - DNA, 918 bp, Artificial sequence
  DNA replication origin
gctcctccgccctggccccgggctccctcccgggccgcaccccagccacagcgccccctcgcgccccgctacccgccgagccgcgcgggtccgaggggcgtgcgtaccttactgtcggcgcgcgtggggcggccgctcagcagcagcactagcggcagaaggagcagcggccggggcgggagggcggcagcggccatggcgccacgggcacggtaggcacaggcggccgggcacggacgctgggaagcgcgggctgcactgcgagctccgcgccttcgcccgctctgcctgccccgcgccccgcgcctgcaccctgctgccagccccgcgggtcttccagcgccgccaggggcggagctagggcggagggggcaccccgccccgccccgcccgccgttcgcggggcctccccgtcgtcgggcggctctcccaagggcatccctgcccgcgcgccagggtgggtctcgatcgcagccggcaggagcaacggggccagggcgaggcgcgtgggctcctctcacggactcaggtcctgtcctgtgagtcgtgggaccttgggcgtgtcccttcacctgtgtgcctcagtttcctcatctgtaagatgggggactcgtgctttccttttggagtgtttgtaaagttcgcatgagagacggatgttcccagggcacgtgagcccttgcgctctccgatttcacccacttctggacagggacctgactgctgtaagccttcccaaggctcagcaaccccaacctgtcttccgtctttcatttctccttccctctggaatccctcctgtcggctcccaaactccagtagcttccggcttttaaatttttatttttctcactctgttgcccaggccgtagtgcagtggtgcgatcccagctcactacagccttgaccttcccagct

SEQ ID NO: 17146 - DNA, 1142 bp, Artificial sequence
  DNA replication origin
atcgagacccaccctggcgcgcgggcagggatgcccttgggagagccgcccgacgacggggaggccccgcgaacggcgggcggggcggggcggggtgccccctccgccctagctccgcccctggcggcgctggaagacccgcggggctggcagcagggtgcaggcgcggggcgcggggcaggcagagcgggcgaaggcgcggagctcgcagtgcagcccgcgcttcccagcgtccgtgcccggccgcctgtgcctaccgtgcccgtggcgccatggccgctgccgccctcccgccccggccgctgctccttctgccgctagtgctgctgctgagcggccgccccacgcgcgccgacagtaaggtacgcacgcccctcggacccgcgcggctcggcgggtagcggggcgcgagggggcgctgtggctggggtgcggcccgggagggagcccggggccagggcggaggagccgggagctgagagaccgaacctgggacttctcagcactgaagccgcaggggcaggggccccgagagaggggcgcgtggaggaacaagcgctggagatgtagggatgctagggacccggggcctgaggaaggggcgctgggaccgggtccgattcccggaggggtcgggggatttccccggagtgctggccagactcggggttcgtaggggaagctcctggcaactgttacccaacgactcccaggcttgcagcaagccctgggccacggctttcacggcccgctggggactgggggtcttctctacccgatgaacgcagccgcgctggccactcgcctggcctctgatgttcttgccagggaccgggtgcaccccctggaggactaggtagctccagaagtggtctgagctgttctctgctgtggctaagaggatctgctctggtgtcaagccgacctgggttcagtcgcacatccgcttctcatccgccatcgcccatctgagcctccgtctattcacctgtagatacagggagaatcatgggacccacttcctgcagttgatggtctctagatgcggtgtggtcatgcctgtaaagtacttagcactaggccgggcgcggtggctcacgcctgtaatcccagcactttgggaggccgagacgggcggatca

SEQ ID NO: 17147 - DNA, 1432 bp, Artificial sequence
  DNA replication origin
gggacagcccaaatggccaaatggagctttaggaagccaatggaacttcaggggtcaagtggccccccagccacctctgcttaggttctctggcctgaccatttcttcccaggccaccaggaggtaataatgataataattaataataacctgaccatcacagcgccaccagctggggaactcgagaatccaggagaggaagagacgccaaacgagggtcaccagccagttcggtggcacagctgggatacggacccagaatcagctcccccatgagggcctggcccccctcgggcagcctggagcagttgctgcaggatcccatccctggctggggcctcgtgccgccagcagccccctccgcccacctgccctcccagctgtcccagtcacacccggcacccatgtgccctgtggaaatctgaccagcctcgcagcgccctccaaggagacagctgacggatggggcttgggagagtgggggtcatgtgggaagcagagctcaggccagaaagcgggagccgccctggccgggcagggagacactggcagtttctgcttgccgtgtgaccttgagctccttgctgagcctctcagggctggcaagggctgctctgagccacctggagctggggctaagtacaggcaacttgtgggttcccgggtccatgggctcacacctggaacttggcaccggcctccattgggcaccccccagacccccaccctgtgggccagaatgatgggatctgactggctgtgtgagtccaggctaatgtatcggcttgtctgggcctcagcttcctcatcacaaagttgaaagtgttggcagctggggtgccgtgcagtagcccggcccctccattcagaagcttgtctcagcagccccacacctcccccaggccctgaaatgcttcaatggccattttgtatcaggccagggaactgatgtttgctcagctgcccccacccctgagacttcatgataatggactcctgccagcccagggcccctgtgtctgggggtaggggtgggtaggaagccctcctcggcctgtctggggcattgcccttcccttcctgaccagtaggggtaggaggaacatcgagtcatttcctctcccatttctttccagaagttcaggcctaaatctcagccttccactgcccgcagctgtgccgttctatgcaagtctccattgcgcactctgcgagggcttagcatccatccagacctgggttcaaatccccacttgaggctgggtgcagtggctcatgcccacaatccgagcactctaggagaccaaggcaggaggactgcttagaagccaggagttcaagaccaacctgggcaacatagcaagcacccatctccacaaaaaataaaagataaacatttagcaggggccaggcacggtggctcatgcctgta

SEQ ID NO: 17148 - DNA, 1519 bp, Artificial sequence
  DNA replication origin
ccaaagagctaggattgctggcatgaaacaccatgcctggccctgtggggtgttttaaggttgacatgcgtagctgaggagaggcaaggctggtccaggacctccagtccccttcagggaatggagtgacagtgagaaaagccagcgcggcatccatcctggacatcttggtagagccctctccctggacagcctggccaaatacaggagagaaggcggcaggctccctgaggagaaggaagagatagtcagtggtggaaaactggcagaaacttctccaccacttcatccgcggagatgatcctccggaccctggcattcacgttggtggttccacctacagatgcctgagccaagcccacgggtttcgaccccagctccaccccttcggccaagcagtcactgggcctggtggacaaggtctaccctgagggttctgggagtgaagggctgggctggggaaggtggctctgggccctctggatagagcaggagcaaccaagtggctagacaatgtgcccagggccggggcatgggttgggggggtgcctgagcaggagagccagagggccagggaatagtagctctggggagctgtgtctgggagccacatctgggtgtggggggacagctttataggcccagctcagaagggtcccacagtgacctaggccctctgggatctgggatggagtgggactgcctcaaagctgtcattgtcgctccctcacccgcctgactgtctgggacttaaaatagcaggagcacagcggatctcctgagaagtttctggcaaagaggtttagggggggagggtgtgagtcgccgctgggaactcttgagtttgaagctcccaaagcccagctgctccacccctgcccccagggagcctagaatccatgggcggggcaggtggggggtcctctgttccctccctgtcctgctgtgggagtggggagactgggtcctgccccagctctgccatggaagcaccggctagatggctgggccaagtcctgcccccttcggacctcagtttcccagatgtaccaggagttgcggacctcaacatctgctgagaggtccctggagttcatggcaggtggtcccagtacagacacccagagtcagacagccatgggctgaaatcccagttccactcctactggctgagtggctctgagcaagtcctcccagctctccgggtgagtttcttcacctgtaaattaacaatgaaaccaagtcctgctcgttccaagcttcagattgcgctatccggtaaggatcctggcagctcctgggcaactgccccccagccccagcctccaccccatcctcagatggcacattttgtgctgccaggaatgttaacagcaacgtgaccccacttttaatgccatgtactttacacacactacctctggcttccacgccctggaggacagagctggctactgtccccagcgctctcctgggacatccttaacctcagtactggccactcctggacggaaggggt

SEQ ID NO: 17149 - DNA, 1203 bp, Artificial sequence
  DNA replication origin
ggggagacaggctcgttgctcccctgtatcaaagaggtgcagggaccccttgcagttcgcagtccgcagggcgcggggccgggctctgggccgcgcggtgcgtgtggctggcgcgccctctagtggccgctctgcctgccgtgttgccccgcgcgagagctgccctagagtggacgcgcagccgctggcgcgggaagtcccttctcccagcccgccgcggtcccgcctgctgcggctccacctccgccgaactgcaagcggtctggcctgcctgtcagtcctcgtggcttcgcagggaccccaccatggccgcacgccccgccccgattaccatggagaccgcctgtacacagtttcctctttcctctgcccagtcctggggtcccgcggccgcctaggagggagcccgccggggcggggcggggccgggtgcccatgaacagcggggtcccggccacgctggccgtgcggagagtgaaattcttcggccagcacggcggggaggtgaggtccagcgggctctgcccagactcccggctttggatgcagagtggttcctggttctgtgtagtgggggttccagaatgttctctgggcagtggctcaggacattgagtccagagtagactttgctaacccaagaaggatcgaagtaggttctcagctccagtgccgggccccagctccagagcagctctaggttctaagctctgcctgtaaaaagagccccgggctctgggctctgcctcgagaggggcacaaagctccctgctgactctggtgttttctggggccctggctctaaagtgaactcagaacttagagtagattctggactctccgttgtcagctgcggctctggaatgggctcttagctctggggttccaggctctggttccagagaaggctcttgcctccaactgcaggctctggctttacgggactcgagagagggcccagtgggtcccgggttctgggctctggtggtggagtgaggcttgaagtcaagctccaaccccaggctcttggggggcagtgtttaggggtcagagatgagcggacaggggtttcttccccagaatgggaccgcttttgtgctgtttctaggtcaactcttctgccttctcccctgatggccagatgctgctcacaggctcagaagatggctgcgtgtatggctgggagacccggagtgggcagct

SEQ ID NO: 17150 - DNA, 1684 bp, Artificial sequence
  DNA replication origin
gggcccatcatgccattgactgtgggtgtctaggcctcagggccctcatctgaaaaatgagcatggcaggtgcctggcagggactgacacccagtgccagtaagaggcagtgaaaaccttcaacagccagtcctatcactgcccaagccactcaactgggaaggctggtttcaaaaactgagtctccagccaggacaccccaagccccaatgaattcttgacatctgcagcctgaggaagtggtctgcagagccacgtgccagtgcaagacactggtagaagagtgagcccagcaacaaattgggaaggctaaccactctcagcccacgcaccaagaaaaacctctttaccatgtccccggccagggacggctagcacttggcttcctgcagccaaccctccctatgtccaggcagactcaccttgtagaatttcctgaggttttctttctgagtctggttaataactgtgagaacacgggcaatggatttccggacgactcggctacaaaacagagatgtcagtgaagatagggaagacacatagcactacccaagactcaggactcacacatagggcagcaatagctgcagcctcccccatcaacccatccatattcactcaggaggaaggcgttctgggagtgaggtctgaggagggaagagaggggcatgggagagacagcagaggctttatgaggaagtgcaggctggataaatgaggcagatcagaaaaagaccttcaatcccagaacacgaatttatcctgagggctaagacccaaccaatgccaatttcaatgagctgatgggaaggaatcatgccacaaaccaggcaatcaggctagcttagggaactgcaggagagagaaacaagacatttgcaaagtggagtcactacaagccaggagactgaagcaaacaacgagccagggagaagttatttgtagtcatgtcaggatgagggagtcacctagtagacagctggtcaacatggtttttgaggattcagtgtgcaactgtgcttgtccaatcctcccacccctgcctctactaaggttgtttgggggcaaagagggcaaccaccattttttttttttggagacagggtctcacctgtcaaccagactgaagagcagtggccccatcatagcctcccaactcctgggctcaagtgatcctcctgcctcagcctccagagtagctgggactacaggcctgtaccaccacacccatctaatttttttttgagaagtggactttgtacccaggttgatgaactccaaacccatgttcctttcacaagtctcccgcactcttagccatgtaaaataacttacgctgccactccagggtgcaagccacccacctgccaagggggttaaaaactcaagtgttggtgggaagcggaaggaaggggtccgggtaggctttgaaggcagcattaagatgggtctccggggatgcattccaggcacaaggaccgcaaggtcaaggcaggtaagaggctaagcacacaacgggtctcccatgcgcgccaggatgcacggagtgggcatctaagcggccagctccttaagccaactttgaaatcctccgacgatcccgatgcacacgtgctccccacccacgagggctgtgatccggccgcctcacttacatcttagagagcttggaggccgcacc

SEQ ID NO: 17151 - DNA, 1404 bp, Artificial sequence
  DNA replication origin
cggggtgatccctgccggtactggggaaggctgggcccccgggagaaggctcgcggctctacttctcgagtgccgggcaggcttcttggagaagaaaccttcgagctgatgactgagggatgagtaggagttcctgtgcccggggagtggcgcgggaggcgcctgtgtctcggagccttgaacgccaccacacttagtacgaggaggccgcctgtacacagaggtgaccctcttaaaggagtagggggctttaaatacgtttagtgcgatcacgggactgacaagacgttgaagacgttgtgactcgagggattctgcgaccccacgtgtgtagcagtcaccttggccaggcagttgggggcgccaggagagggagatggccctgtggccaccgtcctggcaggagaggcctggctggagaggcacatcttgacagaaaccaaattctcagaatctgagatgggggaaagcggtttagggaagtcaaggacgactctgaggtgccagatttggtgcctgggctgttatcccaggggttctgttaattgatcttagccttagggtaagtaaaatgggtctttttatataatagtgtgaaaactattttcatctaatagtactctttttaataaaagtcagtagttggaatgtgattcatttttgctgcttcgaatacctctcattgaactgtgtctaaagataaaaaaaatattgccagactatgatgcaaccttatcttcggtggtaaggatacagactcccatagtgggaaactagtggtgaagaagtctctgcctgtaatcctcagcactttgggagccgaggtgggcggatcacctgaggtcagaagtttgagaccagcctgaccaaaatgctgaaaccccgtgtctactagaaatacaaaattagccgggcgtgctggcgcatgcctgtaatcccagctactcgggaggctgaggcaggagaatcgcttgaaaccggtaggtagaggttgcactgagctgagatcgcgccattacgctccagcctgagcgacaagagcaaaactccgtctcaaaaaaaaaaaaaaaaaagaaaagaaaagaaaagtctcaggggtcctggaaacatgcaaagcccacctgcaatacagttccatatctgggaaaaaatatttgtgattcaggtctgccacgagacagcagaaattcatatccccagaacatcctggtcagaaggaacttgaacccagaaatgcccattttacaagtaaagaaacagcccccaaagaaactagtaaatggaataatgtcccagctcatggtcatggactttcattccagccagggagacacaatttaaaaatccatattatacgatgtcagggctgacagtgttgagagggaaaaaaaccatgcagtgcct

SEQ ID NO: 17152 - DNA, 878 bp, Artificial sequence
  DNA replication origin
gatgtccacccggcggaagcgcgaggacagcgtgttccgggccatggcgggagctcggcgcccgctcagccggctccgctcgcggcccgacctcggctctgctccgctcgcaccggctcctgctcgggggcgggaagcggctgcccggctgctcccagcacctcctccaccgcctccgcgcgcagccgccgccgcccgcccacttccggcacccgccggatccggaagcgccgtcaggggcggggcggagcctggcacctggagtgcggtatgggatcaccgcagcctcccccacctcagtgtcccttccacggagtctctattttgtcactgaggatcgggcgcccggcatctgtgcaggccccgcctcgtgtgtgccgtaactgcgctggttccccggctttcccgcgcctccgaggagcccctggcctcagcggggccgggcgcgtgctcccggggtgatccctgccggtactggggaaggctgggcccccgggagaaggctcgcggctctacttctcgagtgccgggcaggcttcttggagaagaaaccttcgagctgatgactgagggatgagtaggagttcctgtgcccggggagtggcgcgggaggcgcctgtgtctcggagccttgaacgccaccacacttagtacgaggaggccgcctgtacacagaggtgaccctcttaaaggagtagggggctttaaatacgtttagtgcgatcacgggactgacaagacgttgaagacgttgtgactcgagggattctgcgaccccacgtgtgtagcagtcaccttggccaggcagttgggggcgccaggagagggagatggccctgtggccaccgtcctggcaggagaggcctggctggagaggc

SEQ ID NO: 17153 - DNA, 2403 bp, Artificial sequence
  DNA replication origin
agccggggaaccagcgcagttacggcacacacgaggcggggcctgcacagatgccgggcgcccgatcctcagtgacaaaatagagactccgtggaagggacactgaggtgggggaggctgcggtgatcccataccgcactccaggtgccaggctccgccccgcccctgacggcgcttccggatccggcgggtgccggaagtgggcgggcggcggcggctgcgcgcggaggcggtggaggaggtgctgggagcagccgggcagccgcttcccgcccccgagcaggagccggtgcgagcggagcagagccgaggtcgggccgcgagcggagccggctgagcgggcgccgagctcccgccatggcccggaacacgctgtcctcgcgcttccgccgggtggacatcgacgaatttgacgagaacaaatttgtggacgagcaggaggaggcggcggcggcggcggcggagccaggcccggacccgagcgaggtggacgggctcctgcggcaatatccttccctgacgcggcgtccgggcctgcgcgcggccttctcaccttcccaccttcccaccttctcgggccctttcgggcgggcctcccctgtctccgacccttggccccctcaggtcagcctccagctccctgccgacccggcttccctgggccgtgctcccttgagtcccagtctccctgggtccctcgtccccagccctggcgccttcttctgcagcgccgtcccgcaggcccctggacccggtggacgggctccctcggcacccccgcaggtcccgcgccctcttccctccttgcctcctcgtcccctcacgctgtcccttccttggggccccagcactccgtccctcccttgcaggaaatcgggcctatggcggggctgggtcggcggcagggcggaggtgagccgcatctgagtaaccgagtgatcggggaggctggggcgcggtcctccggggcccgattgctgcatggcgtgaagataggtgggtggacggctgtggggaagacagaacccaggagggagtggaggcggccgccgtatttcagccctggggtctgagattgtgtctctcttcccccagtcagtctaaccctcccgcttaatgctgagaaagggggaccctgtggttcccctggacaccttggtggtctcagccacgctcaacaagtgagtcttggctccccccagtacccttctggtgcaggaagcagcggagaaaactagtagttcagagctaagaaaaaccagacaccttgaagcgaagtgtgaaagtggagccccacgcctggaaatgactgttcttgtggccacagaaaacagcatttagaaaagattaaaaatagaggtgattgtcacagccttgcttggtcctttagcagtatgagcgcaggaaactgacttattctcaccggaaggatttttctttattcaaatggtgttccaggaagcctgtcccctccccccgcacgggtgggggcagggttggaggcccatgctgtacataaatcaggttctcggtgttgaaccagttgactcagcttggaaagtggggcctgctgctttagggggagcccggcagtgctcctgagtgtgcctttaaaccgaaaaccttcagacttgatttgaacaggaatgtgttttccgaagtggagattcaagcttgtaattcctgccccatcaggatctcccaatccaccctccttatgaaatggggtcaagggaagggtccccaggagggaaggttggttgtagtctggtgtagggcctagttcatggacagtcagtgctgaaaggggctccagggtcaggcctttggcccaggactctcattgaacagatgagatcaagcctgtcagctgctgccttggtctgggtgcagaaccttgttgaaggtcatgtcttgggactcccctgcctggtgacaggttccttgaggctgcttagaggcctgggcttagcacatccaggggatggtcgtttctccattcatggcagcgtcagaagcgtcagaaaccttgttaccatggagagtgctccacttggggttggggaaagggaggttaacggataaaggtaactgaaaccctggcaaatacggggcccaggtggaggagaatggaactgatatttattgagtctctatcatgtaccaagaatcggacttatattagaccattgaggacaggggagcagggagagggatagatggattggggttggggagggcagagaggggccctgtcctggggctgtatagggaagtgtgtgtggcaggagatgacacagatggagtagaaggaacccggctgtgcatctgcgcacaccctgcactaccatgctctggctctgtgacctcggataggtcgcataccctttcacaactcagcat

SEQ ID NO: 17154 - DNA, 1138 bp, Artificial sequence
  DNA replication origin
cacaccacacagggctttgcgggcctctgcaaggactcaggctttcataagagatcaacagagacaggctttcatcagagggctaagacaagagtgccagggaaaccagttagaagtctgataccatcttccagagaagagacaatggtaacctgaagcaggtggcagcgatgtgaagtggtggattctgggaaatgtgtgaagggggtgctgaaggaatctgctaacagcctggatgctggtagagaaagaaccaaggcagataggacaactccaaggcttttgccgtctactgagatgggaaaggtggcatggcagccagggaacacagtgaagccgaagtgtgttttccgatgttttgagtttcagacaccttagagctcatgtggagacaggtttgtgaggctagtgtccgtggagctgtctgggcgggaggtagggaggggagtcagctgcgcagggcatggctgagatcgcagaggagggcgcacagtgcagagaagagctgtgagggctgcccttgtgcacggcgggtggcagtgggaaggagactggcctgtcagaggagacggagaaggagcaggccatggatgggagcttcaggaggaggaagagacgcctgtccaaggctgccaacaggccaatcagagggaaaattaggaactgccttctggatttagcagtgcagatgttactgatgagcttgacaagagtgtttttctgtggagtggtggaggaaaggttgagagagaagaggagtgggaatggagatggcagatataggaagttttaacatgtcagcacggcaggtgagcagagacgcagcagcagggcaaaggggtgcaagccgagggctttcataaggtgcctgcacaacggcgcacctctcagtagatgggacgattccaagaaaaaacgacctaggcaagaagggggaggcggctggcgtagtgcttggggaggtgggggaacaggatatgaggagaggctgtggcacgtcccttctcagagaagcaggaggtgggagcaccagggtgggtgaggcagggttgaggtgaagagaggagagaaggtagacatgaagttggggttaggggcagaggggcgtgaaggcccacggatgaggtggggttgcggg

SEQ ID NO: 17155 - DNA, 954 bp, Artificial sequence
  DNA replication origin
agagaagaggagtgggaatggagatggcagatataggaagttttaacatgtcagcacggcaggtgagcagagacgcagcagcagggcaaaggggtgcaagccgagggctttcataaggtgcctgcacaacggcgcacctctcagtagatgggacgattccaagaaaaaacgacctaggcaagaagggggaggcggctggcgtagtgcttggggaggtgggggaacaggatatgaggagaggctgtggcacgtcccttctcagagaagcaggaggtgggagcaccagggtgggtgaggcagggttgaggtgaagagaggagagaaggtagacatgaagttggggttaggggcagaggggcgtgaaggcccacggatgaggtggggttgcggggaacactgggctgcccgcaggaccatggtcctgagcttcgaggggacctgaatgcccaggtgatggcactctccagccaggtctgcctccatggctgcaggcagggagcagggaagagttgggtttagcccaagtttaaccagagcttggctaggacagtctgaggaaagggagagaggccagaggaccgcaggtgtcgggaaggcagtgatcccgtgacagacacagacccgacgctgaacaaggaggcaggaaggcagcacagctggtaaggccagaggctcaagggacggaggtcctaggggacaaacgggaaatttgcaaacaggcaaaacgaaactgtggggttgagcaatgcgagctgaggtgacactagggaaaaaagcaaggcagtcattgccagaagggctgggatcggagtgactgacagggctgggaggggctcagggggctgggcttctgggatgctggcaatatcctgattcgcatcggggtggttacatgggtctgctttctgttaattcactgagacacacatttgttttgtacactttcctgtgtgt

SEQ ID NO: 17156 - DNA, 1504 bp, Artificial sequence
  DNA replication origin
gctttttgttttttgtatgtgagacggagtctcactttgtcgcccaggctggtgtgtagtggaacgatcttggcctactgttacctcaacctcctgggttcaagcagttctcatgccccacctcccaagtagctgggactacaggcacgtgccaccatgcctggctaatttttgtatttttggtagagacagggtttcaccatactggccaggctggtctcgaactcctgacctcaagtgatccacctgcgttggcctcccaaagtgctgggattacaggcgtgagccaccatgccctgcctgagatggagcttttaggacttaggaatgagaaaaaaataggaattgtagatgacacctaggtttggtttgtataactcagagtttctccacctcagcgctattgacgtttgaggccggatggttctctgttgtagaggttctctgttgtggatggttctctgttgtggatggttctctgttatagagggtctctgttgtggagggtctctgttgtggatggttctctgttgtgggtgggtctctgttgtgggtgggtctctgttgtggagggttctctgttgtggagggttctctgttgtggagggttctctgttgtggagggtctctgttggggatggttctctgttgtggaggctctctgttgtggaggttctctgttgtggaggatctctgttgtggatggttctgtgttgtggagggttctgtgttgtggagggttctctgttgtggagggtctctgttgtggatggttctctgtcgtggaggctctctgtcgtggaggctccctgtcgtggaggctctctgtcgtggagggtctctgtcgtgggtggttctttgttgtggagggtctctgttgtggatggttctctgttgtggagggtctctgttgtggagggtctctgttgtggagggttctctgttgtggagggtctctgttgtggagggttctctgttgtggagggttgtctgttgtggagggttctctgttgtggagcgtctctgttgtggagagtctctgttgtggagggttctctgttgtggagagtctgttgtggagggttctctgttgtggagagtctctgttgtggatggttctctgttgtggagggttctctgttgtggagggttctctgttgtggatggttctctgttatggagggttctctgttgtggagggttctctcttgtggatggttctctgttgtggatggttctctgttatggagggtctctgttgtggagggtctctgttgtggagagtctgttgtggatggttctctgttgtggagagtctctgttgtggagggtctctgttgtgggtggttctttgttgtgggtggttctctgttgtggatggttctttgttgtgggtggttctctgttgtgaatggttctttgttgtggatgggtctctgttgtggagggttctctgttgtggatgggtctctgttgtggatgggtctctgttgtggagggtctc

SEQ ID NO: 17157 - DNA, 1468 bp, Artificial sequence
  DNA replication origin
gttaaaatagaaaaagaccgagaggcctcggagactcagtcatcatctgtggctctggccgctcgctgacgtggcgaactgggctgagggagcgcccggctgggcacccgagaactccagccgttccggcccagtcgccgctcagaggtggtaacagtagccgccaaggccgcgcacgggcgcatgcgcgcgtcggaccaaccccctccccccaccgcgcagtcacttccggcgcgctgggagacgtgcggttccgggtcgctgctcggctcgccggctgggcggtgggggttggtgacgcgggccggggctcacgagaggcccgggaggcggggctttgctggcttcccagagagaggcaggtgcgcgggccaggactccgggaatgcgagcaggccccttattctcccagtggcctcggtctgtccccacagcggcccggtcagggttgcccgagccccaaggcggggggcggcaccggggtgctgaaagggtgagagtgggggcggaggcgggctgccccggcctgggagtctggagcctagggttccgggattcctccctgcgcgaccttggacaagtcgctcctcctctctagggctcagtttccttgctgtcaaatgggagagatgttggatccttcctttctttgacagtccaaagcacgggcggggctggaggtagcctgagggagtgagatccaaactgccgtggcaggcacctgcctgcctccctgggggttagacatctgtctttacccaattttgccttgctttttgtcagtgcacatccgtgaccagacgcccagggtctggccgggtaaacagtatgtgagtgtagtaatcaactgagaaataaatactggctccaggaaaacttaacctcattcaaattgttttgctcagggctcccagggagaagtgaatttaggcacccgctgcggtgatcaattctgttctatgcgcttgtaagtgaagctcttaggcaaaaaacaatttcataggagatcagggttagggagggtatcccattgagagttgtgacaggttttcttaccccctttaatccttcttctgcccctcctcttccttcacttcttccccctatccccacccaacattttggccatacacttgaaaagaaatacccaatgcattttatctttgtcttcatgcaggacagaatgctttgacctccaagctgttttaaatctagtagataagccaggtgagtaagtggtttacacacattgaaagtaaagtttctgaagaattgtacagccttaatggaggatctgaagtggtaagatggcatttgtgtatctcagagcagagcttaggtatcctccacaaaacatggaaagttaaggttggaaccagaatattagtgttttatacaccattaggaggaaaaggtttttgaatcttactttgaatatcatgtcaaacattcttaagaaaagaaactg

SEQ ID NO: 17158 - DNA, 1270 bp, Artificial sequence
  DNA replication origin
ccatttaaccctgagtggacacagcacatgtttcagagagcagcgggttgggggtaaggtgatagatcaacagcatcccagggcagaagaatttttcttagtacagaacaaaatggagtctcctatgtctacttctttctacacagacacagcaacaacctgatttctctatcttttccccacatttcccccttttccatttgacaaaaccgccatcgtcatcatggcccgttctcagtgagctgttgggtacacctcccagacggggtggtggccgggcagaggggctggctcctcacttcccagaaggggcggccgggcagaggcgccccccacctcccggacggggcggctgccgggcggagacgctcctcacttcctggacggggcggctgccgggcggaggggttcctcacttctctgacggggcggctgccgggcggaggggctcctcacttctcagacggggcggctgccgggcggaggggctcctcacttctcagacggggcggctgccgggcggaggggctcctcacttctcagacggggcggctgggcagagacgctcctcacctcccagatggggtcgcagccgggcagagacgctcctcacatcccagacggggcggcggggcagaggcgctccccacatctcagacgatgggcggccaggcagagacgctcctcacttcctagatgggatggtggctgggaagaggcactcctcacttcctagacgggatggcggccgggaagaggcgctcctcacttcccagactgggcagctgggcagaggggctcctcacatcccagatgatgggcggccaggcagagacgctcctcacttcccagacggggtggcggctgggcagaggctgcaatctcggcactttgggaggccaaggcaggcggctgggaggtggaggttgtagcgagctgagatcacgccactgcactccagcctgggcaacattgagcactgagtgaatgagactccgtctgcaatcccggcacctcgggaggcccaggctggcagatcactcgcggttaggagctggagaccagcccggccaacacagcgaaaccccgtctccaccaaaaaaatacgaaaaccagtcaggcatggcggcgcgcgcctgcaatcgcaggggttcggcaggctgagacaggagaatcaggcagggaggttgcagtgagtggagacggcagcagtacagtccagcttccgctcggcatcagagggagaccgtggaaagagagggagagggag

SEQ ID NO: 17159 - DNA, 717 bp, Artificial sequence
  DNA replication origin
cgcctcttcccggccgccatcccgtctaggaagtgaggagtgcctcttcccagccaccatcccatctaggaagtgaggagcgtctctgcctggccgcccatcgtctgagatgtggggagcgcctctgccccgccgccccgtctgggatgtgaggagcgtctctgcccggctgcgaccccatctgggaggtgaggagcgtctctgcccagccgccccgtctgagaagtgaggagcccctccgcccggcagccgccccgtctgagaagtgaggagcccctccgcccggcagccgccccgtctgagaagtgaggagcccctccgcccggcagccgccccgtcagagaagtgaggaacccctccgcccggcagccgccccgtccaggaagtgaggagcgtctccgcccggcagccgccccgtccgggaggtggggggcgcctctgcccggccgccccttctgggaagtgaggagccagcccctctgcccggccaccaccccgtctgggaggtgtacccaacagctcactgagaacgggccatgatgacgatggcggttttgtcaaatggaaaagggggaaatgtggggaaaagatagagaaatcaggttgttgctgtgtctgtgtagaaagaagtagacataggagactccattttgttctgtactaagaaaaattcttctgccctgggatgctgttgatctatcaccttacccccaaccc

SEQ ID NO: 17160 - DNA, 1836 bp, Artificial sequence
  DNA replication origin
gcggaggaggcgggccccgcggcaagcctggcagaggcgcgaggccctcctcccgcctctccgcctactccagcctccgccgcctcagcttcccgagcgagccctgcggccgccggagcagctcccgcggcggagcaggagccggatggtcagaggagcccggcagccccagcagccgcggagtcgcctggcccccaggtgcgggggctgggtggaggccggggttggggatggggtgggggccagggagcgggcccaggggcagcggctcggggcggtggagcattcggggcgcagagaccggaggggcggggggtgcaggctggggggaccttgggggcgcctgcaggcggcggcgcgggctgggcgcgatcgcctcctcgaggccaggtgagaggggcgtgtgagggaaggggcgccgaggggtgaggctggcggcgcggggccgggaggggcaaggcgggcgcgcccccggaggggccgtggaatgcgggggtcgccgggcccggagaggcggggcgtggagggggcagtgcacggtcgggaacgggtgggcacaggaaaggggaggctaggggggcttgcgggggtgacgaggcagacaatgagtaggtggaggtgggtgattttggggagctgggctgtgacgagcaggggtcgaggatggggtgagggaccaggaaggtttgagctcagggggaattgggggaacggtgagtcccaggaatgctaggtcttggtaaataggggaaacagggcatgaggcgtttgtaaggtcagatctgggcttggcgagcctgtggtcccagagggtggtctatttagttcttgactggcacggtagcgccgggagatgttttcttgtatgttacttttagttaccgtcttatttgtttggtctgcagactgactggcacagtggagaaaccgcctcgaaaacggagaagcaggtaaggcagtgccttcctattttgcttcatgtttttctttttgcttggctgcacctgtgccgtactgcataattgtatactgtcagtagatgaagtttcttatttatcccccttttaaaagaatataaccacatgcatgatttttcttttgaggacttcaaattactacctctacagtcgattttttttttcttggtatctaagataatgtgggaaatcttgagaaatcctacttttttactttttgatgttgtgtaaggatctcagctatttttttttttaaccttagccataatttcattttctccagcatctctgtttaaaaagctcatcttggctggggtggctcatgccttcaatcccagctctttgggaggctgaggcaggaggatcatttgagcctgggagttcaagaccagtctgggcaacagagcaagactccgtctctacaaaaaattgaaaaactagccggtcccataaatatatacacctactatgtacccacaaaaacaaaaaattaaaaaaacaaaaaccaactagctgagcgggtgttgtggacctgtagtcccagcttctcaagaggctgaggtgggaggattgcttgagcccaggaagtcaaggctgcagtgatgcagtgagccgtgatcatgccactgcactccagtgtggggaacacagcaagaccctgcctcaaaaaataaactaattttattgagcatctactatgtgccaagtactgtgtacgaatgctctatgtgtatcttctcctgtaatcctcaaagaaccctaagagaatatgtagtgtcactattttacagaagagggaactgcgacacagagaggccaaatatttacccaaaatcatgcatctagtaaaagataaaac

SEQ ID NO: 17161 - DNA, 942 bp, Artificial sequence
  DNA replication origin
cgcattccacggcccctccgggggcgcgcccgccttgcccctcccggccccgcgccgccagcctcacccctcggcgccccttccctcacacgcccctctcacctggcctcgaggaggcgatcgcgcccagcccgcgccgccgcctgcaggcgcccccaaggtccccccagcctgcaccccccgcccctccggtctctgcgccccgaatgctccaccgccccgagccgctgcccctgggcccgctccctggcccccaccccatccccaaccccggcctccacccagcccccgcacctgggggccaggcgactccgcggctgctggggctgccgggctcctctgaccatccggctcctgctccgccgcgggagctgctccggcggccgcagggctcgctcgggaagctgaggcggcggaggctggagtaggcggagaggcgggaggagggcctcgcgcctctgccaggcttgccgcggggcccgcctcctccgcgcctctcctcggctcccattggctagagcagtagtgtggacggaaatctgtcagtcgattggacgctcggcccgtcacatcccgcgctgcccacccagaggtttggttgagactgcaggtggcggcggaggtgccttagagattgctagcagggccggaggagaccctagcgccaccatgcgtctaaaagtaggaactgcacccccggctccagacacctgccccaggttctcctggctctgcgtcctgcataccacacacctgctggcgcccctccacctctgcaccacgccaggaccgaaaacaagccctgaaatctcccaatttcttctagcaggtgagacagtgaggcaactctcacaaacgtgtttccttttaagccacctcgaatgcgatccttgtccctacatcttgctgaaattgtctcacagctcacagctacccctcaaa

SEQ ID NO: 17162 - DNA, 1076 bp, Artificial sequence
  DNA replication origin
acgacagcctcagggggcagctgacctagggctgcctaaggcggaagtgggagcccctagccgcccgggcggaactacagctcccagaggcccccgcggcgctgcgcacgcgcgctggcgtggcggcagcgccgctgcaggacgcagggaagccaacaggcgagtggcgaaggtggcggcagcggcggcgggggcagtcaccggctagggcgacggctccgaggccgagtggcggtccgacagagtcctccgtgtcctcccccgcatgacccccttggtgagtacgcgtcccgatttagtccgcgggctgtgagcggctccctgcctcgcggccgggttgctccggcctagggccgcagcctgtctctgactgcccggccgtcaggtccaactgaccccggggtcctgggctcttcccgtcagtgtcgggcgaggtgggggtcgggggacactgggttagacccaggggagagatgtggcggcgcgcaggagccagggcggcctggggctgaggagagggagagacgcgtgggggatgggatgggaagggacaggaggaccgcggggcggcctcgggtgggggccagagacgagaggcccggcaggtagggaactgagtataggaggcgagaacgaaatggaatgtcttctgagtgtcgctgataaagatatcgtgctgcagggaagcttgacaagctggacacacgggtctgggggcagcccacctaacacagacactcactgtacttggcatctttccacttgctgtcggaggtctgaaagtgagggagctgttggttgtttccatcccttttcttttaacttcaccttttattgactggcaaaattgtagtgagtgctggctaggcaaaccacagaagtacacccagggttctgtgtataaatgtgcataaaaacagggagacatagtgataggttcagatgagaactaggtcaaaggaggaatcagtgtttttatttttaaatttatgacgaaaatcagttctgagcaggactttgaactagagaggggttttaaactggagttcattgatggatagaattagaagggtcct

SEQ ID NO: 17163 - DNA, 1067 bp, Artificial sequence
  DNA replication origin
ggtgctggccatggactgggctaggaggcctgggcagagcggagaagtaattacgctggagtcagggctggaatctcagctctgccactcacctgcttcgtgtgagctcggacaggcctgacctcgcagagcctcagcttcatctgtagaaccatgggaacaataatgcagtcatgcgccagagaaggacgcttcggtcatcaagggactgcatgtacgacagtggtcccataagatcacaacgccgtatttctcctgtaccggttctatgtgtagatacacaaatacttcccactgtgccacggttgcctacagcattcggtccaaagacaggcggcacctgagtgtagcccaggggcaagagccaggtgtgtaggggccgcaccatctcggctggcgtaaatccactctatgctcttcgcagctgatgcatttctcagaatgcatccctgttgttaaggacacaggactgtcctgccaccccacagggctgatttgctgagggtcacaggagagattctcacggctggcccagagcatgagctccagggccctcactgttgtcatctgcacaagtgttaagtgccacgtccccgctgggcccggtaggcagtggtgggcggtgactgaaggatccagtctagacagacaaccatgttaattcgcagagctcaggccaggacagtggggcggtgagggccttggtttctggggtttacggtggggttggaggctgggtctccaagggcctctttccctggtgtgtgatttttcaaagaatccaggacagagttaaacaggcaggtgcagtccctgaggacagatggcaggatgtggctggggggttcagaggagagctgggggctgggtggagtgagaggggcagagctctcgggatgagtgggtggtgctgggagacgagcagggtcagagatctggagaggggcggaaagaggttgcaggcctggttcagctgccccaattccacataaaaacagtcagggctcggtcctcggcctcagtttccccctctgtaaacgtggaaatggtccctccctgtggtggcg

SEQ ID NO: 17164 - DNA, 1377 bp, Artificial sequence
  DNA replication origin
tgcccctgtcgcccctgcccctggaccgacagcccctcctgccccttctgccggccgccatcgcggtgactcagcctcgcagcagccctgagagaggaactactcgccccatttcacagacaagggcactaaggccggcagaggggcggcggctcgtcccggtcacccagggcacctccagcactgcccctcccatggggaatggccgctggcgtgggaagggcgctacatacagtgtcagtattacttctgagccgctcagaactttctcgatggcaggacagagagaatgcaaagcagctcaagtcaaagagcgcttcggggctctaaagccaagggaagaaccgtgcgaagatggcttccagcagcccttccagcaggaaagcctctgattggccaagagagggtcacatgtccatctctgaaccaataagagcattcagatcaggcctttgattggcaggcctgggtcccgcccggtttataaacaactcagagaggatgagccaccctcccagatcacacaacatggctgtcccttgctctgctcgtgtgtgtgtatgtgtgtgtgtgtggtgtggtgcgtgtggtgcatgtgtgtggtgtctgtgtgtgtggtatgtgcgtggtctgtgtctggtgtgtgtatggtgtatatgtctgtgtgtggtgtgtgtggtgtgtgtgtatggtgtgtgtgtgtgtggtgtgtgtgtgtggtgtgtgtggtgtgtgtgtgtggtgtgcgtatggtgtatgtgtctgtggtgtgtgtgtggtgtgtgtgtctggtatttgtgtgtggtgtgtgtgtggtgtatgtgtggtgcgtatggtgtatgagtctgtgtgtgtggttgtctgtgtggtgtgtgtgtgttgtgtgtgtgtgtggtgtgtgtatctgtgtggtgtgtgtctggtgtatatgtctgtgtgtgtggtgtgtgtgtgtggtgtgtgagtggtgtgtgtctgtgtcgtgtgtctgtgtggtgtgtgtgtatgtgtggtgtgtgtctgtgtggtgtgtgtggtatgtgtgtgtctgtgtgtgatgtttatgtgtgtggtgtgtgtgtggtgtatggtgtgtctgtgtgtgggtgtgtctgtgtgaggtgtgtgtgtgtggcgtgtgtctgtctgtgtgtgtggtgtgtgtctgggcccccaagctctggctcctgtaaggccacctttcctgccccctcctcctctgatcacatcgtcgggtatgagccacaagtcccacctgctctgctggacgggacttccctggccggggtggggcctcgctcatctctgaacctcctctcccaacccaccctccagggcgcctcccagccctgggcctcgcttgctgtgtggattctg

SEQ ID NO: 17165 - DNA, 1014 bp, Artificial sequence
  DNA replication origin
cttagacaggcattgatgatcaaccataaaactgtggctcacacaggtttggccctttcagggtgccagaccctgggctgaatgcttcacatgccccacaactgccctaggagttgagtactctatcaccatccctgtcttgtagatcaggaagctgagagtgagagggtgtgatttgcccgtggttttggagctcagagagaggaaaatcctgagctcagagagactcagtcctcgcagcagctctgagagaggaactgctcgccccatttcacagacaagggcactaaggccagcagaggggcggcggcccgtcctggtcacccagggcacctccagcactgcccctcccatggggaatggctgccggcgtaggtgcccctcaccttgcagctctggggttagcatccagggctggagggctcggaagaacccagttcacccagcacatgggatcagggcacagcaggagcgggaggtgcaggtgcaggcagccctgaaggtggtttaggaactcaggacttggtccagcctgtgacagggggtcatgcttgggtttcaagccggggcagctcatggtcatgtttggatttgggagctgcctggcggtcccatggtgagtggatcagagggaaagagacccacggctgagcaggcaggaggaggctgcaggtggccagggggagagggaaggggtgaggacagaggggtgagcagggatcccacagacgtgaccagcagagtcactggggggctccagccttggtgatctgggggctggcaggggctccgtgtgggacagcatctcccttcatcagggtccggccctgcagctactgtgcacctcctctctcacctctggatccctcctgttctttgtcccctggctggaggcagggggctgtggggccaccagcgaaactgcagtccccctccgttgatctgtgtcaaggcaaggatggggatcctggtgcctccaccacggcactccctccctcctgccggccctcgctg

SEQ ID NO: 17166 - DNA, 1759 bp, Artificial sequence
  DNA replication origin
ggagcgcctcttcccggccgccatcacatctaggaagtgaggagcctctctgccccgccgcccatcgtctgagatgtggggagcgcctctgccccgccgccccgtctgggatgtgaggagcgcctctgcccggccgcgaccccgtctgggaggtgaagagcgtctctgcccggccgccccttctgagaagtgaggagaccctctgcctggcaaccgccccgtctgagaagtgaggagcccctccgcccggcagccgccccgtctgagaagtgaggagcccctccgcccggcagccaccccgtctgggaagtgaggagcgtctccgcccggcagccaccccgtccgggagggaggtgggggggtcagccccccgcccggccagccgccccgcccggccagcggccccgtccgggagggaggtagggggggtcagccccccacccggccagccgccccgtccgggaggtgaggggcgcctctgcccggccgccccttctgggatgtgaagagcccctctgcccagccaccacaccatctgggaggtgtacccaacagctcattgagaacaggccaggatgacgatggcggttttgtggaatagaaaggggggaggggtggggaaaagattgagaaatcggatggttgccctgtctgtgtagaaggaagtagacatgggagacttttcattttgttctgtactaagaaagattcttctgccttgggatcctgttgatctgtgaccttgcccccaaccctgtgctctctgaaacatgtgctgtgtccactcagggttaaatggattaagggcggtgcaagatgtgctttgttaaacagatgcttgaaggcagcatgctcgttaagagtcatcaccactccctaatctcaagtacccagggacacaaacactgcagagggccgcagggtcctctgcctaggaaaaccagagacctttgttcacttattaatctgctgaccttccctccactattgtcatatgaccctgccaaatcccactctgcgagaaacacccaagaatgatcaattaaaaaaaaaaaaaaaaagactccatatgcaacttccaacacatggtaacttcgaccagattagcctttctatcgtaagtgatgagaaaactgaacaaaatataaaaaccacttttggacattagaaaatatgcagttcaggactgtgatccctgagagaaaggtaacaaaagaggtgagactgatgatcacctcagcttttctccagattttcgcaggaagagagaacccaaggaaagtatggcagtctcactgagctggaagacagagataagagatggaggaggctaaagcaacggaaatttgcagaatagagtatggaagggagaaagagctctagaaagagccccttgaatctttcactgtatactaaactatgcatgcctgcagtgggaccttacaaggctgggcaagcaactactggggagctataaactagagttctggctaaccagagtggagcatccagggcatttagtagtgattccaggaaggccatatcttagaaataggactaaattagccatagactaaagactgctctaatccttgcaaaaaccttaaaaggaatcttgaaaggatcaaactgatccacaagtaaattagcttctaccagaacaaagcccaatactctgtaaaggacagcacaatgcagacacctacagtgtaatattgatagtgtccagcattcgcttaaaaattactagacatgcaaa

SEQ ID NO: 17167 - DNA, 1255 bp, Artificial sequence
  DNA replication origin
tctttcttagtacagaacaaaatgaaaagtctcccatgtctacttccttctacacagacagggcaaccatccgatttctcaatcttttccccacccctcccccctttctattccacaaaaccgccatcgtcatcctggcctgttctcaatgagctgttgggtacacctcccagatggtgtggtggctgggcagaggggctcttcacatcccagaaggggcggccgggcagaggcgcccctcacctcccggacggggcggctggccgggtggggggctgaccccccctacctccctcccggacggggccgctggccgggcggggcggctggccgggcggggggctgacccccccacctccctcccggacggggtggctgccgggcggagacgctcctcacttcccagacggggtggctgccgggcggaggggctcctcacttctcagacggggcggctgccgggcggaggggctcctcacttctcagacggggcggttgccaggcagagggtctcctcacttctcagaaggggcggccgggcagagacgctcttcacctcccagacggggtcgcggccgggcagaggcgctcctcacatcccagacggggcggcggggcagaggcgctccccacatctcagacgatgggcggcggggcagagaggctcctcacttcctagatgtgatggcggccgggaagaggcgctcctcacttcctagatcggatggcggccaggcagagatgctcctcactttccagactgggcagccaggcagaggggctcctcacatcccagacgatgggcggccaggcagagacgctcctcacttcccagacggggtggcggccgggcagaggctgcaatctcggcactttgggaggccaaggcaggcggctgggaggtggaggttgtagcgagccgagatcacgccactgcactccagcctgggcaccattgagcactgagtgaacgagactccgtctgcaatcccggcacctcaggaggccgaggctggcggatcactcgcggttaggagctggagaccagcccggccaactcagcgaaaccccgtctccacgaaaaaaatacgaaagccagtcaggcgtggcggcacgcgcctgcaatcgcaggcactcggcaggctgaggcaggagaatcaggcagggaggttgcagtgagccgagatggcagcagtacagtccagcttcggctcggcatcagagggagaccgtggaaagagagggagagggagac

SEQ ID NO: 17168 - DNA, 1341 bp, Artificial sequence
  DNA replication origin
agaggcgcccctcagctcccggacggggcggttggccgggccgggggctgaccccccatcctccctcctggacggggcggctggcccggcagaggggctcctcacttcccagtaggggcggccaggcagaggcgcccctcacctcccggatggggcggccggccgggtggggggctgacccccccacctccctcccggacccccacctccctcctggacggggcggctggccgggcggggggctgaccccccccacctccctcccggacggggcggctggcagggcggggggctgacccccccacctccctcctggacggggcggccggccaggcagaggggctcctcacttcccagtaggggtggcctggcagaggtgcccctcacctcccagacggggcggctggctgggcggggggctgatccccccacctccctcccggacggggaggctggccaggcggggggctgaccccccacctccctcccggacggggtggctgccgggcggagacgctcctcacttaccagacggggtggctgccgggcggaggggctcctcacttctcagacgggacggctgctgggtggaggggctcctcacttctcagacggggcggttgccaggcagagggtctcctcatttctcagacggggcagccgggcagagacgctcctcacatcccggacggggcggcagggcagaggcgctccccacatctcagacgatgggcggccgggcagagacgctcctcacttcctagatgggatggcggccgggaagaggcgctcctcacttcctagatgggatggcggccgggcagagatgctcctcactttccagactgggcagccaggcagaggggctcctcacatcccagacgatgggcggccaggcagagacgctcctcacttcccagacggggtggcggcccggcagaggctgcaatctcggcactttgggaggccaaggcaggcggctgggaggtggaggttgtaacgagccgagatcacgccactgcactccagcctgggcaccattgagcactgagtgaacgagactccgtctgcaatcccagcacctcgggaggccgaggctggcggatcactcgcggttaggagctggagaccagcccggccaacacagcgaaaccccgtctccaccaaaaaaatacaaaaaccagtcaggtgtggcggcgtgcgcctgcagtcgcaggcactctgcaggctgaggcaggagaatcaggcagggaggttgcagtgagctgagatggcagcagtacagtccagcttcggctgggcatcagagggagaccgtggaaagagagggagaccgtgggg

SEQ ID NO: 17169 - DNA, 1181 bp, Artificial sequence
  DNA replication origin
ccgcccagccagccgccccgtctgggaggtgaggggcacctctgccaggccacccctactgggaagtgaggagcccctctgcctggccggccgccccgtccaggagggaggtgggggggtcagccccccgccctgccagccgccccgtccgggagggaggtggggggggtcagccccccgcccggccagccgccccgtccaggagggaggtgggggtccgggagggaggtgggggggtcagccccccacccggccggccgccccatccgggaggtgaggggcgcctctgcctggccgcccctactgggaagtgaggagcccctctgccgggccagccgccccgtccaggagggaggatggggggtcagcccccggcccggccaaccgccccgtccgggagctgaggggcgcctctgcccggccgcccctactgggaggtgaggagcccctctgcccggccaccaccccgtctgggaggtgtacccaacagctcattgagaacaggccatgatgacaatggcggttttgtggaatagaaaggggggaaaggtggggaaaagattgagaaatcggatggttgccgtgtctgtgtagaaagaggtagacacgggagacttttcattttgttctgtactaagaaaaattcttctgccttgggatcctgttgatctatgaccttacccccaacccggtgctctctgaaacatgtgctgtgtccactcagggttgaatggattaagggcgtgcaagatgtgctttgttaaacagatgcttgaaggcagcatgctcgttaggagtcatcaccactccctaatctcaagtacccagggacacaaacactgcggaaggccgcagggtcctctgcctaggaaaaccagagacctttgttcacttgtttatctgctgaccttccctccactattgtcctgtgaccctgccaaatccccctctgcgagaaacacccaagaatgatcaataaaaaataaataaatacgaaaaaaaaagcataaaaaaagatagttcttatgaaatgaaaatcacttacatgagtcaaaaaagaaaaacctcacaaaattattaacatatctaaaacagaaggcaaaagtaaaagactgaagaaagagcaaagaagagcaggggaaaaaaagctcagattgctgatgaagcaaagaaacaggcaa

SEQ ID NO: 17170 - DNA, 1346 bp, Artificial sequence
  DNA replication origin
gcccccacctccctcccggatggggcggctggccgggcagaggggctcctcacttcccagtaggggcggccgggcagaggcgcccctcacctcccagacggggcggctggccagggggagggctgacccccccacctccctcccagacggggcggctggccaggcggggggctgacccccccacctccctcccggacggggcggctggccgggtgggggggctgacccccccatctccctcccggacggggtggctggccgggctgaggggctcctcacttcccagtaggggcggccgggcagaggcgcccctcacctcccggacggggcggctggccgggcggggggctgacccccccacctccctcccggacggcacggctggccgggcgggggggctgaccccccacctccctcccggatggggcggctggccgggcggggggctgaccccccccccacctccctcccggacggggtggctgctgggcagagacgctcctcacttcccagatggggtggctgctgggcagagaggctcctcacttctcagacggggcagctgccgggcggaggggctcctcacttctcagacggggtggttgccaggcagagggtctcctcacttctcagacggggcggccgggcagagacgctcctcacctcccagacggggtctcggccgggcagaggcgctcctcacatcccagatggggcggcggggcagaggcgctccccacatctcagacgatgggcggccgggcagagacgctcctcacttcctagatgtgatggcggctgggaagaggcgctcctcacttcctagatgggatggtggccgggcggagacgctcctcactttccagactgggcagccaggcagaggggctcctcacatcccagacgatgggcggccaggcagagacactcctcacttcccagatggggtggcggccgggcagaggctgcaatctcggcactttgggaggccaaggcaggcggctgggaggtgtaggttgtcgtgagccgagatcatgccactgcactccagcctgggcaccattgagcactgagtgaacgagactccgtctgcaatcccggcacctcgggaggccgaggttggcggatcactcgcggttaggggctggagaccggcccggccaacacagcgaaaccccgtctccaccaaaaccaatcaggtgtggcggcgcgtgcctgcaatcgcaggcattcggcagactgaggcaggagaatcaggcagggaggttgcagtgagccgagatggcagcagtacagtccagcttcggctccgcatgagagggagactggggagacggagaggggag

SEQ ID NO: 17171 - DNA, 954 bp, Artificial sequence
  DNA replication origin
gtctgggaggtgaggggcgcctctgcccggccgcccctactgggaagtgaggagcccctctgcccggccagccgccccgtccgggaaggaggtgggggggtcggccccccgcccggccagccgccccatccgggagggaggtgggggggtcggcccccatcccggccagccgccccgtccgggagggaggtggggggggtcagcccccacgcccggccagccgccccgtccgggaggtaaggggcgcctctgcccggccgcccctactgggaagtgaggagcccctctgcccagccagccgccctgtccgggagggaggtggggggttcagccccccgcccggccagccgccccgtccgggagggaggtgggggggggggtcagcccccctgcccggccagccgccccgtccgggaggtgaggggcgcctctgcccggccgcccctactgggaagtgaggagcccctctgcccggccaccaccccgtctgggaggtgtgcccaatagctcattgagaacgggccaggatgacaatggcggctttgtggaatagaaaggcgggaaaggtggggaaaagattgagagatcggatggttgccgtgtctgtgtggaaggaagtagacatgggagacttttcattttgttctgcactaagaaaaattcctctgccttgggatcctgttgatctgtgaccttacccccaaccctgtgctctctgaaacatgtgctgtgtccactcagagttaaatggattaagggcggtgcaagatgtgctttgttaaacagatgcttgaaggcagcatgctcgttaagagtcatcaccactccctaatctcaagtacccagggacacaaacgctgcggaaggccgcagggtcctctgcctaggaaaaccagagacctttgttcacttgtttatctgctgaccttccctccactattgtcccatgaccct

SEQ ID NO: 17172 - DNA, 1590 bp, Artificial sequence
  DNA replication origin
ctcggccgccgccgccgcctcggccaggcgggatccgagccccggcggccccgggggaggcagcggcggcggcggcgggcggcggcggaggaggaggcctgcgggcgggccgcggggagcgagggggggcggaggaggaaagtttgggagcgggcgggcagaggcggcgggggcgctgagcccggaggagggccccggcgggccgcgcgccgggcggacagccgatggatagggcgggagaagtcgccgccgccgccgccggagccgcgcacccagccagcagccgccgcggaccgggctggaaggccgctgggccgagggattgacaggctgccagtgccactcactcactgcggccccgcgccggggggagggacgggggctggcaagggcgggggagcgctcctcagaccccgcccccggggcggtgcgcgcgctcattgggctctgcgcctcccgccgccgccgccggcaccgcccccggggcccggcccgttccctctggcctctgatactccgcgctccggagtgtgccgccggatcctcgctccaacctcgtcgcgtcctagccccccgggatagaccgggccggcccacaaacggtgtgcccgcaccccgactcctgctccatgcttttggcagtcatgggagcggggggttgtgtatgggacagtgggcaactcgctgcaaagccaaccgtgtgctcccccgccgcgcccgtgagcttcacgcctcggacagctcctggtgcactttcccgctcttcctgtcaggaggtggtgccctctgggtaccaggccgctcgtcccgggccaatcgcaaagcgcttagagccgaatggggcgggacagaggcaagaaagggtcgtcccaattggagcgttcgaaaggttctgggcagaggcggggaagcggcgagtgggggcctcgccccgcctgcggtcgccatggtaaccgagagggcgcagctcagcgttggcgccagcaccggggtcttgtgctgtccctcaatgggtgaccagttaaggtgggaacctgtggtctcacatacttgaagtctgagctgagtggacctgactgccatagactttccattgaaaggggaaatgtgtcagagagaagcgagtctgggaggagggaaagtgccttcagtccaggactaatttcaaggtttacaacactttacacactctgcaactcctgataatccagggactactcctttggcagcgtttgctattcgatgcctccagatgtactgaagctgcaaaaacgagctcttcattacaaagatacgtttgtttaggaagagactggatttcacttgtcaacttaccccatcaccacgagtcatttaatgttggtaacgccagccacgatttttcgtatctataacaccccttcttccattgaattctacctacaaataactgaaggctcacattattttggaatatggacctccgcctcttgtggagacttgagattgctcttaagctgatttcccaaacaggggctgcaatgtgtgttcccgattttagattcattgagctcaccctagatgagtcctttggttcggtggttcggaaaa

SEQ ID NO: 17173 - DNA, 945 bp, Artificial sequence
  DNA replication origin
tcggtgcggcgcggattccgtggcgtcctttcccccgtcctgcccctcgcagcccggccccctcccagggatttaaacctcccgccccgaccccgtgcgggccgcgccgccgggaagtgtaactttctcctccggcggggagtcccggcgccggctcccgcggccgcgggacgacctcgcgatgcgggcggccacccgggcccggcgcggggcgatgggcggttccctggcgggtccgggtgcggacggccaagttctcggagagggagggccgccttgcaaactttgccgagctgtcaccctcccgctggccgcagtcggccggcctcctctgcacaggagcggacgcgggagcccctccgcacccgtcccctcccccgggtcgccttcgcctgcccccggggcgaggctccccgcgcgggttcgcgtcgcgtctgcagtggccgaggctgctgcctgccgggcagatgggtccgccttgttccggctgcagctttcgccgccggggcttgctggctgtcgggaactagtcaactggagtttttgttgacttcccacggttcaaaagggccttccagaatggggggctggaattaaatcttgggtctaacttaaaggaaggcgccatattattccataggtgatgctaatacctttgtgtttcgttatttgttttttaggaaacatgccctgaactgtcacagaatgaaaccagcgctcttcagcgtcctgtgtgagatcaaagagaaaacaggtaagacgctgcgccccgcagtgggcctggagacccccgaggtgggggtcggagctactccttcgactctccagttgagagctgctgcttttgggcaccgccatctttgatcattctctccttcccacgtcctgatcttgagaaaaaactgcaataaatctggagtcaatttctcagttctgctcctggtg

SEQ ID NO: 17174 - DNA, 1256 bp, Artificial sequence
  DNA replication origin
gccgcccctactgggaagtgaggagcccctctgccgggccagccaccccatccgggagggaggtggggggctcagccccccgcccggccagccgacccgtccgggagggaggtggggggatcagcacctcgcccggccagccgccccgtccgggaggtgaggggcgcctctgcccggccgcccctactgggaagtgaggagcccctctgcccagccagccgccccgtccgggagggaggtgggggggtcagccccctgcccggccagccgccccgtccgggaggtgaggggcgcctctgcccggctgcccctactgggaagtgaggagcccctctgcccggccagccgccccgtccgggagggaggtggggggtcagccccccgcccggccagacgccccgtccgggagggaggtgggggggtcagccccccgcccggccagccgccccgtccgggaggtgaggggcgcctctgcccggccacccctactaggaagtgaggagcccctctgcccagccaccacctcgtctgggaggtgtacccaacagctcattgagaacgggccgggatgacaatggcggttttgtggaatagaaagggggaaaaggtggggaaaagattgagaaatcggatggttgctgtgtctgtgtagaaagaagtagacatgggagacttttcattttgttctgtactaagataaattcttctgccttgggatcctgttgatctgtgaccttacccccaaccctgtgctctctgaaacatgtgctgtgtccactcagggttaaatggattaagggcggtgcaagatgtgctttgttaaacagatgcttgaaaggcagcatgctcgttaagaatcatcaccactccctaatctcaagtacccagggacacaaacactgcggaaggccgcagggtcctctgcctaggaaaaccagagacctttgttcacttgtttatctgccaaccttccctccactattgtcctatgaccctgccaaatccccctctgcgagaaacacccaagaatgatcaataaaaaaaataaaaattaaaaaaaaaaaaaaaaggaacaaagttctgacacacatgacaacagagatgaaccttgaaaacattatgctgagtagaataagccagacacaaaaggacaaatattgtaggattccagatctaaactaggcaaatttatagagacaaagcagattagaggttaccaagggctaggggtgggggatgggaggttattgcttaat

SEQ ID NO: 17175 - DNA, 1176 bp, Artificial sequence
  DNA replication origin
ctcacctcccggacggggcggctggctgggcggggagctgaccccacctccctcccagacggggcggctggccgggcggggggctgaccccccccccacctccctcccagacggggcggctggccgggcggggggctgaccccccccacctccctcccggacggggcgtctggccgggtggggggctaactcccccacctccctcctggacggggtggctggcgaggcagaggggctcctcacttcccagtaggggaggctgggcagaggcgcccctcacctcccggacggggcggctggccgggcggggggctgacccccccacctccctcccggatggggcggctggccgggcggggggctgaccacccccacctccctcccggacggggggctgaccccccccacctccctcccggacagggcggctggccgggcggggggctgacccccccacctccctcccggacggggcggctgccgggcggagacgctcctcacttcccagacggggtggctgccgggcagagggactcctcacttctcagacggggcggatgctgggcggagggtctcctcacttctcagagggggcagctgggcagagacgctcctcacctcccagacggggttgcggccgggcagaggcgctcctcacttcctagatgggatggcggccgggcagagacgctcctcactttccagactgggcagccaggcagaggggctcctcacgtcccagacgatgggcagccaggcagagacgctcctcacttcccagacggggtggtggctgggcagaggctgcaatctcggcacttttggaggccaaggcaggcggctgggagatggaggttgtagcgagctgagatcacaccactgcactccagcctgggcaccattgagcactgagtgaaccagactccgtctgtaatcccggcacctcgggaggccaaggctggcggatcactcgctgttaggagctggagaccagcccggccaacacagcgaaaccccgtctccaccaaaaaagtacgaaaaccagtcaggcgtggtggcgcgcgcctgcaatcgcaggcactcggccggctgaggcaggagaatcaggcagggaggttgcagtgagctgagatggcagcagtacagtccagcttcggctaggcatcagagggagac

SEQ ID NO: 17176 - DNA, 884 bp, Artificial sequence
  DNA replication origin
atcacctgaggtcaggagtttgacaccagcctgaccaacatggtgaaacttcgtctctactaaaaaaaaaaaaaaaaaaaaaaaaaaaaaaaaacaccaccaccaacaacaacgaaaaataacttacctgggcatggcggtgggcacctgtagcccagctactcaggaggctgaggcataagaaacactggaacctgaagggcagaggtttcagtgagccaagatcaggccattgcactccagcctagatgacagagtgagacaacatctcaaaaaaaaaaaaaaaaaaagcaaatctttatggtgtccccgctgtgtgccaggaactcctccaggcgctggggacacagtggtcaacaaagctgacattctcgtggcagagacagactttaaacaaaacagataaaaatgtggcgcgtgccagatggtgatgccgtggagatgggggagggagctgcaggggtggggatgtttaacagggagtcgtgtgggagtgtgagagcctgggggcagctctgggcagagggatctgcaagcacaaagatgaggtggccagtgtggtctcagaggggacagggaggtcagagagggaccagagacgcagagggcattgcagggtgtgacggaggggcgggacctggctcgggccttggagaggagccccctggcagctgggtgcagaatggtgaatgggtgaaggccacctgggtagacgaacttgggaagcttttgcgacaatcctggcttgatccagggtggatcaagagggaggaggtgagaagaggtttatttcggatgtggagtttgagaacagcgaagcacaggatgaaggcccaggccctctggcccaagggctgagcacctacttagcaccaggtctggga

SEQ ID NO: 17177 - DNA, 1002 bp, Artificial sequence
  DNA replication origin
ggacgtgcggtgtggggctgattggagatagacggacagtacgaaaagatggatcgttttaatttgcaccaattatattgaagttcatgggatcatcttcttcaatcttcatgaatactttattttctggctgctacagagctattaaaaagaatgattgaggcacacggcaggccgggtatattttatgaaatatcacctttaaagaatttgagtacgccattttcataatgagttttctagtacctaatcctcttctctattactacatttaagaagtggattgatctgggaagtgcccaaggtgcaggtaatgatacattttgccaggcgcaggcggtgataatggatcacgttttggcgaggaggataatggatgggtgcccagcggaggtgcgtgcaggagtgggcggtgtccgtccagccccgatgggggcctgtgctgagtcaggttcctgtccttgcttggtgactctccggactccagctccaggctggcgaggaaggcgtggaggccagaaaaggagaggacgaggcgggggaccggggacgtgggagctgagatggggaagggctcaggggtcttgggccagtggggaggggtctgtaggctcagctgtagggagaggctggagttgcctggtgtggggtaaacgcccctgatagcagtagcttaagcatgcccttagaatgcccctgtaaggcagacacacctgaaggtgggttctgagctagggaatccgggagtggccaacccggaggttcattccttgtctataggaacatctgagacccccgcccatcctgtggaaaagaggattgaggctgtgaatgttgccacgtggaggttgttaagtggatgacactaattgaaaacgacgtataaactgcacgctctctgccgtggttgtggttctcctgtccggcctgccgcacctagactctccaccttgtatgtaagcccctggtaaccccaaggctggtttgctggctctaggtgtc

SEQ ID NO: 17178 - DNA, 991 bp, Artificial sequence
  DNA replication origin
caggaactgggctggatttttatatttgatgagaaagagcctaaacgctatctgatctggaataaagaaaaaggagcattgaccttgactatgactttagctccagccacctttttaagagtaaattgctgggcaggtgggggagggctagtcatggaacgaaactgtaagctggaccaggtgtgaggaggggaggtgataaaaggattatagggtggaggagcagaggctgaggaagaattgggacctagctcggcctggtgaggaggggagaggtcagataggtctgtagaaaatgaagattagaaagactcagtgatgcttggggttgggactgaggggacaggtgggagggaaagaaggaagatttgggacgagttgcattgggaacagaggctagggagtgactgatgtgtaaaagaatgcctggatgtcaggcacctcagaccatttgcccattttacgacaagaattatttaaatcttgtaggatggaaaaaatggaaatgccgttttctggctatttggaactactgtcgagtttgtattggggtcaagcggcattgcagaagaaaataaggcatttaggttttaggtcaggtgtgagttgaagaggttttaagttcttgagaacacaggctaagggagaagaaggaggaatggagggtggaaatttgcccatagtgaaggaagcaagcccagagaaaagagagagtagagacacggagggaaggggttcgggggttcttaccctccagaaaaatgggaaaggggttggggtgtggaaataaggggtcagggcacagagataagaggtggggcatggaaataagggatcagggcaaagagataagaggtcggggcatggaaataagggatcagggtgcagagttaagaggttggggcatggaaataagggattggggcacagagataagaggtcagggtgtggaaataagggattgggggttcctgacccctagaaaagtggg

SEQ ID NO: 17179 - DNA, 931 bp, Artificial sequence
  DNA replication origin
cttggagtgaagaagcagcagtgtcagccctgtgttgtgagaggtgcctgggactcatgcataaattgctggatggaggcagagagataggtaggaggctgccctggccatccaggttgactgtgactgacacaggcttgcactagggtggcagtggtggaggtggccttttgaccacttttgtggtctggttggggatgaatgtcaagggaattgctgatgagtttccttatgggttggaggtgagttgagggagaaggggaggtgtcaagaatatctcccaggttttggcctgagcagctgggacaatggggttgccatggaggagggtttagggaggacaatcaggagcgtggctgtggccatgtcaggtatatggtgctcagtgcacagtcacagggaattgtggaccgggcccctgtgtgtgcaggcttggaggcagggggaggccagggctggaggctaaactcagggactcagccatgtgacgggattggaagacataacacaggaaggggccacctgaggagtgtgtgcagctggaggtgtctgaggcctgagccctgagcacgtcggggttttaggatgagaagaggaggaaccagcaaaggaggccagggaggatggtcagagaggtgggagcacaactgagagcatcttggaagccaagcagaggcagtgttttcaggaggaaggtgcgaatgaccatgtcaagtgctggctagaggacagatatgagtggattgggcaacaaggaggtcaggaggtcactggagaccttgaccgagggcactttggtgtggtagcagagtgaaagcctggtaagactgggggccagagaggatgtcggacccctcctccaccctctcagcagttattccaaacttttcctatgtccccaaggatcccctctccccacccctccacttgc

SEQ ID NO: 17180 - DNA, 621 bp, Artificial sequence
  DNA replication origin
gggcgtgacctggctgtgcagttggccgtatctgggcgtctcctgatgtggagtcggcaggtgggtttccacatcacctcaaatgatttttaagctgattgaactggaacagctgccacccacagcccaaggcagggccccaggccagccccaagcagcgacagccagtgtggctggacaccgagagcagggagggggttgcgggagaggaggtcggagaaggggggcagggaggggagcagattgtggagggctttggggttgtggctggcctttgaagtgaggtgggccccctggaggagggcttggagtgaagaagcagcagtgtcagccctgtgttgtgagaggtgcctgggactcatgcataaattgctggatggaggcagagagataggtaggaggctgccctggccatccaggttgactgtgactgacacaggcttgcactagggtggcagtggtggaggtggccttttgaccacttttgtggtctggttggggatgaatgtcaagggaattgctgatgagtttccttatgggttggaggtgagttgagggagaaggggaggtgtcaagaatatctcccaggttttggcctgagcagctgggacaatggggttg

SEQ ID NO: 17181 - DNA, 1021 bp, Artificial sequence
  DNA replication origin
cccgggccacgctcgttacagagcacaggtactggctaaatgtgtccgatcattcatcatgatttcgccctccactttgtcacagcgtgaggatttaaggaagatagatggtacaagatgttgtctcctccgcagacgctttctgctctggtaagtgtgtccgatgcagaattattttgccactttattatttcctagtgagtgtttgtcagagcttcgcctcttggaaggagcgagttgtttcctgtcactcagggatgtcgcgggagcggtgatgcttggctgggctcgccagccagctggaacccgggctgggtccccaggcagggctgtggggggtcctgggcgtctgagccacagggcgaatgtcaaatccaacagaaatcaggggaggcaggctttgggggaaggcggggcacgggggctctgaacacgctggtttgagggggttggggggggaacgttgcaggacctggcctggctgtaggccaggctgcaggacggggagctgtttgaatcagtgtccaaagggctatgagagcttggccttgagctgagccagctggagagggcatgggcaaggctggggtcctgcggggctgctgatggccttagggcagtgtggccaattctggtgcctattgctggcaccagacgagcttcctgccctgaccagggcaggcaaggggctgagcggtgaccagcagggatcctagttgggtgaagatgacatgaggcagaagacggggggtgagttcagcttgagcccaaagcccagcccgtagccccaggtttaggtccgggaacccttgggactatttggaattccttccaggtcatgctgggacacaggggtgtgggccctggaatctgaaggtgaatctggccccgagagaaggcaggaacatgggagccaccagcctgtcctgtgatcctgtctcactggtgttcattcacaaggatctctgaactggccccatcctccagggtaccagtgacccccactgtctctgcccctcaa

SEQ ID NO: 17182 - DNA, 1408 bp, Artificial sequence
  DNA replication origin
gctggggcggcggcggcggtggctgcggcggcggcgggtcccggctccgtctcacgcagaagcagcttctcatcgcccgggcggcgcgggaggggccgggcccggggcccaggcggcaggagccggcgccgcagctcgagcgcgagcctcaccgagagcggcggcggcggcggcggcggcggaggggcggggcgcggcctggcggcggcggcgacaacggcagtggcggcggcggctccctccgcgggccgcggcggcgggccgggctccgggcctcccggcgctggcgctggttcaggatcgggggaggcgcccggcgcccgaggctggctcgggcgggaggagggagagggagccctggcgtcccgagcccgcgccgccgccccggccggcaccccgcctccccagcctccccctcgacccagcccgtcagccgcaggcagggccccggtgcgcccacccgggcctccccgagcccgccggcgaccccagtccagcctcaggcccccgggagcccacggcctctagagcctggggcatcgatggtccccgcccccaggctggtcttttccagggaccctcagcccacttagctctcgtaggcctcgctgtacgcaagaccggtcttccgctcggctgcagatccctggaagcccccaggccctcaggctagaagttggacccttctaaggactctccgcccacccagccattctaggcttcactgaaccctagaatccttcagctcatcttcccccaccccccagctcacctaaggtgagctcagccagtcgtctcaaactaaccccaattgcctagcaattctcttatattagttagatgatttatccccagaagcctagaatcaggtttatggggccagcctcaggcaagcatctagaagaagtttttagcaggagtcctaccctgcagtacttggggaaggcataagccaaggataaaatggagctggatggttgggggagggtccagagcttgaccctcagctagagtggctggtaggaaaggcggactctgcgccttaaccaaccatgccccccacaccgcccagccaggcaccccaggcagaggccagcgtgtgcaagatttgaaaggtttcctgccaggaggctggagcattcgttaggacttgaggaccatgcaggagtgatcagcattgatttgctaatgcattgagtctcattttcacacattctaggcttttccataatagctgtttgatcctaaagagaagggtgccaagcagaatgggctgtcgggggaaacatcctgtagggaagccatgcacgtgtgcattcccagtgtcttcactactcagaaatgccatgggttcagatggctttacagcaagccttatcctcccatcagggcacagatcatccctatg

SEQ ID NO: 17183 - DNA, 1960 bp, Artificial sequence
  DNA replication origin
ctgccgttgtcgccgccgccgccaggccgcgccccgcccctccgccgccgccgccgccgccgccgctctcggtgaggctcgcgctcgagctgcggcgccggctcctgccgcctgggccccgggcccggcccctcccgcgccgcccgggcgatgagaagctgcttctgcgtgagacggagccgggacccgccgccgccgcagccaccgccgccgccgccccagcggggaacagttaagtgaggcccgggcgccgcggaggctcggcggagccggccctgcagccgggagggcgggcgggcgggcgcgggcccccggccgaggggcgggcggacgggaggagccgggccgcgccgaggcctgcgggctccgtgcccggcccgcggcggggacaggcccgggcggcctttgcagagccccgagcgcgccgcggctgccggtgcccgggctcggcctggcggcgagaggcgggagaagctgggggacccgagtgccagcagcgcccccaaggcccgggcaggtgaggggcgccgagagccacctctgcccgcgtgagagggaggcggcccacctgggcacagactgggaacagtcaatcgtttgaccggcctggcctggggtcctgctctctctggtcacgtgggtgcagaccaacgtgcacctgccccaggagcatcactgcctctgtgacctgggcacagcagagaggacacctaaaccctcaggcacctgtctggaaggtgacatgcccagcctgggtacccgagacccagagcacccatccaggaacatggtgggcacgtcgagcaccctacagtgactccaacaccagcgagacgggaggagcaggggctgggacaagagctgaggcatggcaccaggggacatcacatcctcagaggcaggcaccagggaacggggtagacccaagagcatcttttgtcctctttgttaccaacacacaactgttctaaatcagcagcccttctcaccatgaaagatgagactcttctgttccctgcccctcaacacctcttgcacaaggcactgaggaagaccacaggagggcaaaaggcaaatggtggttgccccttccctgcttcctgcccccacccaagaaccagagcccactccgattgctgccacaaaagcagacagcagaccagctcctcttaggggcctttgtctctcgtggttccttctcagtataatctcattgtacatttctcgacagctggctggatctcatctcgttttaacagggctgggaaatcttatcagcggcaccaggaaagcttagagagttaaaaaataagctctgtgaagccttgactaactgaaaaactcaatgtgctaggatgtttagttacagtagatggtgacacctttcttgcttgttagaaatcatgtggggtccttggagatactgtaccatgctcagaatctttaaatagggcctcagagagatgaggcttctgcttgggacccgggctccaagccccatgggaagcagttgacgtggcgattactggttcatttaaacctaaacttaccttctgtaatccatatttttcattccttccttctaggctttaggtcacactcctaatttaggttcaaggcatttttcttgccctgtctccatcctgctagggaccttttaccacttccaactggaatgttgtgccatggttatgtgcagggagtttagaattagccctcagcttaagtcttggctttcctacttactttgtgcccttggacaaattattgaacttttctgagtttcagtttcctcatctgtagagtgaaactaatgatagtattcatctcatgggattatggcgtgatgtaaatgaaattttgcaagaaaagtctagctcagtgcctgctacatggcaagaagtcagtaaacggtaggggtcattatgagaggtttgttaacggatgaatgagaggagta

SEQ ID NO: 17184 - DNA, 1188 bp, Artificial sequence
  DNA replication origin
ctcactttctcacatccagaataagcaggaactttgtaccattgtacctttaaaccctctttcttcatgtttctgaaatgcctatacccagtcccccaacttttaagtaaaacttttctcatccttaaaatccaggttacatagccccttagtgaaactttttctgaccattactcattcatttatttatttgctcattggtttcacaaatgtttattggccacttagctattgtccaaggcactggaaatccagtatcctgagaaggctgggctccatcaggtgagaggtgagagatgaggatgggcaggtgggtgagaccagatcatagccacgctaaggaatttgcaattattctgagggtggtgggagtcactgggagattttaagaaaaaagaggctcttagacagatgtgtgttttcccaagatcacttggttggcacggaaaacccttcgggggaggataagcagtgaggcaggtgggcgtgtgtggaggctgtgaattcgtgcagagtgagagctagagcctgcgccaggctattgacaatggacatgtgaagcagtacgtggatcctggggctgtgggagcgtgggacgtgggaacccaaatatgtatttttgatggcaagaatgggttgaatgttgggaggtgggggagtagggaggaaggggaaggatgagagtgccacaggatgtcttgctggccatgggtagatgctggggttctctgctgggacaggagcagagacagccaggtcgggtggaggcgggagggagactcttgggtcagttttgaacaccttgagtttgagctgcttgtatgacatctagcggagccctggggctgaaggtctggagagaggtctgagcaccatcctcatatagcaaggactgcgggcataagtgggcttgtctagggagggttgtgggactagaagagagggtgtgccatttcagactccactaccgtggagggtcactggttaaggatgggtagaagaggaggcactcaaaaggggactaagcctgagcatctggagaggtaggtggaaaattaaagaaaactaaggggaaaagtgtatttctgtaagaaggagtggtgagtaatgttcaaagttgccgaagtgaaaggagcctgaagggtgtccattgggtttaatgcaaggagatggttgtgaacttggtgg

SEQ ID NO: 17185 - DNA, 954 bp, Artificial sequence
  DNA replication origin
gcaggtggatcaccaggtcaggagtttgaggtcagcctggccaatatggtgaaaccccatctctactaaaaatacaaaaattagccaggtgtggtggtgggtgtctgtagtcccagctacttgggaggctgaggcagaagaagaatcgcttgaacccgggaggcggatgttgcagtgagccgagattgcgccactgcactctagcctaggcgacagagtgagactctacctcaaaaaaaaaaaaaaaaaaaaaaaaaaaaaaagagacatggaccccttcttccaggagcacataatctaatgagaggtacaggtggctgcaatgcagcgacatgtggtcccctgtgcaaggcacaggcagcttgaacaggagaatcattgattacctttgcctccaagacatccggatggacatcacagaggaggtgcaggaacagggtcttgaaggatgagtaggagttttccaggtagaaaaatgggagaaaagcattctaggcagagggaatagcatgtgcaaaggtagggaggcatatgagaggtaagggtttgggaagctgcaaataattcagcaggggcatcagtgggaggtgagccaggcccaggagggaggggcacagaatggtggggactcagcattcattcctagggtgatgagggcagagtaagtggaggagtcctgttggctggatctgggctgtgtgggggatgaatgacaggggacagggtgatgtgggaggcaggtgtggctaggaggctgatgctgcgatccaattgagagggcttgaggccagaactgataataccacagcagcaacaagagaatgtagtggccgggtttgaaaacagttagatgacagaactgtccagctgcagatggagcgatcccaaagggctccaggtgggggccgtggctaactctagggggagatggtggagctatcccagagatgggag

SEQ ID NO: 17186 - DNA, 1530 bp, Artificial sequence
  DNA replication origin
taaaggagggactgttgaccttcccattttccggatgtgaatgttgaggctcctgatgtgactgcccaagcccaccctttaggggcgggtggagctggggggcttgctcgggcctctccagtcgacccgcattcccgaccaaagcgagcgcggctgggcccggccccgcagtctatgggagccaccccaggtccacgaggtccggacgccgcagggggtgggaggccggcggggcgctgcggggacttgcgcggcgggctagcctccttccaaacacacgtccgtagcgcggtgccgagggattgatttgcctccagtccgcggagctccgcctcgtgtgtgctggggtccgagcatccccagtgcgcggccggggcgttcccgcagggcccagcgagggccggggagccgggcgcccccgcgcggccggaccgcgtgagaacccgtgtttgggggcggagcgcagggcggggtcccgggcgggcggcacggtgggaggggcctcgtgcaggcggctctggaggtccaccctgctgggcaacctagaaagggaggtgccagaacccttgggttccaggggagaaagcaggccagagacctcctggggccctctcgctgggcaatggaactccaaggggctttgcctcgctgcgaagtgcctcttcctgggcctgcgggaggtgaggtggtcttggcccctgccaggacccaccctagggagcgccccccagtcagtgaggtggggtgctggagacctggcccgacatcatccctcttcctcagcgggaagctctcttgagctaactggggctggtgcttagcctggaagcagattgctagcgtgctcctgagtctctgcacaaggccaggggacaggtagggggaggaagctcacacgacctcagaccctcagtctcccttcctgcccgtggaggggcctggtggggcttccccgtggccaaacgccctctgctgcatcccccacccctgccgtgtgccttgccccaggccaagtatgtaatgggtttgctcaattcctcctccagaaagccctggttgctgctggctgctgttatcccagagccccaggggcacatcaagggaggtgactaagctgggccctgaactgggcctgtctcacctcatgagccatcctcaccttaaccccacaggacaggacacctccttccaggtgtgcataatccaggccgcgccaggagcggcactggagttggacatgcctgggctggaggccctgaggtgcccctgtctgactgtgtgcttctgagcactctctggagcctcagtttccttatctgctaaatgggccatccctaacttcaggactgtggtgatgacacacagaaggctacccctgctgtcctctgtaaacgtttgctgatgcccagtgaacaatgaaatacctccccccttgacatttgcttaccttccctgggaaacacatcctagtccagccccctctagagctcagggcataccttgcctcctccagaaacccttcctcactca

SEQ ID NO: 17187 - DNA, 1398 bp, Artificial sequence
  DNA replication origin
gttccgaaccgtgagatcatccgagtccttccttcatgcctcagtttcacatgtagccaacttctggggagatttttgaggaagcaacaagtttgagccaagaccccatgattgaaattctccaataaatccctcccagctgagccctaaggggctgtagttgcttcagcaagcagggacggcaggaaggggggcggtggggggggggtgttgcagacttcaaacaggacctggagtggtgggggtggcgggggattgtgccgggagaggaggccaccgagccagggctcagagttaattagcctgcatggtggcacctctacgcacagctctctccctaggcaagcatcagcaactcggcttctttgccgacatggcctctcatttagagccaagtctggaagagtaggagactcgaaccacatttagaatgaacgtttgcggcccttggaaggccccagcctgggggtactctgccctcccaccaggagttctgagggagctgaggttgtgttcaaaagccttgcaaacatcaagtgtggattgtcttcaggcactaggctgtgtctatcacctgagtgacgggaccatcatctcccccattttacagatgagaaaagtgaggctcagagaggcaaagccaccggctcaagggcatattgtggtggtaaggggaatccaggttggaattcatatcctctagtttacgccactggctggagatggggacctagccagagaccagcagaggacagttggccctgagtacacggccctcacctcagccctgacccctcgcactgtccgtgacattcaatcaggtgccggtgatgtctggcccagcagttggggcagggcctccccagcttcccggcgacaaatggttctcatttgaaagggaggttataaaaacacatgcccaaagacactgtcagggaactgaggattaatctcatttcagtcaaagaccatttcaaatatttttctgggggggagtgggggcggcacagccctggctgggaaggaagtcagagttgctggcgtgcccctcaggtcggcgggtttgaaggcggctgagatgccggctggtgggggccagggtcactccgtacctagtaaggcagagtctgacagaggaacgaggctttgctccacgagtccccaaggctggctttgcgggaggcctacactctggcgtggacgctcacactgcgttcaatatgttggctgtgtttcagggcagtttaagttgccaaaaggaagggaaggattaggcgcctgggacattttcattttctggatggtgtcaaaaagcggagtgtttttgccgtgtggctcaaccagagcgggccctgaagggcagccaggggaggggcactgccgccaagcctcctgccc

SEQ ID NO: 17188 - DNA, 1028 bp, Artificial sequence
  DNA replication origin
ttttgattgccttaatggattaatacccgagtaccatcagcgaggggcagagacccaaggctgtttctaatttcgaaaatattgcgcccgcttcctctggtgttatgacaaaaacaagtatgtagaatttgccttctcacttaaaggaacaggccgatttcctctaataattgcctgatgtaagaatctgcgtctcacacatggtgttgtctgttctaggaacatttcatggtgccaggggccagggtgctggcagcttgggcaggcccgggcgggcctgcgttgcgtgcatttggggcatggatcggtttggggtagcatccccgaaatgggtctgtgtctctggacagtagaacgcctctcaacctaaggccctggcagcgtccggggtgtggaggaatgtgttactgccttgcttataactcctgccgtgggtaagaaacattccatagggttgggggttgggggaggctgctagtcgggatttggagaagaatctccgctcagaccctgctgtatccaacagaggcatccggaaaccggagtttgctgtgggggaatagtttgcattctgtcctcatgatggggagaattggagttcagaggaagggatccgtggaagtgattgcaccattcccatcttttggttaagctgggtgtctggtggcggggggcagtgtctggggcctcctctgaggacatgaaggggaggtctcctggggcaggttttgtctggtctaggacatctagacatctaggtacccagtgggcagaagagggatcatctcaaacatgcagagtgcctgggtactgagaggggttaaaggatagttggaaaagacagagaacagaaaaagacagggagagccaaaaagaaatactaagaggaagaagagagacccacggagatactgtcataccctctcacgtgcgcacacacgcgcagagacagtgagattgcctttgaaggcagagggacaaggcctaattgtcccagggatgtgcacggcggcctggcttttcatcat

SEQ ID NO: 17189 - DNA, 804 bp, Artificial sequence
  DNA replication origin
gtgtggcaagcggtttcccaacagctgccgctccgctaatgggcctcccttcgtagcaatctgctgtgataacagacaggtttaattaaaaagaacacgcgtcctcctctgcaggaaggctgcggccaggatgtggggcctgcaatgaaaacttagctccataaagcccacacacaggcatgggtgcccggagctgccgagttttctaaaaggagcgcaccccgccccctgccatatctgttatttatcgagttaattttgtcctctggcagcagcatgaaccaactccgagtccctgagccctgaccctgacttgcctcccattcccaggctgtgccaggcacgggcttttgcctcctgtgggacaagagaggccgggaatgccagctttgaaccaggaaaacctgggaggggggacctgtccctgactttgtgatgctgggcaactgactcagccctctcagagctcctgtttctgcatccaggaatggggcagaggctgatgccgcctccgaaggctaagtgaggcctgaacgaggcaaggggaaaggtgcctggcacctggtgggtacttggaacgtgctggctgttgttatggttggagtgatgactgctagtggtgggactgctggatggagcccgggggccttggtgagagggtggctggaatggttgggcaggcccaggctggccctcaaactagtagacatggatactttaagagtggaattaaagctaggcacggtggctcatgcctgtaatcccagaactttgggaggtcgaggagggtggatcacctgaggt

SEQ ID NO: 17190 - DNA, 785 bp, Artificial sequence
  DNA replication origin
tggacagggctgggtggggtgggggagggcagctcatagagccgtgctcgagggaggcgggtagcgcagaggagagggtgcaaggccctaagaagaggagcggggggactagggcggggctcaatggagctggggcgtccgcagactggaaggagccgggacccccgctccagagcctccctttccattctcgcttcttccagtgattccgagcccccgactcagtctttcccccaggtagagagaatccgaggctgtttctgccgctgaaatctgagcgggagagcatcccgaagccgcctgcgtggagcgagcagcccccgcgtcatgggccagaggcgcccgggagaatctgcgggtcacggatcacacccgcaggggcctggcggagcaaggtgccgttcgccgcctgcgggcaggagccggctctgggcctcggcccctgctgtgccgtccagtcggccgcttcttcgcttcttcggcaagggaagcggtggagaggcgcgggagccccgattgtgctggagagatctgggacccctgcgcgtctgcgtgcgaaggacccgagaccggccaactcagctgggagcacgggacacgaggagtgaggacaaagggcaaggaacggggcctatagggagggtgtgtgtgtgtgtgtgtgtgtgtgtgtgtgtgtgtgtgtgtgtgtgtgtgtgtgtgtgtgtagggggaatgaatggacagcggggaaggcatgcagaggggcccaaggggtgtggactcagcagccccaccccagaccagag

SEQ ID NO: 17191 - DNA, 900 bp, Artificial sequence
  DNA replication origin
ggagcaaggtgccgttcgccgcctgcgggcaggagccggctctgggcctcggcccctgctgtgccgtccagtcggccgcttcttcgcttcttcggcaagggaagcggtggagaggcgcgggagccccgattgtgctggagagatctgggacccctgcgcgtctgcgtgcgaaggacccgagaccggccaactcagctgggagcacgggacacgaggagtgaggacaaagggcaaggaacggggcctatagggagggtgtgtgtgtgtgtgtgtgtgtgtgtgtgtgtgtgtgtgtgtgtgtgtgtgtgtgtgtgtgtagggggaatgaatggacagcggggaaggcatgcagaggggcccaaggggtgtggactcagcagccccaccccagaccagagaaggcagccaggctctggcgtccaccgagccagcgcccctatctgggcgcgggccgcatggcggcagaccaccctatatccgccttggtggcgtgggatatgactggcaggagcgcggaagaggcgctgagaatgcatgcgcacccggacagaccagacgcggcacggagggggtacttcccacaagtcctcctgccttgagaccaggccttcgagtggtccggggaatgcgcctctgggcacagccagcggccccagatcggcactggacgccaacccgagttagagaagcctgggagactggatcgcaggggccctcattcagccaaggagggggaaaggagagctgtagggtaggagaggccaggcacagggaaggtggggaggggatggagccttgcgccaggagttgggggtgcagggcctgtgacgagagagtattaccatgtgcaccctgaaggagagggagagggtctgggcctggaacgaggactctcgcctg

SEQ ID NO: 17192 - DNA, 1058 bp, Artificial sequence
  DNA replication origin
gctctgaagaaattaggttggctgccaagatcggggtcctttggcgggtcgggtgcccggccaggggtcgctgggacgcgcggatcaaggacagtgctctagccagcctgggcaaagtggacctcggcaacgggacgcgaaagctggcgagatggagctgccgacttccgcgccagccgggcctggcacccgcgtccggtgcgagaggccacagcgtcggaccggctgtctgcggcccgtggtccccaccgacgcgcggctcaccggggagcaggggggcggttgcggcccggggtagcggcgggctgaccccccgcgatccgctgcggggcggccccggcccctcccggagcgaggcagcggcgcggagccgggcgggggcggagggcatggggggcgggtcccctgacctcgctggaggcgaaagggcggatcggatttggaacctgcgggaggcttggtcagaagtggccccctgcgccgcggggccccgcggaggggcccggctttgtggaggattagaggctcccgccctaccctacctgcgtgtgtgtcggtgggtatctgtgtgtgtctgtgcgtgtcgggcccccgcctctgcggctcttgcctccgtgtgctccttggctctgcacacacggtatgtgtgtccctgcaaccttccagactcccaggggtgaatctgtggatctgtgtctgagtcccctgcacccgtgtgtatgtgaatgtgtgggtccttcgtgcctgtgtctggggtgtgtgtccgcatcatttcatgcgggggcctaagtctttgtgcgtgtctcagcctctgtgttgtgtctgcgatccttttctgtatgggtgtctctgtcagctttgcgtatctgtgcttatctccggggttctgaatgcttctgtgtgctcgcgtgtctcctagcgtgtgtgtgtgtgtgtgtgtttgtgtgtggtggggggctttgtgccttcgtgtatttctaggcgcctttgtgtggctaggtcggggagagtggacagtcaatgtggagtttctctcccacatctcggtcccctctttg

SEQ ID NO: 17193 - DNA, 1005 bp, Artificial sequence
  DNA replication origin
gccggtatccctgcgccgggatgcgccgccggctccacgtcaaatagtgccgtcccgcccccccgcgcgccccggggctccgcgcccctggcccgcgccccgcgccgcgcctggccccgagctcaggccccggctccccggcccggccgccccgcgggcccctcgcagaagttttgatcgtcttcgaaacaaatccctctgctccacccccttgaaaaattgatttgggagttggggagcgaaggctttcttttttctcctctgccttctttattattaatattttgtaaagctccagcgctacgaggagtggccccgagcgaggccagactgcgcggacggcagggagcgcggcggctccgccaggggacggcgccggccgggagtggccgcttgggaacccccgactgtcggccgaggtaggtcgcgggggctgagtcggagtcccccgggcggcggcgcctgctcggggccgcttggtccgcggagagggccggctcccaggaacgaaggacgggggcgggcagaaggcgaggacggctggccctggactcgtgcaaggggggcccaggcccaggaacggggagtgagcctggagtgtgggtgaggggtctgggaaagctccgggcctggcagagattgggcgggggactgagccgatgggaggttggggccccgggatcgagaatgggggacactgggacgacaaggaaggtcaggcctgggttcaggcgaccgagagtttagaggacaactaaggctggaaaaggggtccccgggcaggggcaggagcagtgggcaagacccgggcctcctagggtttgcagtgaggggcgctaggagggagtggtggccccagggtagcggctctgaagaaattaggttggctgccaagatcggggtcctttggcgggtcgggtgcccggccaggggtcgctgggacgcgcggatcaaggacagtgctctagccagcctgggcaaagtggacctcggcaacgggacgcg

SEQ ID NO: 17194 - DNA, 1091 bp, Artificial sequence
  DNA replication origin
gcactggagtagcgcggggagcgcgcccggagccccgcggcccgctgcgccccgcccgggaccccgctgcgccgcgcgccccccccgcggcccgcggggccgcccctgcacccccaccccctcccccgcctgccgccgccgccaccgccaccgccgccgccgcctcctccccgcggctccgtctgcagcagccgccgccgccgggttccgggactgacaagcaggtgacagaggagccggcgcgcgtggctgcaagtgtccgggagagcgcggcgcgggctgcagccgccccggcccgcccgcacgacgccggggcccggggccagcgcgtcgccgctccacgatcgccgggggccggcgcaacccctgccctgcgggggccgcgcctccccggttccagggccgcggcggcggagagcgggtggacgggccggcgggcgagcagcccggccggcggggtccgcagcgcgccccgcgtcccatggatatagcaacaggtcccgagtcgctggagaggtgcttccctcgcgggcagacggactgcgccaagatgttggacggcatcaagatggaggagcacgccctgcgccccgggcccgccactctgggggtgctgctgggtgagtgcggggtcggaacgcccgagtggtctcgggcgtgggatggggcgtcgtccggctgtggacacgggcgttggggccaacggataaaggaaatgggtttgcaggacatggggaggaggcagagacaggactcctggagtgatcgccagagggccgcaagtacgcctccggcaggcgtcctgaggggacaggacagctccagtcgccacccaccatcctttccaggcttaggttctagagctgccactccgatgtggtaggtggcgggtggcaggggtgatggaggacctagcaatcaccttggcgagcttgggagaggcgcaaggtcacctggggtgggggagattctaagagaaaaacgtctccctggtcactcaaaccacagattttggggagatcggggatagaagaccacgaacgccaccgtggggcgtgtcagccagcgagcgccccagcctcacctcgcct

SEQ ID NO: 17195 - DNA, 1975 bp, Artificial sequence
  DNA replication origin
ccgggcggcgctgacggccgggctttcgccctgtgcgctacaggctccgactgcccgcatcccgccgtctgcgagggctgccagcggcccatctccgaccgcttcctgatgcgagtcaacgagtcgtcctggcacgaggagtgtttgcagtgcgcggcgtgtcagcaagccctcaccaccagctgctacttccgggatcggaaactgtactgcaaacaagactaccaacagtaagcgcttctcgtcctccttccccgccaccgcccggcactcgagcccggtcagccccctgccgggcccggcccgcgcccgctctgccgccggctctgtgcgcggctgggccgggcagctccaagggttccgagagctgcgcgtcttggggctggggcggaccagcccagcccagcgggcactgatggggtcctgggagcctccggacggcccccagttgccatccgttgtcccggaatcctgcgctgggccggccgagggatttggtgcctgggtcctgggatatagggtctggcgctacggaggcctgaattgggaacccaaaattgatttccaaaggaaaataatgttttagggagccaggcctggcggactgcttcaagggcctggtgtgtgggggtttgggattcctggagcctggagccaggagccaggaggtggagtgctgggacactgaacggcctgagcggcaagggaggccccctttctgccaggctcactgctgcacttttagtccctgatggagagaaaagaatgtccatattccccaaaccgttccatgcgggaattttgcacttgcagttttctttggttggagaagcactctaggaagaggatctcaaaaggtggcaagttacaatttggggctcccaatgggagtgaggagctgactgagtcagcccttcccacaaggcctcctttctggtagtgtgtattgaggagggagatggcccgctctgccctggtataacccaaacctcagggctgaggccagagatgtgggttgagcccttcttgctaactagtttttagctgagactggatttgtatggccggggttggggacagacaacaggacatgcaggctttttcttttgacctcctgggttttctgcctggcactgcaattgggagggaggcagtgaggagccacaactgaaagaggggtgtggagatccccaaagctctgttgcagacacagcgggtgcctgcgaaaactttagtgatgccagaaaaccgtcctggatgaggctgcagagcgggtaggctgcttaggtggtttggtgctcagagagggctgtgtatgcccaagcctccagggaaggaaaagctgggctgccggcgcctcgtggtgagtgcaacctacctgttctgcccagggattgtccccagtccagggcctagtggaaagcagcgcagcccaactgtttaactgaggcctggaaacagtgcaggccagagccctagagagggcatcggattctaccccaaaaggctctggctgtgcctggtggtctgggggctgagcctgagctgctttttgcacctagctctttcttccggctgagggatctttgggtagggattggagtccattcagaggttcagctgttttgctggtcccagagtgcagctgaggccttcctctcagtaggaagcaccccagatttaggcacactgccgtaggtcggctttgtgctgtgctctgaactaatatgattctagttccgggagagggagacgccagtccgttcagtcacagcccaagcatagagcagcacaaattgaatggggaaaatagtttggggtagatgtggctgtgggctctgggctggctagaggagcccctctgtagggtgcaccagcctctagccccctccccaccacgccctgcacccctggcctcactctgcttgcctgatcccgagctctggcagtgccacttacacccagctcagccacc

SEQ ID NO: 17196 - DNA, 1118 bp, Artificial sequence
  DNA replication origin
gttcactgtctgtaccgtcccaaccctgtggttaggggaggaaactgaggctgagcagcttgaacaacttccccaggcccagagttaactctgtagcagatttttcccggcccagagttaccctgtagcagatttcccccccaggcgggtccaactcccaaagccggatgggttctctaagtcctcctataccgaccttccggaaggtgcgggctctacattgttgctaatctcccccagaacgcccagcctgggaggggtggggagggggagtcgctacccgagggctgggagcagggtgtcactgacctcctctgcgcggattgccccctgtagggccagccctggccagcggaagaaaaaggttagaataattgccttcccctgggcgggagagcttccttcgacgtccggacacgcggatggggcggctttcagcggcctccacccgcgcacccctccaggcccacctctcggcggttcgtgcagcatgttctttactgggagtgggatgacaccatgcataggctcctgggctccgcagccgagccgcgggcaccagcggcggttgatgaatttcggtgtcaccaggggtttagcccggatttgggaaccgcgcgctctaatacgcgcacacggtcctgccctttctaaagcgcagccctttcacccagcagctgatttatggaggaattcgatcctgggacgcgctaggctgaagcccggagtccagggccctgcagcagctttcgggcttctcagcgtttcggggacccttggtggctcgggggctctcttgggctggggtcggggtgccccgccaggtggggccttacgcggtccagaaagagccagtgattctccttggagccactgcaggctcccgctggagggagtaagactggcggggagagctggcattttcattccttgttgagcacagccctcgcccctccccaagccctcctgccgaccccctcgggctggccaaaagcagcaagttcgggaggtttgtttattgagagaacagaaaattaggggttgcgggggagaatctaagacccttttcccgcctgagaaacgtgcgaagtccctcagctcctggaggcaaccaggcg

SEQ ID NO: 17197 - DNA, 1512 bp, Artificial sequence
  DNA replication origin
tgccagggcgcacggggactccagagcggatcctctacgagttctaataggaggccagggagccgggacatcagagacaaattcctccgaagtccccctccggttccactgactggagcctttgggctgaaaccccacgagctccccacccccatgtccatgaggggagcaaaacggagcccccgggggcacgcaggcttcgtttctgggtgttggttttgcttttggttttttcagccggtgcagtgacccggaacagcgcggccgcttctccgacgcccgcggctccccactgcgccgaggcgagcgccacggctaaagcccaagcctcggcgcccgctgcgcctgccggagttctgcttgtccgagcaggcagcggggctcaggcacggcggcgacgtcgaagggccagtcggcagacagggctgggtctctgcggccagagcgccgcaggaaagccctgcaaacggtgggacgagggtggcggcggcggcggcggaggtggcgagaaaggcgccacgggcctggcggagaagagggtttccgtgggggtggaacaaaggaattcaccctcggaagaaaggggccgagcatgcagccgggaatggccaaccctggagacctgcaggagtgcgagcgctgcgacattagtcccagggatccaacgaaatctgccccgccgagggccccagcctggcatctccattcggcctctctcttctggtcaatcccgctttaatgggggtggtgggtgtgcacccggagtgccacctttcctgggaagaggggacagagcaggacccgtgctctcggtcagaggaggcaaacacatcccactaaccctccccccattcatcctctagtcgtggggtcactgtccccattttccagacgctgccaattaaggcacccgcaaaaccaccccttcccccgcccccacggcaacgctccggctcctgaggcccaagcgcgctcggaaacgaaaagcgtcagggggctacagggccggagccccctcttcccgccgtcctcggaaggggtggaggggacacggttgtaaggtgctcggcttcttttctgtgcttgacatgaataaggggattaggatggcaagtttccgtcgttcactccgtgggacaaagggccccgcggtttgagcggcacagcctctgattaaacgacagagccctgtcactcagcaccatcctaggtacttgtgttcgtgacataatcttattagaagataaaaccggcgaaatccttttcataatgaaaagttacatttaatggccggactctccccccacctccctccccggagcctgctcgcctttccccgttgctgttggatatggctcgcctataattggcatttaaagcaccaagtccgggagaaaaacggggtttagggtttttgtaatccccctaaactgtctttgttcgaaatctccacagatacaagtctgttaagagtaaatatttgtggattgatacaaccacatttcccccctg

SEQ ID NO: 17198 - DNA, 914 bp, Artificial sequence
  DNA replication origin
ctgcggcgctctggccgcagagacccagccctgtctgccgactggcccttcgacgtcgccgccgtgcctgagccccgctgcctgctcggacaagcagaactccggcaggcgcagcgggcgccgaggcttgggctttagccgtggcgctcgcctcggcgcagtggggagccgcgggcgtcggagaagcggccgcgctgttccgggtcactgcaccggctgaaaaaaccaaaagcaaaaccaacacccagaaacgaagcctgcgtgcccccgggggctccgttttgctcccctcatggacatgggggtggggagctcgtggggtttcagcccaaaggctccagtcagtggaaccggagggggacttcggaggaatttgtctctgatgtcccggctccctggcctcctattagaactcgtagaggatccgctctggagtccccgtgcgccctggcagaggtcggggacgccagagtgcacgcagtctcctgcgcgccgagcccaggctccgggcgcagggaggatcgggctgagagcagggtgtcacctcgtaaaagcgacaggcaaggactgttttatggggagggagaaggagcaggaagtgatgcttccatctctgacagcatagggaccgggagctccgatggaggaaaccctttccgggcaggacgagtagagggacaggacatggccggggaccatgggattcgctgccattaagtatgggacgggcaggcgagagcggggaaggggaccgatggagccagaagccctgagctcacctcccgcccgtcctctcctggagccccctctgcaatcccggctcagtcggcaaccggcccttccttccaggtcaggggtgggggagagactttctccctcgaaacacttgataccaactttgtttttttggcaag

SEQ ID NO: 17199 - DNA, 1084 bp, Artificial sequence
  DNA replication origin
gagagctcccaggctaagtgggtgggtggggtgaggtggggataggggcgagggcagagctgagcagaaatgaggccagcacagtccctgtgcctgcagttattggctcttggattttgtgaccccagaactgattccttgagaggccgagaacttaaccagatttttcaccagtgctttggaacctcaggttttaccacttcccgctgtgtgaccttaggttagaggctttaaattccctgtgcctcagtttcttcaaagtttactaaggaccagacccctgcctccgggtaaggatgattcagagggagcagatgccattcctctttaggtgagtggttcctgccgattttgttactgatgctcccacagtcctttgtgctgggcctcaaagggggccacctttgaccatatgtattgggtcttagctagaaaagggaacggtaggtgcgcagttcgtactgaaagaaagtataagggtctagagctgggctggactctgggcttggcctctttctagctgtgtgacctttgacaaattccttagcttctcagagcctccactctctcgcaagcaaaatgcacgtaaagaacctaccttccaggttgtggggagagcgagatgagatgctgtgttcaaagagccataccagtccatgggagccgtttttcttagagggaagagttgtgggcaggggcctcgttagtcacacaagaaggcagcaagagtgtgtgccagcttacgccaggcaggtgcccgtgagatgggaggctgcagcttgggaggatttggggagggcattccaggagggggccctggcagcaggaatattgggggttaaatgggtgggctgggacagtgagtctggcggaggggctgccgaggggctgctgggactggaggctgcagagcagggcaggagcctgtggctgtgctcgggcgtttggattttatcctgtgggcaggagggagctattgaaggttattggacaggggagtgacaggaactggagaggcactttatggagctgatgctggcaacatgtgcctgggattagaccggcgggaggaggctattgccac

SEQ ID NO: 17200 - DNA, 770 bp, Artificial sequence
  DNA replication origin
ggttcccgggataggacgttcagctgaaacctgcgcaagggcaggagctgcccaagaggaggaagcctgagtgggcgcagccaggacagtgtggcatctcgggagtggctcagaagggctggaacaaacacagagagtggagactggtgggatgagtagggccccagcagcggcatattccacattcttatcctaagaatggtggagctgtaggggatcggggtatggcagtgagtgctgggtggattggcaagaccaagcctgggagctgggagtccaggtccaatggagagaaggggagagttccagaaatgattaatagagtgaatgtccaggcctggatggccaaccattggcctgatgcagggggtggggagtaaagatgagagataccaagacaacgtcctaatgttcagcttgggggcctgggaggtggaggtgccatttaataagattaaataacaaaacaacacaacacaacccagggggctggggatgaagggtgggagggagctgagtgtggtcatgaaagggcaacaggagggatcctgtgggggcagatccgggaacgttcgcatgtgataaattggcacagagctccatgcacaaacgcacccaacactggagaagtctaagtgcagtcggcactgtgttgacgtggacgtcctagctgtgatgttgtcccgcggctgtgcaagactgggcaaagggtacagggacctctctattttttgcaattgcctatgaatctacaattatctcaaaataaa

SEQ ID NO: 17201 - DNA, 783 bp, Artificial sequence
  DNA replication origin
taaaaagcgcctagctttaaccctttcccctcgcccgcagcagttctcccagcatttacccagcgccaactgtgcgcaagtcctccctatggggatctgcggaccccacccctggtaactccgaaaggtctgaaaggtctctgccaacacccccattttgctgatgagcaaactgaggctcagagaggggaggtaacttgttcaatacacccagtttggtcatggaagaactggggtagcagacaggttgctagagaaagccagccacctggtctctgtaccttgtccatgctctacttggaatactgtcccgctgtgagtctggcaaaatgcttctcatccttcaaaggccaggtgggcacgtcccaagccccatggcatggagttcccagggtatcctcctcttcctgccacttcatccattcccccaaatactgatgcggtgcttattgtgtgccaggtgcggtgctgggtgctggggacagcagcgaacaagccactgggagacagcccatcctggggactgtggtggggagcaagtcagagaaggccacttttcggaagacagagatttgggctgagacggggagaggagggcgatcagccaggcaaggatgggaggtgacggagaggccaggcaggagagaaacactgtgtgcaaaggtcctgagaaacaaggagaatcaatgagaaataaaaggtgcagagggttgcgagggaagggcgggtgcctggagcaagaggaagctggggagtacaggagcctgcctgagtgtgcagggt

SEQ ID NO: 17202 - DNA, 765 bp, Artificial sequence
  DNA replication origin
gggagcccggggagccatcccaggccagcctggccagggaggcccacatgcacatttggcgattccacaaatatttctttctttctttttttttttttttttttttcagacagagtgcctctctgtcacccaggctggagtgcagtggcgtgatctcagctcattgcaacctccgcctcctgggttcaagcgattctcctaccttaccctcccgagtagctgggactacaggcaggcgccaccgcgcccggctaatatttgtatttttagtagagatggggtttcaccatgttagccaggctggtctcgatctcctgacctcgtgatccccccacctagggctctcaaagcgttgggattacaggcgtgagccaccgcacacggccccacaaatatttctttagcgtctactatgtgcgggccggcgctgtctggaggcggggctagagcagtgagaagagagacagcccctcccaatgcccccacccccagttccttcttacccgtggaggacattctcataggcggaaggacagtaacactgatctattttaacacgtagataaatccatttcatacagagtatgacgaatggtgactacaaggcaaagaagagtgaagacagggaagagagatggggctgcagctttagaagggacagtcagaggcatgaatgagacacacattccagccgacacctgggggatggtatctacaatatcgggggaagtggctccttgcagagggaggagccagtgcaaaggc

SEQ ID NO: 17203 - DNA, 1544 bp, Artificial sequence
  DNA replication origin
aagaaagaaatatttgtggaatcgccaaatgtgcatgtgggcctccctggccaggctggcctgggatggctccccgggctcccggctgtgcccgtccctccctgtccctggcccgtgacctccagccccggctgggggctcccgacagcgcccctggcgcggatcaaagggccgaggggccggcggccccgcacagctgcgggccgcaggaagcgcaggggcagccctcgctgcaggcccggccccgacgcggcgaggaggccgggggaggccgggaggctgggagaggccccgcgaggcccgcagagcgcgcccgtctcgccgcgcattccagccgcgtgattgacgcgcgtaccggggcccccgcccgcggctcccgccgccgcccgcccggcccgcggccgccgcatcaaagcagatgtttgcagctggtttgagttggatccccatcaacaggcccttttttgtctcaaaataaaaaacagctacgcccggaatgataaggacgcggcaggcacgtgggggagatgtcagcgagtccggcagggaggaggccgggcggctccctctctaagtgacaggctgactctagcagcagcagccgtgacccccagagtgtctagggtcctgtcgcctagctcctgtgaactgcagctcatccttcagccggcatcatcagagccccgtcccgcccacaaccataacctcagccaccacactgagcgcttactgtccgacatgctctacagcctgccatcctgggcacctcgccaccagcctagggaggaggtgtgacacaggaaggtcaatacattatgatgattacccataaggtgggaattggggtcaccagttttcaaatgggaaaaccagttcagagagcggagagggcttgtcccaagtcaggcagctaggaagtggcagagccgggatttaaatccattccttctgctccagaaccgggttcttaggtatgtgttatgtcaccttttccaagaagtccccagatagactcttggtgctttctgtgcctctctgcttgcccagcatgccccagtaccccatccaagcacgtgtcctacgggatgagattctaactccatgccccaagtccatgagcccagcccagagtcagcctccatgggtgtttgctgggtgaatgtgagagggtgtagccggtgggaacagaagggctgcagtgcaagggccaaatctcatggtccccatggagggaggaaggtgtttccagcagtggttgctgctgggaccgtgggcttgggcatggagaggccctaaaggaaaccagcctagaatctgcctggtccccagtgcggggcatacctataaagggacagacagacagacagggagagcacagacccaacagtgcaattacggggcttcagacaaaaaagggaggtggggaagagaaagttccagagacagactggggaggagaagagagcacacacctattaagatccctcctgtgccagacgctgggccatgccttcccacactggttaaaatcaccagattctcaa

SEQ ID NO: 17204 - DNA, 837 bp, Artificial sequence
  DNA replication origin
ccatcaaagtgttgttgagctgagttcccacagagcaggacacgtgacagggtgggggagtgtcgggaggagcggtcagcagacacagcagaggaggggccgtgctgcccagccctcctgctagtgctgaccagggcccggagaccacctctcccggccctcgtttgtctgcagagatgatgggagatgggagatggaatcacgttgtcatgtggaagctggattaggcccagcctgggagttgcctccagcatttactacccatgcgaccctgagcaagcaactctgcctcttagcacctcaatttcctcatctctaaaatggggttaatgttcattcttttcttgcagggttgttgcaaggattaaatgcgtctctgcatataagatgcttagagcagggctggcactctatacgtgctcagtgaatatctgttcgtgatggagatgcgtaagctgagacggagggatgggaaggtgttagccaagccaaaggacagagaaagatgggtcgaaagatggctgccatgatagtgctctggagaaactgcaggctgttctttggggctgcagcctggggaagcagagggtagaaagggaagaggcgggatcatgaagggccttgagtgccagcctcaggagctcggatggtctcctaagggcactagggagccatggaagagtctggagcagggaagcagcttgatccgatttgtattttagaaagatccccctggctcctgtgtgtgtgacggttcctgtgtgggctggggtttgaaggattgaaggggccaggagcccagagaggggaccaggcagttgctcgggcaggagagga

SEQ ID NO: 17205 - DNA, 1032 bp, Artificial sequence
  DNA replication origin
cgcaggccctggccatggaaaacccttcccatgtggcagatcctgttgccggagggctccaggttacccatggggcctggcagaccgggacacctcctctccatgcctcctgctccagtccttccccactgttcccaggaagaacaaggaccaaagccacctcctgggctttccctccttaaggctcactcctggctgggcttgccctgtctgccaggaggccttcaaattggcctcgtccttttgggggctagagcagaggagggagggtccttcaccctgggaaatggggtctttccctccagcacagagggcccagccccctcccttcggctgggaaacagaggctggctcgaggctgtttgcttctcactgctgaaggctccagggggctgagaaggggaaggcacatcatctccctgcctctcaggcatccccagcctgtggactgggtgctggtgaagacccctgtggagctgggctgcgggttggtggggggccatcaaggcagagagggtaaggggggtgggccagagaacaagaggtgtgtgtgtgcacacaagcacaatccacagtacatgtgagcatgtggacaaacatatatgtgcagccatgtggaccggtgtttagtgcacaagtgtgctgtgtcatgtgtgtatgtgtatgtatgcttaagtgtgtacacttgtgtgtgtggacctgggtgtggcttttgaattcccgggtatgtgaacacatatctccacatacatgtacatgtatccatactcagggtaggggtattcctgcatgcattttatgtgcttgtgtgcacacatgtgatcacacatatgtttatatgtatggatgcgtaggtctcaggggtagtgtgcctggggggatgcatgttcgtatcatgtgcacacaggtggacacgtcagtgcgcgtgtgcatctggatatgcatgtaccatctgtgtgcagctcaggtcctggaagcaggaggtggcttctccagccgggactcccctccaggacaccccagcaacccccg

SEQ ID NO: 17206 - DNA, 1668 bp, Artificial sequence
  DNA replication origin
ccaatttgaaggcctcctggcagacagggcaagcccagccaggagtgagccttaaggagggaaagcccaggaggtggctttggtccttgttcttcctgggaacagtggggaaggactggagcaggaggcatggagaggaggtgtcccggtctgccaggccccatgggtaacctggagccctccggcaacaggatctgccacatgggaagggttttccatggccagggcctgcgtggaggcagtgagcccaccaccatctgtccctacccatccctgggcagggcactgctgcagccagctccatggcttccagctgcctggactcctgaggaagagcagaggctggccagccccagcagagggggtctcagtgggaggagatcacccgcctcatactccaagaacaggattgaagaaaggagaccagcctggggggcagcgggaggcccagtggtggctggggaggcttggccatccatctggggctgctggcatttctgagacccaaacctggggcggggaagtgccatgtgtgcatggtgggtgtggctgtagcactgggagaatgcacatgcttccgcacgctgtgtgtgtctgtccagatgcatgcatgcctgtacgttcctgcccgtgagcatgggcccatgtgtgtgaatacgcctgtgagttgcacgcgtgagggcctttgtgagcccacgtgtatgtggcagcaggtgagtgtgcatcttacgagtgtgtgcgtgcatacgctgtggtcagaagcactcttgtgtgaatatctgtggtgtgtgtctttgcttgcacactttcgtgtatgtccacacagccatgtgcacaaccgtgcgtgcacctgtctgcctgttccccgagtgggcctgccttcctgaaagtgtgtgcagccacatgtacgtgtgtgcatgcctgtgctgtggttgtccgaggcgcacctgtgtgagttcctgtgcaggtgtgccctgcggcccaggatgagggagtgaggcgtgtgtgccggggaagggactcgcagggtacagcaggcaggagaccagggcccagatgaggtagggcctgtgggccacgggagggaaggagatcttatcctgggccactggggagccacggcaggtgtcaacagaggggacaggctcccatcgggcagcaggttgccgaaggggacaaggctgaggcctgggctgcccccgccccttcatcacaggccgggttgtgtcccccacagtgaagagcgaggatgaagatggggacatgaagccggccaaggggcagggcagtcagagcaagggcagcggggatgacgggaaggacccgcggaggcccaagcgaccccggaccatcctcaccacgcagcagcgaagagccttcaaggcctccttcgaggtctcgtcgaagccttgccgaaaggtgaggggcggccggggggcggggctcaggctgatgcccgcacacccactgcctttctggagaccaccccctgctcctgctgggggtagggacatccctccatcctccatctctccgcacatcccatcatacccctaaacccaccatctccccgttgctgcccctggagggcctgacctgttcccctctctctgagccaggtccgagagacactggcagctgagacgggcctcagtgtgcgcgtggtcc

SEQ ID NO: 17207 - DNA, 874 bp, Artificial sequence
  DNA replication origin
cccgttgctgcccctggagggcctgacctgttcccctctctctgagccaggtccgagagacactggcagctgagacgggcctcagtgtgcgcgtggtccaggtctggtttcagaaccaaagagcaaaggtaagaggccaccccccatccccactggccccgggtagggtgggactagagggggcagccagaagactacggtccagggggcgtggggctggctgtgcctgggggcgaggggcagcaccggcctgaactgcgctctccctgcagatgaagaagctggcgcggcggcaccagcagcagcaggagcagcagaactcccagcggctgggccagggtgagccggggccggggcagggcctgggccagggtgagctggggccggggccaggggtgggcctaggccagggtgagctggggcagaggctggggctgggtgagcctgggccagggctgggaccggggctgcacctgtcccagggctagggacaaaggggcccgggatgtttcttttaacaaaacttctcaaaagccttccaccaaggccatcagatcccagggaacttctgctttaaaaccactgagacagagaaatagagaagccatggggactaggggacccagggaggagagatggcagagtggctgcctggagggttggcagaatttctgcaatcagaacagcaacagtctactcacactcactgcgtgcagacacgggtctcagccttcagcacaccccatctcaccctgtcctcataaatcactgcaagggggggtattgccatgtcccatttcacagatgaggaaactgagggactgcctgggatccctcagccagtaaggcaaagctggacctcagccccaagcct

SEQ ID NO: 17208 - DNA, 1098 bp, Artificial sequence
  DNA replication origin
ctctggctgaagctgtccagacactgactccccagccccttccccaggtgcacactccagctcctcctccaggctcagcttaccaaaagccagagtcctcccctcctcatcttctttcctcccaccaccccgcccctccaggggatccagggaggcggcagaccccacacaggcaatagtgattctgcgctgcatctgggagcaccaaggtcccagacccaggccaaaaaggccccgggaagacttcctggaggaaagggcccccgccctgatgtgacttaaagaactagcaggggctcaacaggccagagcaggggaggcaagccaggctgaggggcggcaaaggcatggaggagacagaccgccgggtaagtgagggtgcagcacgtggggccaagaggcagggagagaggtcggtgtgggggagaccagctgagagggaccacaggtcatggggagccctggggtgccgagctgggtgggggtccccgaggccgctgggagccgctggagggtttggtagacgagggtgagaaaggctggaggaggagaccgaggctggggccagtgggtgaggaagccagaggaagggtggggtctctgtcaaggtggctgtgggagagacagctcctaggagggtgcgagagacatgagaagacttcactccccaacttggcacctcagtggatcagcagtgtgggatggggaaggtcagaggtgactcctggttcctggctcggacagggcggatggtggtgccatttgcagagaagggtggggaggagcagggcatgccatgtgcgtgtgggcaggatggagcatacggcatgggttgggatgagctggggggactgtgggaccttctcagggaggctgtgtccaggaagcagctaggaacactgaggggtgagacatagcccaggacatggctgggagaccagaggcagtgactgcagccccaggaggggcagagggggaagcgaggaagcagcaggcactaaggctgtgtcattagaagccaagtccagcctgggacactggcctggcccccagtgccctggtatctgcccattggtgccctggcacctgcccagaagc

SEQ ID NO: 17209 - DNA, 874 bp, Artificial sequence
  DNA replication origin
gtgcgcctggctggctctcaggaggcgaagtaggaactctgcatggagtagagccggtcgatggggttccccacgcgggcctgcagggagcccacgtctgaggagccgaggaagcagtcgctgaggctggttaaggaggtatcgctgtcgatgtcatggaagatggagtcgttccctggggggcagaaggggtgtcaggaccggggtacaggctggggctcctgggggccccctgtttgccctgtaggctgtgtgactggaggccagggagagacaggatggcctgctgactagtgccggccaagaaggactggggcccttcctgtcagcaggggcaggagggctgtgctggccatgctgcctgagccctagggcagcaggtggctgtcctggccccaggcctgcctggcctggcagggggcaggggctgtgctggggcgggcgggtgggggtagggcggcttaccataggggttcatgtggtcacctggcatttggggcggcgtgaggccctgctggaaggggtcgctgctgccgtaggggctctgttccatggccacgatctgctgctgtggtggggccagcggcgtgtaggaagccatcatgccctccatgcggctggacaggacctctgggggcacagtgagccttcaccccctggcctggtccacgccctcccagctacaccccagcagcctccccttctgatctccttgggactccccaggcaccccactctggctgaagctgtccagacactgactccccagccccttccccaggtgcacactccagctcctcctccaggctcagcttaccaaaagccagagtcctcccctcctcatcttctttcctcccaccaccccgcccctcca

SEQ ID NO: 17210 - DNA, 1250 bp, Artificial sequence
  DNA replication origin
agtgctccctgcaaggaggcttcccaaagcaaagatatttgagccaagccgcaaaaaaattagtatggtagaaaagggagggaagagccaggcatggtggctcatgcctgtaatcccagtactttgggagtccaaggcgggtgaatcacaaggtcaggggttcaagatcagcctggccaacatataatgacatctcatttctactaaaaatgcaaaaattagctgggcgtagtggcgggcacctgtaatcccagctactcgggaggctgaggcaggagaattgcttgaacctgggaggtggaggttgcagtgagctggaggttgcagtgagctgagattgcgccactgctctccgtcctgggtgacagagtgagactctgtcataaaaaaaaaaaaaagaaaagaaaagaaagaaagaaaagaaaagggaggggagggcattacaggcagaaggaagcacaatgcggtgggctcagaggaacgaaacagcagtgactttagtaaaacaagggaacggaagcagaaaaggtgaccacagagaggagccacaacagagcttgcaggacactgctgtgaacttgggccttatcccggaaggagtgggcagccttaaatggttttaggagagtgttgtcttcatggcattgaggatggataggagccagggaacccggcaaaaggccccttacaataatgcagaagagagatcacagtaaccaacataaagggtgtagctacggggatatgcaaggaaggggcagatttggctgggtgccatggctcacacctgtaattgcagcactttgggaggccgaagcgagtagattgcttgaggccaggagtttgagaccagcctggccaacatggtgaaatcccatctctactaaaaatacaaaacaaattagccgggcgtggtggcacacgcctgtgatcccagctactcaggaggctgagacatgagaatcataggaacccaggaggcggagccaagatcgggcgattgaactccagccagggcaacacagccagaccccgtctcaaaaaaaaaaggggggcgacagactggagaaatgtttaggacagagcagctggacttggtgagatattggggcaaaaaggatggtagcgtcaacctgagagggggcacaggagcagggagggactagggtaggggtggccattcaggcccctgctgggtcatgtgaaagtgaccagttttcctcatacagatgctggggctgacctccctg

SEQ ID NO: 17211 - DNA, 1294 bp, Artificial sequence
  DNA replication origin
ccgcccggggagaggctgctgtgcgcggggcccgcacctggaccctccagggtgacctggggcctgggcagcgcgggcgggggcgggcgccccggggggaggccttatttcatttccccgcgccgctgaggtttctgcgaagtgtctctctcacctctttaaattttacggcgcttggcccatggccgccgggccccgccctggggaggaagcgggtgctggctctgggagcctccccggccgaggggtggccccaccaggccgggtgcgggtcaggcccggggcgtccgaactccgaggggcgcccggcctgtgccctactctggttcccggggccttcccggagggggtctgggctgtcggggcccagggggcggggctggcctcggaacgtctccgtccggccccgccccctttctgggcctcgtctcgggccacgcctctcccctgctcccggggagcgcagcggggtgggcggtgggaggggactgctgggggagggagtcagaggagcagaaatccgggccagcctggaagcccagttgccaccgccacccccaacttcccctgggggcagagcggtgttcccaagacctgagtcagggcggaatactccagtcgagccaggcaggccagccaggtccccgaggccggcccgggctggcacctgcctggagaccaggttgggggctggaggtaaagggaggggcatggggtggcctctgggtctcagcgctcttccttcagaaccctgaggtaactgaccagtatcaatctggagacagtggggaacctgccctaggtgtgggcgtgagaggcgtgtggcctgggagtggggtcgaaggaggagaggggcacatgaacaggagataagtgtgaacaagaggggcctgagggaagaggggctgtgaaccgcagaggggtgagacaggaggaagggtgagcagagggcacggagggtctgaggagtcactgcctaaagacacagagcgaataagtcaggatttgaacttggttctgtctgactcccaagccacctgtcttagagttgcagtcattaacttgattctacaatgtactccttattaattcagccccaggctacacagctagctgccacagatataactttgtgacatgcatgtaaccagaacaaggaaacgggacacggaacagaagtacacggaacagaaatttggttctactggtccggaagatgcaggggccagtggcctggaggtgcctggggtgccccctgcagaggctgtgggatgccaggggtggtgcagtgcag

SEQ ID NO: 17212 - DNA, 1544 bp, Artificial sequence
  DNA replication origin
agatcctcctgcctcagccttccaagtagctgggactacaggtgtgtaccaccacgtcctgctaatttattttattttattttcagtagagacaatgtctcactatgttttccaggccgccaggcacccatatttaaaaaaaaaaaaatccagcagtggttctgatggaaaccctggataaagaacaatcacctaaggccctgggttccaatcatggtgttgaatccctggctcaggtaagcgggaacaagcctttacctgcctagcatgtgcaggggtaggaactccttccttatgacagacaatccctggtcctccagcctgcagccacacggaaacaaaggagagggcacacacaggtggactggttctaggaaagctccgctcccagacttcaccctccagtaataaccttggccttaaccacctacgttggctcctcagaggtgtggcttagctgtaggttagggaagagaggaacctgagctttcctagaggccaaaagcgtggcctctaggaaaaagaatagtaatgaaaacaatgacttccagagcacttccaaagtgccagacactgcagaaatgacgggcccaacgtccctaagccagggggtggcaaagtcaggattcaagtccaggtccttcattcagactccctaagactggctcttaatcactgtgccacaggaaccttgggtcattaaaccttcatggtgtggcccaaaccggtttcctctccttactgcctgcccatgactgccctgcttgcctgccccggagagtgtactctcctccaagcacatggagcaccccgtggtggcgatgatgctgttgacagctgcatgcctttcttcttactgtggtccttcctgcctggtgccatctatgtggcaaggcctcattgttcctcagggctctacagaatgcaccaggctcttggctgcttacctctgcctcccctatttcagctgtgcgctctcaaaggtggggaccgactgacttatctctctatccccagctgatgaatagaggggatgagtgatacacgaatgagtgaatgaatgaatggtaatggtgatgggaatcaaatggcagcaacgcggaagagggagatgcggtgcctgtaaccatggtaacgatgatgtcgctgagtgataatgctaggaagatggtaaccatggtaacactgatggtgaggcctgctcggacagtcctggcgcctcagctgccgtggtccatgccaagcccgacctgctcagtggccgaacaagatgctaagcacaattagcaattgctgttctgttccctgtcccaagacccccgcccagggctgagtttcacggtagtcaaaccctcttcctgagtggctccaagactcaggaaagaacacatgtttggggggcgggaggggtggcgtgcagcttgcatgcatgtgtatgtgcgtgcgcggaagaggctgtgtgatgggcaagtgggtaaggtgtggtgtgcgctaagggcagtcctgctggtgctagcgccaggggactgggaagaggaacggtt

SEQ ID NO: 17213 - DNA, 1416 bp, Artificial sequence
  DNA replication origin
acagcggcccggggactgccccccgccccgcctgccccgcctgccccgcccgcgcctagcccgctgctcgccgcccccggccagcgtgcctcacctgtccagagcgccgcgctcacatcgcccgcccgcggcgccccctccgccgccgccggcgccaggccagtccccgccgctccggctgccgccccagcccgcgccccccgcccccggaagcgcttcccggccccgccccctggacgcccgcgcttccgggcaggcgccaacccgggtggtggcgttgcgcggcggacctctagccagggcccggggtcctgagtcccgcccggttgtcgtcccagagcctcgccgcgggctagcggcagccttggtctggaccccggagtcccgactccgggaagcggcgtcggctctgccttcagcccgcgctctcctcggcgccccctgctggcgggagaagggcggtgcagtggggcgcgtttcaggggctcccggaatcgaacgggtgggagagagcccaggaccctcgacccccccagcactggggggcctgcccccagcccagccctcccttccaagaccctccctcctgcatctcttcaggcgcatgccacgcacccgagctgctcctggcagggcagctgaaggcagcaaggtgcagtggttagcagcagggctctggggacctgtcatagggggtctcttgacttaccaccttgggcaggttttctctctctcaaaacggaggtggctcccgcctgtaatcccagcactttgggagggcgaggcgggaggatcacttgatcctaggagtttgagaccagcctgggcaacatagggaggccccatttaaatttttaaaacttagccaggcttggtggcacatgcctgtagttccagctattggggaggctgaggtgggagggtcgcttgagtccgggaggtcgaggctgcgatgagccatgatcgtgtcactgtacttcagcagtggtgaaagagcaagaccctgtctcaaaaacaaaacggaggtgaaaattcccaactcactgttataaaacccatgtcacagagcatgcctcaaaaaatgtgcatttccagacccttggggacaccccagtcttcaaaccgttgggtgggagtgggagcctcacccagcgttttcctcccagcattagaccaatgtaacactctttgaagagcttccctttgcattttggtggagtcagtagttgtggcagaggtttattttcctttttctggctttgtaataaaaataaactaggaggcaaagataccagctcctcttcaggatagaaagctgctgagacttcctgatgttacttcatcctttgcaagcaggaactgtctctccaggatctgtccagtggtcatcctccaatagcaacagctaccctttgt

SEQ ID NO: 17214 - DNA, 1063 bp, Artificial sequence
  DNA replication origin
ccgcgggcgggcgatgtgagcgcggcgctctggacaggtgaggcacgctggccgggggcggcgagcagcgggctaggcgcgggcggggcaggcggggcaggcggggcggggggcagtccccgggccgctgtccggctccctctgggcgcggcggggcgggagcctccgcgcctggtcagtcccgcgggcaggcggccggcgcgggcgggagccgaggccgggcggggtccggaggccccgggcacctgctggggtcaggcgcgcgtccccgaggggccagctgtgctcggtcctggagtcccggcgccgctggcccggctgagggtcgcgctcgggcagctgccctgggctcccagcctccgcccggggcgtctcgggatccccagcttccgggcccctagccctgggggcgctcccttttgtacggggagggagggcagatggttgagttccctggagagccggccgggccaggggtcggcccttcgggtggctgccacggagccgctgcctcacgccaccgccttcctccaggtaaacaggcggcggcgacgggttgcgcttggccccagacgtctccgtggccactcgcgctcagttggtcctgccattgcggagggctgggctggggctgaccggggttgtaaacagtgcccttctaggccaagtggctgtgctttcagggcggcactcgtctgggagtctctgtcttgaggccttccgcaagccccttccatgctaggactcagtttccccatgtgatcattgagggtttcatttaactctctaagaacccttctggctctgccattccgtgtatgtctcaaattggaagggctgtccctgattcaagatactgggcagtttcgctgaagactttgtcagtgtggactttttaagccacttactgcattttgtttcagacaggctttaaaatgatttcaagaagcgttttctaaacctcaccttaatcctcattcatcccttgcttttgtccctagtagtagttaatcacattccgccgagtttttgcatgcagaattttttgttgtttatatttgcc

SEQ ID NO: 17215 - DNA, 1743 bp, Artificial sequence
  DNA replication origin
aaggtgaccggccgggactgcggcggcggggagagcggcggtgagaggcgcggccgacggggcggggcggggcggggcgggccctgaggccgggcctgagggagctgcaggtgtggggggcgggaccccgagggccgccgaagccggggaggggcctcggtgcgggaggcggggccggggccgtgcctgcgggtgcccggcgccggggcctggccggggtccgggggttctggggtccggggccaggggcgcgctggtccccgggagcgtgaaggacggcggggaagaggcgcgggcgcggggggcggggccgggggggcagttgggcggggcgccgcggctgcaggtgcggggggcggggccggcggggctgccgtgggcggggctgtggggtgcggcccgcgctggacccaaggaaagcacaggtgcggggggcggggcccggggacctgcagcggtggggggcggggcccgggtggctgcggtacggaagcagggccccaggtgaggagcaggcgagggtgagtggtcgcccgagaaggaaaggccgccctctccgctgcccaggggtgcttgggtgggagcgggggctttgggctccctgaggattctgggggcatccggggctgccgctagaagggccgtccgggcctgcctgtgcctctgctgactcgggcttggagctcagctgccctggttactggccggttgcctcccctatgctacgccgcgccctaagtggggcgcgctgtttttcgcacctcaggggctttcctgttgctattgaaggggcttgccaggatgcggggggcggggggttggttgtcattggatgatcggttgttgaaaaatgtgtgtgcttgaagagtagtatgaggcttgggaggggtcctggcttgctggccactggtaccagaagctgctgtagatctcagcagtgcgtctcaaaaagactgaaatggcagcctgttaagtggggagagcagggatgagaattcagaagcttttgactatgctacctgggagagtttttcacctgtttcctccgttgcaaaatgagcatgttagtacctgcctgtgtgcctcccaggggcctggtgaggataggatgaaacagtgcctactgagcaaatcgctggataaagttatgagtttcctttttcttgtgccgatgggcaggttggattcagggactggagagtctaaagaagagagggtttgtttctagttaagaggtgagactagaccactgtcttttcgcagtttgggatgaggttttgttgggagttcccaaaagactcagccgtgtcttggatcgtgactgcttctctctgcgaggcctctgagggagctgctgcaacgcagggagcagtggcaagtggaagcagcagaacatttgtttgctgacctttagaccccaaccccggtgaggactctgagctggaacataaagctcaggcctgaggctatggaagtccctctgcccccatccaagtacagaccccgattttaccacattccaagagggtcgggcgcggtggctcacgcttgtaatcccagcactttgggaggccaaggcgggtggatcatttgaggtcaggagtccgagaccagcctggccaacatggtgaaaccccctctctactaaaaaatacaaaagtcagccgggcatggtggcgggcacctgtaatctcagctactcaggaggctgaggccgagaattgcttgaacgtgggaggcgga

SEQ ID NO: 17216 - DNA, 1999 bp, Artificial sequence
  DNA replication origin
aaaagaaaaaaaaaaaattacagtgcatagtgttgtgcacctatagtcccagatactcagaaggctaaggcaggaagattgcttgagtcccagagttgagtctagcttgggcaacgtaatgagaccagtctgggcaacatagaccctatctcttaaaaaaaaaattatagcactgatgtctgcaaaagaggagtataaggtgctaagagaccatacatttaatggctttcctgctaggggagtcagagacagcttaccagaggaaggggcctttaagctgacacctgaaagatgaattgaagctagccaggtggagaggtggcagttgcatctgccatcatcctagctggggaaggagcatggaggactccagatgtactggggagccagcatggctaaagcactgagagcaagggagagaccagtgttcatgttctggtcatggccttgtttccttggactgtgccagaaataatggacaaattatgtagttgctgactcatttttcataactccccagctgtcaccaaaagcatctattactgaaacattacctgtggtttccaatatagcagttggccttatttttattgctttagagattggttgcttcctttgcttcttgaaggtgtggaagcaaatacttggacctcattagtggttttcagtcattaagtaaacatttactaagcatgtaatagggcttgacactgcagaccctaccctcaggagcaccaagacttgacagatagaagtaaatacataatgataatacagtgtcatgggaagtagagtagtggaaatggaagctcatgggaccgagtaagactcacaggctcttaaagattttcacttttccaggtgaagcaggatacaggcagaggaaacagattgtacaaaggtacagaagcaggagggagtatgatgtgcttcagggatggtggacagtgtggtgttgctggagtgtgagatttatggtggaggatggagggaggaggatctggttggagaggtggtttggggtcagttcacagagggacttgcaggcagtgcctaggagtgtaggtgttgtcttgtggtcagtggagaatcgttcaagctctaagaggagagaaggattgtcacttatagtcctggtggcagtgtggaggatgatggtgtgaaaggggactagagattgggagctgagtgagggttattataggaattcaggagtgggatgatggggtcctggctaggtggatggggaggagaaggcaggttcaaaagaaactgatgtagaggcctctcctacttggtagatgggaggaagggcgatatcagagtttctcactcggtgccatgagatggtaggaccagtcactgagctatgaaacgtgaaaggaatactgggttggtaggaggaaggttgtgaatttggtttgggccattttgagtttggaatggatgaggggttgcttggtggacctgcccacttggtgactggcctgctaatctgcagctgagagagagatctaggctggaacagtggttctcacactctagagcatcagagtcctctgtagtgtttgcggggagggaggctggtagtcttatgtttaagggctttcacagatggttctgatgccccaggagatacttggggtcattcttgcatagctggcccctgaagttgtgtcataggagaggatgggatcactcaggaaggctgtgtggtagtggatgagagtcccggctgaattgctggggagcgtcagcatgagaggtggaagtggaagtcagggaagaagcaagaggaggaatgggcagctaggaagaaagacaggaagaacgatggtgtggaaaccggtggtgggggcaccaacctccacttctttccctgcagggcttcagttttctcattttcctctctagtaattcattagggaattattgccctgctacctagagctgagccttccgtgcctcccttcaacatttgtttacactagtgtcagag

SEQ ID NO: 17217 - DNA, 988 bp, Artificial sequence
  DNA replication origin
tgctccaccatcccagttccaggccagcatggccacacctccctagctacgacaaaaccccgcttgccgaggtagccctagcttacctcctcctcctgatttagacagcacggtggccccagctttacccagatggggtcgctgccctcagtcacagtgcagtgttcaaggtccctgagaagaatgcatttgacttagcgaagtggggatggggttggaggttgtcacagttggaaactaacagtcaagactcgaacccaccacaactggtatccagcaaagctccagccccttagcatcaaggcgtcaggcgccacaaacggccaccaggagacagcaatacctcccccttgatgggtggcgggatcccggagccaacgcagaccggacgtcggaacgccgctttagccccgggtgcgggcatctacccagcgcggagcctgcgggcaggctgggcgacggcacgggaggagggagtggctgggcggggccaccgagtttgggcggggcctctcgcggctgggcggggctgtggcgggccctgtcagagcagaactgagcaggcggtggagctgggtctggtccgggcacggagtgggggcttcgaagggaaaaggcggggctcctgggggcggagccatacctgtgggcgggacatgggaaaggagggcccgaggggcggagctacaatagaaagggccaggaggtgctgaggcgaggagaggccgaactccaagggacgacgctcgcggaagcagaggtttggggtgagtgcgagggccttgcgcgagctcagtagtgcaggggtaggtgagcggggcctgggtctgtgccgaggggcaagcagcaggaggggtggggtcgtggacgggacagtcgaggttagggtgggcgttttgggcctgtgggcctcgcagaggtgcagaaagccggcggcaagaaccccgcggggctggcgcgggaggggcgttaccggagcgcggggcgg

SEQ ID NO: 17218 - DNA, 1833 bp, Artificial sequence
  DNA replication origin
gctatgtagcccagactagtcttgaactcctgaggcctcaagcggtccccgtgcctcagcctcccaatgcattgagtgtaggtgtgagccgcgatgcccagccacaaattaggttttttttttgttttttgttttttttgagacggagtctcactctgtcgcccaggctggagtgcagtggcacaatctcagctcactgcaacctctgcctcctgggttcaaacaactctccaaccttagcctcctcagtagttgggattacaggcgcctaccaccacaaccggctaatttttgtatttttagtagagatggggtctcaccatgttggccaagctggtctcaaactcctgacctcaaatgatccatccgcctcggcctcccaaagtactgggattacaggcatgagccactgcgcctggcccacaaattagttttatagtcagaaaaaatgataatcattattatcctacagctgataagataatgtcatggagtatcaaatagagaataagaaaactctggaggccaggaaatcattagtctttcaggtgtaaggttatgaagacaaaggagagggtaataaaagtgggaattcaaagggaaacattttctaaactggcactgcccaatatggtagactttagtcctaggcggttaaattaattaaagctaaataaaatgtaaaattcagttccttagctcaactagccacattacaagtgctgcatggccacaggtgcctagaggctaccgtaacagacagcatggattataggtttccatcactgcggaaagttccacgggacagcgctgctccatgcattccacttcaggcctgagggatccagcttccggcttgtctcttcagcctcatcccttggttcagtttctcacatccttcatgctccagcaacaagcatgtaagcaccatgagcacagagaccgttatctgtctggttctccaagtctagtgggggagacatactacctgggtaactacacgcagtgttatgtggacttgaagacaggtgcacagattattaatacagcaaagagctcaatctggggttcaaggaagacttccgaaggaggaggggtgggcgtatacagagaggaaaggaaagaaaattctaagtagagagaagagtgtgatatgaataagggcccagatgagaaacagtgcagcacaagggaggaagcaccagcgggtcagacactgactcatacaacacacagatgatgtcccatgggccaggcctgagccagctctgggcacccaggggtgaccaggacagctctgttctctgcccccgcgatgcttatatgccaggctcaccagtactgctggagcgccaagggtgaggcagggaatgccaagaactgaggatggagggaaaaggccaagtcaagggccccgcacttcatcttaaggatcctggttagtttgctttttatcctagcaatggaaccctcttattggcctcagtgcgggtcggagtccacatccttctctctctctgtcccccactctggtccctaccactgctgcgggtgatggggagctcctcaaggggtgttggccgcgaagggcacagtcacggctttaggaagacctctttcgcggccggctggggtgtggatttcagaggtgtcagaacagagatgggaagtgtggctgagaggacgttggagtcatctccaagacctgagaaaatggtagggccgacttgagcgacgtcgaagcaggagaatccgttccaagttcagggactgccagggaagctgagggagggcacgcgcccgggcggctgtagtcccgtgagaggccccggg

SEQ ID NO: 17219 - DNA, 1833 bp, Artificial sequence
  DNA replication origin
aggggaagggtggggggcggagggtcccgatgcccgtcccgagaggagggcgtggggtcccagggcgggaggagcgagcccggggcctcaccccgaaccaggaggcggcggcgtcgtccaggcgcggggccgggggcgcggcgcgctgcaggctagggatggccggggagctgtagccgagcgcgaagccgaagctgagtgggcccagggcagcggcgaaggcggcgaggaagacgcggcggccgcggggcgcgctggggggacagggccgagggtgagcggagcggacgcggaggggcgggagggcgaggccgcatccgggcccgggttccccggagctcacctgccgccaggaggccccagaagcggctgggtttcctctgggtcctcgggcgtcatgtcggcggccaacgccgatcggccagctctggcgcctgaaccgccacgggccctgcgagtgcggcccgcaccggcctctcgcagccaatgggcggcggggggtgggggacggtgctgggcgggatcggaaccgcagagcaggagcagccaataggaacgcaaggcggggctagcgaatcagctaggacccgcccttcacattaaagcagaccaatgggagcatagaaccgattagcgaagcgcgctggaaccgcccctagggcggagcggtccaaggtacaggtggggcggagtttccgtctgggagaacaaccacccaattggagtgtagtgcgagcccatagacggggccagagagctgcctcagaactgagctggccaatgaggttggagggaggagttttttttctggcacctcctctcaatctggcttcaaccaatgagggtagaggcggggcgaaggcgaagcacgtgggcctcagcccgagacttcccgcccccaactccgagaagctgcacctgtcctgcccggtcgggtctgcagttcctgctccgctttaatcgctgccctggggactgtattggaggcgtctgacctatgcctgggcccagctctgcaggggagagagcctctaagcagaccgtcctgggccgcctctctctcctctcggagggcgagactggtcagacgctcccgctgggctgctggcggcggaggcgtggccctgtgcaccgaaacccactttcatgcttcccagattgctgaaggctcgggtctccaggtgctgaggaccagtggtaggtggggtcccccacgccgtatgtgtgacagatctgggctccactccccctcttaagtgtcactcacttcacagggagtcctgactcttgaatcttcatctacctgcctccatattttgagttccctgtggattttaatgccaccttctcccgtgtgcacccaagtcgaatgatgaggcactgttggatctcaccagttgtacccgattcatacccaacactctgggtgcaggcagctgtggtggaatgctggtgtaattctggaaagagccagggcatgggagtaagaggcttggcttgtaatccctctctgggccttgtgtttcctcatctctaagtggggatgaccattatcttccaggagagttgtgaagcaaggtaatgtatataagacatgtgaagcactcaaaggctaaccggtatgatgaagacagtcatctgatatgttgcagtcacttgatggttctagcaaccaacatttttcagtcctgaccacaagcctatccttaaagacttaggcaactgcccttctgtactcccacagcatctaatgcttgataactcgagcactagatgtgtattcttatcacagcatttatcactgctttgtgatcccttgtttacttccgtcct

SEQ ID NO: 17220 - DNA, 942 bp, Artificial sequence
  DNA replication origin
ccctcgggacgggcatcgagcccctcagcccccacccctcccctcgggacgagcaccgggcccctcagccccctacccctcccctcgggacgggcgcggggccccggctcttttacctctgagcccgcggggagtgggtggagggggaggatgggctgcggcttcggcgccccctcctcagcagccgcccgcctccaggctgtcgtgaccctgggtgccgcggcggggggagtgctgggcggctggctggtggaccgcgccgggcgcaagctgagcctcttgctgtgctccgtgcccttcgtggccggctttgccgtcatcaccgcggcccaggacgtgtggatgctgctggggggccgcctcctcaccggcctggcctgcggtgttgcctccctagtggccccggtgagtgtcccgtctctcgagtgtcctgtctcgcggcctgagaccgagggggagtgggacaaaccgctccccaggcctgggggcgcggctccccctggcgggaccttctgggtgccaggcttgaagtccctgcgttatctcgcggtccctcccgtcgaccctgggaaggatcctactgttctctccattttacactgaggtcatgacatgcagtctcggaaaggtgaagtcctttgcccaggcgaggtccacagctagtcagaggggaagcagttgcaggaacccagggttgtcccacttagccgtgcccctcttttgctctgcaaacctgcggatgatccacaggagcccactccctacattttggttttcatccctggcttcgggtcaatgactgcaattagcaggaagttcctgtcctgatttctcttggggcaaaggctgctggcctctgtgttccccttcccttctcacaggccagcccctctggcttccccatcttccccctttccccctcctgacccaggctgcccactt

SEQ ID NO: 17221 - DNA, 1338 bp, Artificial sequence
  DNA replication origin
tcccagccctagctgtttcccatattcctttatcgtgagtgtcaccccggtccccgtcacccaatcccagagccccgcccctcccctgaggggtccgtagtcccattccgagaccccagtaccgcggcgacccctgctccctcgagcacttgttgtgtgcactttagttatcaaaacagtctatgtggaaatccagtcccgctcttcattcggagagtccgcgattcctagagcctcagacttcgtcatcccggtctgcgtgactttatgagattctgagtttctgttcccagcacctgcctttgaaggagaccagactccggctccgcccggcccgtgccgggtggtctgcggccccgagtccgtgaccaagccctccgagtgatcggcctgccctcgggtgcacccgcgggtcccaacgtgggggatccctccatccgcaaagccaggtcagccactgcccaccccaccccaggaaatatgggtgtggccctccccccgcatctaggctggacgtcggagagggagggacaggcatgtggggcagcctggaaagaactgatcttcggggaggggtgggagagcgatggtggttgggaggaagtggggagggctgcacatcaggaagggggtgcaagagggttagtgattggggagcagaagggtaagtgctggtcatcagggacggatgggggagggctgttttcaaaccattccccatccttgcaggcaggtggggtgacaagagggcctgaactggctctgcaggcctggctgcctccccagacagccccgcccccgtgggtgcagagctgccatctttgcccatccctctgaggactgggtgtatgtcttcttcaactgcatctcctcccatgactatcttctccctagctcctctagcgggccctgaatcaatgttgcttgcatgtgggttgctttgtggctaacatttattgagcgctcatgtgccaggtactgtactaggggcttgacatacatgaagtcgctggatcctcatagaagccagtgttggtagcatggttactcacactttacagatgaggaaactgaggctctgagaggtgaaccaaggtgacctctgcagttgtgggtggcagatttcggattcaaacccagttctcttttcatcccaaagcctgtgctgctcaccatgcacttccctgggtgattgcctcctggctcattgccatcccttatccagctctggtatttacagacactgtgcaggccctgggcaggcagtgagcacctggctctgagttcaggacagtgtacttcgtgtgtgccaagttatgtgagcaccaagcagtcggg

SEQ ID NO: 17222 - DNA, 916 bp, Artificial sequence
  DNA replication origin
cggatgaggactcggaggcttgggtcagaccactggcctcgtcctaccctcagggccaatggagcccactgacctgcagacccccgacccccttgttccctgcagaaatacgactacgacagcagctctgtgcggaagaggttcttccgggaggcgctgctgcagatcagcatcccgttcctgctcaagaagctggcccctacctgcaagtcggtgagcagcccccacctgctccagccgtttgggccctaagttgggggatggagcccacaggcctccctctacccttggccctgacctctcatctctgccgccccacccgggcaggagctgccccggttccaggagctgatcttcgaggactttgccaggttcatcctggtggaaaacacgtacgaggaggtggtgctgcagaccgtcatgaaggacatcctgcagggtgggtgccgtcccggggtggggactgttgccaggaggatgctgggggcgcagctgagaagtggtggcagctgagggggtcagctaaggctcaaagaaaagcccagacttgcacctggggtctgggtgaagcccactcttcgctgtgtggcctccggagcagccttagccttgcgtctctgtgctttagtttcttctcgcgtccttggctttgctgggagggtcagaggagtgattagatgacatgtggtcagcagcctgggcctggagatagcatcacggccttgctgctttcagcaacgaggcctggaatgagtcacatcccaaccacagacccccaaggcgggatgagacgggtcttctttgagcagagtccagcacaggggcggctgtgggatcagtgctgtgtcctgacccttcccctgtggccctgtagctgtgaaggaggccgcggtgcagaggaagcacaacctctacc

SEQ ID NO: 17223 - DNA, 828 bp, Artificial sequence
  DNA replication origin
cattggccctgagggtaggacgaggccagtggtctgacccaagcctccgagtcctcatccgcacaagaggaccatggcgcctccttgcagggacagcaatcctggtggtggccggggatgaggctcggggctcggcctcgcctaggacggtccggggcagggcgtggggccgctcaccttcagcacccgctccaggacccgctggatggacttgcacagctcctccttggtgggccccttccccagctcctggtgcaggagggtctcgaacgtatacacggcattgtccatttgctgcagggcataccgcggacatgtgaagcccccagggtgaccacagccccttcctgggtgccgctgaggggtcctcatcctcaaccagccccccaccccgaggcctgccagggaggaatggcaagcggtctatgcccactcacagctctgcacgctggagcaagtccctgcctcaaggcaacaggaaatatgggaaggggcctgggggcgcaaggagagcttcctggaggaaggggtctctaagctgagacctgggaagtgagtcagaattagccaggtgggcagaggcacagatgttccaagcagaggaggagagagcgtgccaggcaagcgtggctatggcatgacgggacggagcagaagggaccccctgggcgagggggcctgtggaaggcagtggacagggtgtggggtgggggtcgtagcctcgggtctacctcccgcatgtggatctgggctcgctgcttgaacacggacgtgctggacacatcaaatcgctgctgcagcccgtccagtcgcagcgactccatcttc

SEQ ID NO: 17224 - DNA, 1307 bp, Artificial sequence
  DNA replication origin
tggcctgagggaagctcctgcccccgccccacccttgggcgcagtgccacatggtgcagaggtggaaggttgcaggggacggagtgggcgccaatggcctctgggctgctgccgtgggactcagctcaccccacccctcctgctcgcctctccagagccacctctgccctgtctggaatctgccaagcaggaggaaccaggtcttcaatcaggccagcccctgccacctgggcccagctgcccacaaagggcctcctgttcccaggtcccggggactgtgggctgggactgggtggaggcactcaaggctctggctgcctggcccagggccctcccgcctccccagcccctggcctggtgccatctctccaggtttccaaggctaacggctgacctggcctggcagggtgggtgacctgcgccagatagggaaggggtgggcacagaacaaggtggggaagggccacctcagtcccccatgtgtgcagtggggatgatgataaacttgagcttgagagatgattgggaagagctggtctgggtggggcacttggccgtgggcctggcacgcacagtgagcactcagtggggaggccatgggggagttcttggttctaaggtgcagtggaccagagggaggcccaggagagctgctgggccagggaatgaaggggtgtcctgtgccaggaaggtgtcctgccgggtggccccttctccccagggcgggagctgacgaggctggtttcaggccttccttccaccctgcggactgtgagaaagttctctgcttcctccgtcttggaggctgggcttggaatttgtgaagcctggaattgctcactccgggggctgccaggaagtggggggtggggggaaggaggccaactgggcggacaccagcggtcccagggaccccttcacatcctgcattcctggagcagctgggggtggcaggaggcagctggggcactggctgtgccgggtcctcagtgttggcctggggtgcagaggtcaaggcttcttcctgtctgaccgtggtccccctctgtctgctgcctgggagtgaggaatgcagtttcctttcttggaaggtctccaggtctggctagagtcagctggtcctgggttcaagccccgctctgccatccactagctgagtagcctcgagcagtaactgcctctctgagcctcagttctttccctgggaaaagtagggcacagtgagctgaggattcaacgagctgatgtgtgtgcagcctcagccagggctggggcctcagtttcccaagactgccataacaaatacc

SEQ ID NO: 17225 - DNA, 934 bp, Artificial sequence
  DNA replication origin
gtgcccccgattcttcaactcaacctcgggccaggtggtattggtactggcagaacatttcagaccaggtgaccgagaactgggtacctctgccaaatcactctgctgagaagaggcagaggtaggatctgcaccctggtcccgacctgatgcctaagcctgaaaccctgttccacacggacgggggacccaagaggaagagagtcatctccagctgcgaccacatccagctcatgtccaccatgggggctgcacgccggcgccagccctggtttggccccagtggagggcgctgtgccagacccgttcctggctcatccggtctctccagtgggctccagggacacacctcacccacgaggcccagcccggtttcagggtttcagggctgagaggtttgccgactgaaaccaggcaggtagcagcaccctgtagggtggggcaggctcagaacctgcccgcctggttcccagggcatagggagcaggtccagcatggggaggtgggggaaagaggggggtgccgaccccacccaccctacagtccagggaccagcagaggcagagtcggggcagggactccattctcgcaggtctcagagttgtcccaagcaccaccatctccatcatgtgcctgagacagcagggagagcttggggtccagaaaggtggtgacactctcctagggccacacagcacatccaacagagctgggttggcatagaccagtgcctcgctcagggcctttctactttctacttgccccccacctactgtcacaatcgacacacaatagcagcagccacttgtcagcaccacctctgtgcccagcacggcactgcacatgcacactcattatttcacgcactgtcctcacttcccagagaacactgaggctcagagaggttaagggacttctccagggacacacagct

SEQ ID NO: 17226 - DNA, 1609 bp, Artificial sequence
  DNA replication origin
cggggcggggcggggtgggacgcggcgggcgcagggcagcgggcggggagggggcggggttggcctgcgggggcgtggtctggtggggcggagcggggcgccggggtgcagggccgagggcagggagggggccaaggcggccggctggagggacggggcccgaccgggagcggagccggagcggaagccgcagccgggcggcgggagcggcgggagcggcgggagcgggggaagcagggcgggccgggctccatggcgccagcggcgtccgcctgagcagcgcgggcaacagcggcggcgtcggccggatcgggccgcgacacctcctggccatgggggacgtgctgtccacgcacctggacgacgcccggcgccagcacatcgcaggtgagggtcgcgccgcgccacgcgcgcccaggggcctgccggaacccccggaccacgcccccgccccggccagcagttggcgccggggccgggggctcgggggagtcaggccgggccggtgggagctgccagggagcgtgccccgcgtccgagctcgttccctctgagcctgggcgccccttcccgcgctcttctgagcgccacctttcccggctcaaggggactcggaactccttctctcccggaaccccttcggagcccgggcttggcggacccccagcccacgacccctggccgagctggggcaggggtcgcagcctgctgcccacccttggctgtccccgcccagaagcgttgcaagcccatccgctaccagctttgggatctcccagacccagccagctcgcgctcaccttcctccccagccgtcccgtccccagctccgccgggccccagccctggtacacgtggcggaggcttcctgaaggacgcgcccatgaaggcccgggactgattctggggagtggggccagggatcgatggggcgccccggaggcggtggggttgcatgtcctttggcgcagacagcaggctgcccctgctagcagcaggggcccagggaccggtcaccagagtggggggccctcagggccagtcgccagccccttcaaccctgttcttcagccaaccctactctcagcctattactgcacagtggccacttctcccagggacagctgtccccaaggctcctggggaagccggagctgcagagggggcctgggttccttttccccacagactctggagaacagtgagataggatgaggatctcggctgcctgagaaactcctctctggccgatctctcctggctggtggagctgccctgggtggaatcccagcatttgcttcccagacatctgtcctgtacaccttggttttctcctttttgaaatggggtcagtgatttcttccttattaatgagttgttgggaggcttacgtgaagtaactcatgtggcttgcttagcacagagcctggcataggagaggcacttgtatgtggggtgacggttcaggtgggtcgcccctcgctgtctagtgggccctgagcaccgcgtccgcctgcacttatttttgtgtcctgtagaatttcaccaccgtgttctccacgctcccttgagagcaggaagccctgagagcagtggccaggtgtccttt

SEQ ID NO: 17227 - DNA, 1474 bp, Artificial sequence
  DNA replication origin
ggcgccgggcgtcgtccaggtgcgtggacagcacgtcccccatggccaggaggtgtcgcggcccgatccggccgacgccgccgctgttgcccgcgctgctcaggcggacgccgctggcgccatggagcccggcccgccctgcttcccccgctcccgccgctcccgccgctcccgccgcccggctgcggcttccgctccggctccgctcccggtcgggccccgtccctccagccggccgccttggccccctccctgccctcggccctgcaccccggcgccccgctccgccccaccagaccacgcccccgcaggccaaccccgccccctccccgcccgctgccctgcgcccgccgcgtcccaccccgccccgccccgccccgccctcggtcctgcacccccctgcgccccacccagcccctccagggcccgccccgtatgccccgccccctccgctgcctccggcgggcggggcacaggggcggtggacgccgggaccgccctggagaaggagacaaagagaaggtcccagaaagggagaccgcggagagactgcgaagagcgcacccgccctgtacctaagcagagaaagagacggggctggtggggacatctgaaaaactgggggtgctctgggggactccagcctgagtgtcacccccctcccctccccaaccttgcccgcgcgggaaaagaatcgcgccgaggaggatgtggggcactggcaggggacgcctggacctacgggccggaattcggcgttcgccccctcctctaccctgaacagtgccccctgcccccccaagtcccgcccgccactgcccgcgctcaggaagttccctggccttgattcgacctgccccagaaggtgtgcccgctggtcttgcacaacagctataggaagggggtggggaaggctcgggcccgaaggcacccccgccccagtgccaggcgggcttgcctcaggctcagcatatgggcatttcactcgggaggcggcttgggggacagagcaaatcagaaaaggaaaaagcagtagcactttacagtttgcaaaagactaccagaatcaaaacccggagaccgacaggcaccagcctatggggctgggcatgggtgggtcgcagtgccaggggaatgtgtttcagtttcaggacctcccaagctggcaggggagacagtcaggttaaccagtgggatccccagatctcaatcctttggctgctggtgctcagatctcctgatctgcactgggacaaggccatccactttctgcttgttgacccctggtaactaagcactcaccacttctctcatgcatttcacgttgttattgggcagctcttagtgtgactgtggcataaggcaggaagtgatgatgataacagttaaatttgctgagcacctgtacttcaggcctgtgcacaccacaggaggtaggtttgaaatggattaaagtgatgcaggcattcattca

SEQ ID NO: 17228 - DNA, 1417 bp, Artificial sequence
  DNA replication origin
cccttgaagtgggggagggaggcctacatgagaccctgcatgggaatgctccaaaggtctgggcagtaagccccgagcttatggacaatcagaccagagaccccaagcctgcctcccctgcttacccaatgacaggcacctgagataccgccagggcagccgcagatggtgaggaggggagccagggccccagcatgagcccccttgtctacctgctccctgacttaggggagagccagagacatccactgtgcttcaggacaaggagcccagggcccaggttatgtgtgcatgggaaatggggaaactgatgtccagagagaagtgactgccccgggtcaccaacagggcagggccagactcggagctcaaactgccggctccccagaagctaggagtcctgctcagactgtggggagggctctgggccctgattctgtagggggaggcggggaggtgctgctgtcagggagaggggtgagtggggaaaagcgggggtggggagacaaaaggagagggagggagggaggaggttggcagggcagacaacctgtgtttaatgttgagttagcaggaggcgcctctgcttttcacagcaaaatataggcaggtcgtagaggctcagtgatcctctcaccttgacctttcaaagctttggaattacaggtgtgagccatccaaattgttgaagcttcaggccccagaaaacctggatcctccctggctccgtgggtggctaggaagatgggtggcccatcattagatccagggagcatcatggcagggtaagatcctgacttaggagtactttgccttctccagttatgacagggcaccctgggtgtcctcatcatccgcccccagcaccagtgtcttgtaaagaagacctagaaaagctttcagtagcctgaggctgtctttaagaaaaagaaaagaaggccagacacggtggctcatgcctgtaatcccagcactttggggccgagacaggtggatcacttgaggtcagagttggagaccagcctgggcaacatggtgaaaacccatctctactaaaaatacaaaaattagcggggcgtggtggtgcgcctgtaatccgagctactcaggaggctgaggcaggaggattgcttgaacccaggaggcagaggttgcagtgagcagagattgcagcactgcacttcattctgggtgacagggcaagagtccatctcaagcaaaacaaaacaaaacaaaacaaaactccaaatacagaattaggtacagagccttggaaggagacatgcccttcgaaggagtacatccgtctctgctcagagccagctctggtttctacttcctcatcctctgtaacccaagtcccaccacttcctgatgggaaggtgggagcagcagtagcaagggcatggatgtaggg

SEQ ID NO: 17229 - DNA, 1077 bp, Artificial sequence
  DNA replication origin
agctcaaatgtattccaaatatttaatgaatgttcactgatttttactactactagctctcttattcttttttatttttaattggctcaatttgtgttactttgaagccaaaagcaagccctcccccatatttcaaaagtagtatctgagaccatcctggccaacatagtgaaaccccgtctctactaaaaatacaaaaaattggccaggcgatggtggcgggcgcctgtaatcccagctactctgaggctgaggcaggagaatcacttgaacctgggaggcggaggttgcagtgagccaagatcgagccactgaactccagcctgggcgaaagtgcgagactctgcctcaaaaaaaaaaaaaaaaaaaaaaaaaaaaaaagaaaagaaaagaaaaaagaaaaagaaaagcagtatctcctattaacaaagaaagttgagcaaaaactgacctgggaccgctttaataaatacggactccaggaaggagatactgagaccagagtcggtcccacagtatattcgtatcagatttggggcttagaaacttctaaactctgagcgcccataagcaagatgagattctgccttgtacatggtcgtagctccaggggacagaataacggcttacacataaaagtgacagaatactgaacattagctaacggatgctacgctgcctgaaggtaagtctagtgctatttccaatatctccgagacttggtttttccaccggaaaatggagattaaaaataatgcccataggtatgagctaagaggagtgtaaacaaaacaaaataaaaagcaatgcccagtgattggaggatttgatgagatgatgcccgcgaggtgcttggcacggagtttgacacaagaactcagtgttggtgaatgcacgaatgcaggtacccagcgacagggaggtgctgtgggtggattcaccctggcttcgctgcggctgggagtgggcgctgctagtaagagatctcgcctccaagctccttccgtgggcaggaaaaaacggaagctcccagaaagaggaaagacaggacccgagcggggtttcaggcagatggag

SEQ ID NO: 17230 - DNA, 1536 bp, Artificial sequence
  DNA replication origin
gaggatccctatgggtcctcctagccctaaacatctcgagtacaagtatcagaacccgtactgcatgggtacaatgaaggtgttacgatgagcaccttttaaaattttgtttcatttggtgttcagtttttataacaattttcttctgatgtaataggtgagataaggttttacaactagattcctcagtaggagtatttcctatatatcaatgaaaagaatggagaggggaaataaaacagctatggtgcccaacaagaacactacatggccaaaagcattccacagcgagcgcgcgctacgataggagagaatcattggaaaggaaactagatttccaccattttattctttttcctttcttatcctctcctacagagaaaagcccagttttaatcttcacttaatccccaaagagatagcaaaagccacagcaatccttacacattttttttgttataaagaaatggacaaaatattgacaaggcactgtttttccacacatatcaccaatcttatttagcactgtggatgccgttttgcaaatgtcacccaccatcagccctcgctccgctgcggccgccactcgccgccacccacttttaaaaatccattcatgtggtgcctttcatccaaacccataaacaaccatttcctccctgccaccgtggtctgagctcccgaagcgttcggccacggcagggcagagccccgcaaccagggagattgcagactgcggcgctgggcggcggacaccgaagctctcctcatctcccgagtgatttcaggggttcaggatcctgataagtccccgccctggaagccaagccccgggaaggggaggagtgaggtggccccggcccagcagagctcagcctccggaaaacaggcgtctcctccccaggccaagccactgcgcctagtctcccaggtgggtctcgcagccagggaccgcggcgcggcccggggcgggggaggaggacgcaggccaggatctcgctcgtcacgactcacccaggagggtggggaggaggagggactgcaggaaaagggagcggagtctgggcgctcaaggaataaagacgaggaaggggagaggggactgaggggaaggtaacgggggtgaggatgggggtgcgggggagggtgacgggctgcagggggtagaggcgagatgaaggagagggacgggtgttgggggtgaaagagggggaaggagggtgggatgggggagaggcgggatggagagagtggggtgagggaggggtggaggaagggggaaggatggggcgaggggagagaaatgggggtgaagggaagagagggagggagggatggaggggaaggaggatgcagggaaaagggagacagggaccgcgaggaaggaggatggcgagggaggagggcgggctgcagggggagggctggggtgaaacatgaggtgagggaggggagagcggggcaagccttcctctcgcgcgggcggcgcctgaataacgggaccccacggaccaggagcctcaggcccggggcgca

SEQ ID NO: 17231 - DNA, 1018 bp, Artificial sequence
  DNA replication origin
aattatagtctgtgttcatttcagcatggctcagcagggtctgggaccaagtgttttcattcatccaaccaatatttgcgctgtctctacatgccaggagctgtgctgcatgggcagcagagatagtagtgtgtaagtagaccgggtccttgtgggatttagacagacagtggtgacgcagcaggaatgtgccctgacagggcaatataggtaatgctgaagcatgtgggaagcccccaggaaggcctgggcatgagcggggcagagtgagacctgcaggatgaggaattagccaggcaggagatggggtccgtggggcctgggggagaggaaggtctaagcttggcaagaaaatgagaaaggctgtggctggctggagctgtggggagtgtgtggagagcagtcggagagttgccagggcctgcttagccttggtaaggtcgtttatctctctattccagcagctgtgggaagctactgaaggttttgagttggggagaggcatggttagaattgagttcaaaatgctatctggttgctgtgtggagagtgggcgggaggcagtgggagggaagaggctgtggtgctggtcctagctggggatgtgatggcgaggatggtgatttatgccagggagagagcagcagtgttgggagggggaccccaacttgaaggcatcttaggatgcagaagggtcaggtcatggtgatggctgtgcaggaagaggagaggaagagtcagaaatgaatcccagttttctggctcgggcggccagttggaaggtcatgctgtgcattgagagatgaaaggcggagaagagacaggtttgtgggggaagatgaggttttgtaggcacaggcttcaggtcctgtggaccacctgcgggggatgctaatgggagcaggcagacatgcttgagattggcagtcacccggtgccagagtgtgggcaggtcagatgcacaggagagtgggagaagagggctgggatctcaccccgtgggacactggcatttaca

SEQ ID NO: 17232 - DNA, 1152 bp, Artificial sequence
  DNA replication origin
gagttcagtgctcgacgggctccaaacttcttgaagctccgttcctgcactagggcgccctgcctgcccagccttctggagttctcaggggtcgggtttctgggccccttcttcgcgccccttccccactgcagcgttgctctgcgtttccgctcctctgcgttggggcccacgggacgctgtgagatcgggggtggcgagagttgttgggcctcagtttccctggtgccgcccgcaggtggctggcctggggaatcccggactgcccggcacgcgacacagcgtgggcatggcggtgctggggcagctggcgcggcggctgggtgtggcggagagttggacgcgcgaccggcactgtgccgccgacctcgccctggccccgctgggggatgcccaactggtcctgctccggccacggcggcttatgaacgccaacgggcgcagcgtggcccgggctggtgagttgagagcgccaggggtgggcgggcgggccaagggggtgggggttggggcgcgggggccagaggggagcactggctgtgacagatccgcgggttcacctccaagtacctgttgagctccagttgctgcatggctttgggtacttcggggggcctcagtttctttatatgtgaagtgggattagttgtggtccctcatcatgggagtcgggacagtgcctctctgggcagatgggcagtaaccagggctgccgtttccctgtgctaagcggagctgtttgggctgactgccgaggaagtctacctggtgcatgatgagctggacaagcccctggggagactggctctgaagctggggggcagtgccaggtgaggtcctgagatggtcagggttgggatagggcttcaggcctcccagttggggtggagtagggctgctgacccagtctccacaggaaatgggctgctctgacccagccggggcagggaggggtggaaggacactgccccagggaggcactaactgcccctcccatatcccttgaaggggccacaatggagtccgttcctgcattagctgcctcaactccaatgtgagtctacccttttgttgtgcaactgggtcgggtgggccaggggtcccccagcacctcgccaaagcttcctgggcctctctggctctcccacaggc

SEQ ID NO: 17233 - DNA, 948 bp, Artificial sequence
  DNA replication origin
tgcctggccctctgcctttgcgttagtcttctcccaagcccgcacctcgtccgaatctgtcatgaggccccttccaggaggaccccgaggcctctgccaactacctcgcggccctggccctgacgttgctaggcaccatcaccaggacgcccacaggccccacccctctggccacgcccccgggaaccaagctttttgagccggagggaggtagaaaacttttattagctggagaggttgaggcctacagcggggaaaggacttgccagattttcgccgcaagtcagggccatagcggggggcataacaaggcctcccaaccgaaggtcaagcaagagctccgagcgtcccacacaagtcccgaagggacactgtgacgccgcgctactgaaggcgcctgggttcccggactcggccaccgcctcgccgcttccgcccctcagaagcatggcggccacgtagcccggcccggattggacgttggcggtggacgccaaacagttggcaacacgattggctgctgcggggtgatgacgtcagggggcggtgtcggagtgaatgggggcagcatgaggccgggcggctttttgggcgccggacagcggctgagtagagccatgagccgatgtgttttggagcctcgccccccggggaagcggtggatggtgagtggcgtggggcggcgacgtaggggctcccggtccctagcttcagttcggccattatgtcccgggagccgagtgcccccaaattgctgctctgttttcttaactggtgagttcagtgctcgacgggctccaaacttcttgaagctccgttcctgcactagggcgccctgcctgcccagccttctggagttctcaggggtcgggtttctgggccccttcttcgcgccccttccccactgcagcgttgctctgcgtttccgctcctctgcgttggggccca

SEQ ID NO: 17234 - DNA, 1760 bp, Artificial sequence
  DNA replication origin
aaaacacatcggctcatggctctactcagccgctgtccggcgcccaaaaagccgcccggcctcatgctgcccccattcactccgacaccgccccctgacgtcatcaccccgcagcagccaatcgtgttgccaactgtttggcgtccaccgccaacgtccaatccgggccgggctacgtggccgccatgcttctgaggggcggaagcggcgaggcggtggccgagtccgggaacccaggcgccttcagtagcgcggcgtcacagtgtcccttcgggacttgtgtgggacgctcggagctcttgcttgaccttcggttgggaggccttgttatgccccccgctatggccctgacttgcggcgaaaatctggcaagtcctttccccgctgtaggcctcaacctctccagctaataaaagttttctacctccctccggctcaaaaagcttggttcccgggggcgtggccagaggggtggggcctgtgggcgtcctggtgatggtgcctagcaacgtcagggccagggccgcgaggtagttggcagaggcctcggggtcctcctggaaggggcctcatgacagattcggacgaggtgcgggcttgggagaagactaacgcaaaggcagagggccaggcagagagaccgaggctgggttcgcaggaaagggtgaaggccgggagaggcaggggcagcagtccgactcagggaaggccctggccgccatgccaagaaccaggcatgtgaaagatccttgtaaggctcggcggctgcttggacagaggtctctggcttgggtagctggtggggaaggtgacctcaccaaaatgggagaacctggggcagaagtcaggtgaggtgctcagtgtggcctgctggagtgagggtcctgaaggttacccaagggactgtaggacccccaaggcctgagacttgggaccaggcctgagctggagacatcaaagcttggggtgtcagtagccggaagtgggagctgggaaggccctgggggagaacagacggtgttgtaagcatgaggaccctgatccctgaccttgaccacaggagagggagaagggcaggactgcagagggacaggttggagcgtccctaaggggaatggggctgggagcgccaccggaaccccgagtgggagtgcctccttccaggcctcatttccgcctctcctccctccctgcagaatgctggggagtgtgtcagtgggtgggggtcgtctcgggggcctgctccagcttgctgtccttcggttctaggatgccctgaaggttgaccagggcccctcacgggacatcccaaagccatgggtgattccagcccccaaagggatcctgcagcacatctttgggaccagccacgtgttccaaagcatctgtgatgtaaaaccaaaggtcacagggttaacagtgcccctcaaagtcagggaatagtgagtgactaccttgctttggggtcccaggttcctgcccgacacagccattcacatgctgtgcagctttgagccacttactctcttcaggcctcagtgaactcaactgtctaatggggctcttccacctcagtgggaacgaggctgatggcctggctggactccaggaacaccagcctgccctccctgggcttctgtctactcctcctgcctctccacccagctcccttgcttcccacaacccccaccccagccctatgccctgggctggtccacagtcagggccacccctctgcctgtccccactttccccacagc

SEQ ID NO: 17235 - DNA, 1118 bp, Artificial sequence
  DNA replication origin
ggagggagaaagggggaaggggaggagggaggaagggaggagggaaggcaggagggaagaaagaaggagggaggaagggggaagggctacctcatgttaggtgccctgggtgccctggtgtgtggcttcagaggattgtggctaaagccctcctagtgtgctcatctgcccagggacacctcccccagggtgtgagctccatccggacagggatgacatgcttctctcatcttttgcttcccatggggtgcagcacaggcctagcacagagccagggctgagcaacagtggaacaaggacctgacatggtagttgagtggtccaggccagtgtgggcctcttcccagggaggacagcacccactgcactgtgggatggggcttctgggctggctgacagccttgcctcttcctgcaatcttggggcacactgaggactcccaggttggggggcatgcccctgcccgccctccccactgtaccttctggagaaagttgtagagtctggcccggaagatgtagacatcggcgttggtggtgtcctgcttcagctcgttggtgatgagcgtgaggcaggcctgatgctgcttgagggccaggagacaggccatgctgagggcagagggcacagagtgctcgtttcccgggtggggcggcaggaagtgggtgctgggagaaggggctggcaggggcactcaccatcggtaacggaagcatggtttctcaggctggagctcagcagcatgtgagaagacattcagggcatccaggaaggcacactgctcaaaaaggcattgtccctggggacacaggggacagtcaattctgcttgccaccccagcccagctgcaccccccagttggcagcagaaagccctgaggcaggagggagagatacaaagacaaggacagagccttttagatctggcagagacttgaagaggcagagacacagacagagatggagagagatacagatctggggaaagacagcaagagacagtaagagatgcacgcttggcaagagacaggaatacagagattcaggaacaaagagaaatgtagaaaactcagatagctgagccagacatggttgctcacacctgttatcccattccag

SEQ ID NO: 17236 - DNA, 1433 bp, Artificial sequence
  DNA replication origin
tgtgccccagaccccaagggctccgagccctggcctgtactccacttacctcttttttctccttctccttttcttcctcctcctcaggggcctcagcctctccctctgagcttcccggttttacctgcggaatctcaggggtggccttcagctcctcggaggtcgcaatcaaaggctccccctgcttccatgagtgctgcagggccaaggccttctggcgctccaactcgtgccgtttaagcatcctgccaaacgataccccccaggtattgtcagtctccctggcccatgctggtctctccaaggactagacaacggccccgtcatgcagctggagccagaggagcctggagctgcagccattccccagccctggcctgtgccccttgctccagggcttaccccacaatgccttgtgggctgccggcctgcaggctgccctccaccatctgctccagctgcagcctggccaggtgggctatctgggtgctaagcacctcctccaccgacatgcccgggaagaggttggtcatcagcagggacagctgccacgaaagggggtgaccagagccaggtgagggccagagcagcagacagacagcacgatgctgccctgaccctgcacagccagatttggcccttcccagggctgaagaaggaagagttttgcaatgttttttgtttgcttgtttgttttttttttttttttttttttttttttttttttgagacagagtctcactctatcgcccaggctggagtgcagtggcacaaacttggctcactgcaacctctgcctcccgggtcgaagcgattctcatgcctcagcctcctgagtagctggaattataaccgtgcaccaccatgcctggctgctttttgtatttttagtagagatggggtttcaccatgttggcccggtgggtctcgaactcctgacctcaagtgatccacccgccttgggctcccaaagtgctgggattacaggcatgacccaccatgcctggccttatgattgttatcaaaccagatttctttgggggccgaggagtatctttatgcaccgggcatgactccggagcctacactcctgacgtggcaggaacctacctttggttgcttggggttgaggagcaggacagtggccacatcctggcgggccccaaaaatgttctgcagcagctgccggctcttggcccggtacaggtagtactgggccttctgggggttgtgccggatggccgtggagaagtggttctctgccttctggaactgcctgcacgacacagtgggtcccaagctgctatgagctgggccatctgtggggaaaatggtggctactgggccccactgaggagttagagggaaaccaggctaggtctgctcccctcaccacgcccctctcctctctctccatcaggtacgtccctgat

SEQ ID NO: 17237 - DNA, 1088 bp, Artificial sequence
  DNA replication origin
ctcagccagcagaacccttggtggaagttcttgggcctccccggaatggcctggccgtcaaaggagaagtgcagtgcgccttggggatgggcggggtctgcggctgaccccgttgacagctcgcatttagagctgagtgcaatctagaggaccgcctggtgggggcgctgccgagctgaatcaggcccgaaggtggctcttttccgccacagaccccaaggtttgcgtgccatgtgcataggcagcttggacaaacgtaaggacacaggagtcccagaccaggttccagacatgatgttctccttgaacctctgcctcggtgggatgtgtcctcaccatcctcctgtggccctaggtctggagtgtgacctggctcagcacctggccggccagcatctggccaaggcgctggtggtgaaggcgctgaaggcctttgtgcgggacccagcccccaccaagccgctggtcctctccctgcacggctggaccggcaccggcaaatcctatgtcagctccctgctggcgcactacctcttccagggcggcctccgcagcccccgcgtgcaccacttttctcccgtcctccacttcccccaccccagccacatcgagcgctacaaggtaggctggatgcgtccttgaccactgttctcaccatggggtgccaccctagggagtaagtcctgagcccagacaggggagtcacctgctccaggccacacacggctgcagccccagccctcaggacccatcctgcacagaacttgggaaggtgtcattctacctggcagggagtactttgattccttggggcagtaaggaaccctggcagtacctacatgccagggttgttgtgagggacatgagattataccattgcagatatcatttatggagcacctatgtttgtcagataatctgcactgttgtcttgctggaaatcagccccaatttgtggctcagaggaagcatcaggaaatattggctcttactactactgttgttgattgcagggtacccaccaggctgatcagtttcagccgtcaacactgctgtgtagtttcagggagcaggaaggagccttcccc

SEQ ID NO: 17238 - DNA, 2197 bp, Artificial sequence
  DNA replication origin
ctgccactttttttcagaataaccttgggcaagtcattcctgtctctgagccttagttccctaatctgtaaaatgggttgtgagagcttcatggtagacatgaaaagtagtcatcactgtccctggtacatgaaggatggccataataataataacgatcccacatctgggtgtccactcagcagggcagcagggtggcccctgcaggccctctgcctggctggtctctcacagtttggcctccccagatttctcggctggagcagacatgggtgaccctgcggcagcgacacacagagggtgccatcctgtacgagaagaagctcaagccttttctcaagagcctcaacgagggcaaaggtacttccttgttgcgtgaccttggacaggctgcagccctccctggggttgcaaagactcccagcatggacagtgatgacagcctggctgagctctgtgcaagctactttccctgagctcactgttcctgctggcagctgtgtcagccctgttcatgtccaggctcagcccttggggctgggccagggctgcagtgggttcagttgggggaatccgaaagaaagggtttgtcccaggagtcaggagcccttggggctctctcccggacctcagccaggcccgttccctcctgcacctcagcttccaggactgcagtggatggtggggcactacaggatctttaagcgcctgctgcctttctccttgcagaaggcccgccgctgagcaacaccacgtttcctcatgtgctgcccctcatcaccctgctggagtgtgactcggccccaccagagggccctgagccctggggcagcacggagcacggcgtggaggtggtgctggctcacctggaggccgcccgcacagtggcacaccacggaggcctgtaccacaccaatgctgaagtcaagctgcagggtgagtggcgggtggcatcttggggggcttgcaggcctgggcctccctccacctgcctcactgcttcccttttctccaaggcatccattcacatttctccactcctctgtcctgccctgtctccctgaccccttcctctcatgtcttttcttttcttttttcttttttttttgagatggagtctcacactgtcgcccaggctggagtgcagtggcacagtctcggctcactgcaacctccgcctcccaagttcaagcgattctcctgcctcagcctcccgagtagctgcaattacaggcgtgagccaccatacctggccaattttttgtatttttagtagaggtggggttccaccatgttgggccgctggtcttgaactcctgacctcaggtgatccacccgccttggcctcccaaagtgctgggattacaggtgtgagccaccgcacccagcctaaaatgtatacatctttcttaggaaataatttggaacttaacagaaaaatacgaaaaaagaaaaaaaatcaccaaaaatctgcaaacatatttaacattaatattttatggtctagtcatttttaaattatatgctgcaaataacaggacaaagatgctaaactacagggtcgtgttgattcacaaaccttgttggatccctggcggagttgaggggaggtccctaacaggggggtcctgaagaatgctagggctctggacaggaaccccagcctctgccctgaccctatgccccaacactgcagggttccaggcccggccggagctcctggaggtgttcagcacggagttccagatgcgccttctctggggcagtcagggtgccagcagcagccaggcccggcgctatgagaagttcgacaaggtcctcactgccctgtcccacaagctggaacctgctgtccgctccagcgagctgtgaccccagggacatttcccctctgcagctgcggacagcgtcaggggcagaggggcacacaactttccccagagcaccccaaggacactgtgatcaacccgagaatgttctgggttcaactcaagcatctcccttgcacctccagggtcctgcgtggactctgggttccatcccacctgctacatgctcaccaggtctccattgaggaagaacaggaacgccggttcccccaccagcttttgctgctccccttcctgctggggttccctgttttcgagccatgggaggcaggctgctcacgcctcctcactctctgtctgtccctcac

SEQ ID NO: 17239 - DNA, 1741 bp, Artificial sequence
  DNA replication origin
cctctccttcccccacctccaggccccaaagatggctactccaagacagacagaccccagcgctggccagaaggcaggacagatgagggagggcagtaaagggccttcatcccaggtgagtctctccctggggcccctcgctcctgagagtccgaaggtcctccagtccactccctgcctcctcagactatccacagatctcgcctcctaattctgtggctacatccctcacccctctgctcccatactgcctgggtttagcctagtctgcattgctcccaagacaccatgattcccagtgtcagagatatctagaatctctgattccattcaacattgactaggtccctatcctggtcctgtgccagggctgaggacccaaggtggcctctgccctgggggaggccttgcagacactgacaatcaattccaggtttcctgaatgtcccgagatgcacagagatggtgcaccaccaaactagtcagggggcagagtcaggaatcacttccctgaaaaggtggtgtttctgctgaggtctgaaggactgggtgagccaagcaaaagcaccagggtggagagggcaggtggacaggtggacagggaagagcttctggggagagagcggcaaagtcagggtcctacgggcagagccaaggggagggaggggagatgaataagaagcttccaaggggctgtgggggcaggggcaggtgtggcacggctgcctcagggagctggggtttatctggaggccacagcagagccatggaggggtttggaagtgttggggcaggtttagtccacttatggagagcagcctagggttttccaggcagtggcagggcagataaggcgtgggcagaaggagtgggggaaagggagtttagatggccattgattcatgtgggggagcagggcggaggggtcagagaggactcctggccgagatcctagaaggatgattgggacatgctctgagtgggcaaggctggggcaggagcagcttggtggtggacccatgaaaatttggaccttgaggagcctgcagggctctggggacagatggtgggagtgggcggtttgcacaggtgctcaggagaaaggcggggcctgggagtgggaattctgcacatcctccggccgtggtagaaaccgatgcccccgaagggcagagaggcccagggctgggctaggatctgggccttctcagacacctacacttctccaaggggtcccctacttctgggggtccctggtctctctccctctcactctgcggtgctcacaccaggctagtcctctttcctcatatcacaccaaaccctggaaaggggagagtgggcgtcacagggaaaaagggaaccaagacctcagccttctggcgtcctccttgacaaagggcatgcgattgagaccttcccccagttccacagctggagctagagggacgtgggcaaaggagggaggaggctggatgttgaagaaccgccccaaggctgccactgtgtgaccttgagccagtcacttcccctctctgggcctgggcagcctcatccgttaaaggggctgggagactgggctccccttttccagcttaatcactggtcacggagagtttggggggaccaacttggtcctcccacacacctgagggtgaggaatcctagggtccctgtgccttgatctcacctcgacctgggagcccccagttccctagagttgggggtgctggggtgcgaa

SEQ ID NO: 17240 - DNA, 1109 bp, Artificial sequence
  DNA replication origin
gggcggagggaggaacaatggccccctcccctcccctggccggctggagggtggggtctccccgccccgcctccccgctcctcccccgacaaggcgatgaggtaatcgcgccgctgagaggcacgcgcagccggtgcctagccggttggtccctgcgcccctgccccgccggccaccgcccccccacaccgtcccggccccggcagcctggccccaccatgaccgagcggtgcagcctgtggagtgccctgtcggccgccgcctgctgcttctaccgcggctccttcgtgcaggtgcaggtgagggggcggctcggcccccgccacgcgcgccgggctgggacccccggccgctccgcccggggccctagagccagccggggagctgcagctcagcggcgcccggcagggtcgggctgggctgggcccggccgacccggggagggggcggggtcaccccagcctcacctctgggcgcccaggcgctccgcggggtgagggttcggcggccactcctgggactctgggctgcggtagatgccggtccgtttctgcctcctccgcaggagggagagagctggggcaggggggactgggagatggggtctccggcgtcctgccggtcctccgcctggtacgctggcccttgcggctgacctgggcaccctggctccccattgtaccgggggcgccggactgggatctgaagactgagtgaggagcaggaaacgcgggggatgcttcggatgccagggttggggccagagcgcccgccaccctcccgccctctaggtgggcttggacatgcctggggcgcgggtctctcccagcccagctggccgggcagtgcaggacggcgccgcggcggtgagagggttaaacggaagggggtggaggggaggacccggaccccgcctctctgcggagcatcctttggggatggctttgcttggggttgggacgccgaggggagctggaggggatgctgggctcgggctggcgggaaggggttaagaccctgtccgggggtctccgcgctcctgccccctgagccccctgggagatgccaggcgcgtcggctcttcgctcccccaggctcacacacgctcg

SEQ ID NO: 17241 - DNA, 1090 bp, Artificial sequence
  DNA replication origin
cccagcccagcccgaccctgccgggcgccgctgagctgcagctccccggctggctctagggccccgggcggagcggccgggggtcccagcccggcgcgcgtggcgggggccgagccgccccctcacctgcacctgcacgaaggagccgcggtagaagcagcaggcggcggccgacagggcactccacaggctgcaccgctcggtcatggtggggccaggctgccggggccgggacggtgtgggggggcggtggccggcggggcaggggcgcagggaccaaccggctaggcaccggctgcgcgtgcctctcagcggcgcgattacctcatcgccttgtcgggggaggagcggggaggcggggcggggagaccccaccctccagccggccaggggaggggagggggccattgttcctccctccgcccgccccccgctcccagcccctcgccccccgccctccagttccgcgcgctcgggctgcctggagctgcgggcgcggagcggaggacctgccaaggagggtattaccgggggcagcgggatcgggtggggacccatgggccagcgaggggaggttctgcctcccccactcgccgcacctctaacagaccgggagcgggcagagactttgaattaaatcatatctaaaactggaaaaatccgtatatgtgctggaccaaattctctgtggcctcaggaaatctcccagagcccaggatttctcatccctggtttggaatcagagactctgctgggaatcgaggatgttcactgacaagactctgggggtgcagagagccagtaaagcccagtggttagaggggcagcctggattcaactgtcccctaactactggtgcgcccactcccaccagctctttccctgggatctacgactcacttgtggaaaatgcacctgtcaaacgcagctaaagcctgtgctgacctcacagaactcttctgagctttcgctgagctggtgcatgtaagttgccaggcatgaagtaagcgctcaataagtgcacgctattattttcaagcttcctgtcttagaaactggactttttggcctggcatggtggctcacgcct

SEQ ID NO: 17242 - DNA, 1291 bp, Artificial sequence
  DNA replication origin
ccctgtggccggaacaagttgccaaggagggtggggcagaggcagaataagggacatgaggtgcaagggagacagcctggagggtcggcagggtggctgtcgggtaccagcaggccacacagggccttgtgggttggagaacagatgagccaatttatgcctgtttttctggcataatcatggtaccgtctttactctcacaaaggaagaaaagttctggtttggatgataaattgcatggccatggagaggagtttagattttgttcttctagagatgggagccgctgaagggctgaggatggttcgtttgccatcaaatgcttaggttgtaagcttaggtgccttctggccttggggcagaagctgactgtgggtggcagtggacacggagcccgagggaaggctcctctgctccactggagacacgagggtggccccactttggggacggggtggacatgcggagaggattctgacggcggagcggcaggatttcctggtggactgggcgtggagctgaatggaagacggggcacaaaggaccacagggtttttggccaaagctgcaggaaagaggaaactgacatcagctgagacggggaagatggggagggggcagggaggagccacagttctgctttggatacacaagttgtagatggccttcagatatccaaggggaggcgtccaggaggtagttgggtttccaagtctggggttggaggggcaggtccaggctgcctgagggtaggggtagcatttaaggccatgcggtggggggagtggttcacggtggccctcaggaggaaggaaggaaaaacagccgtctctggcctctggcctctccaggctctccaccctgggggcagaatcaattctgtagccctctagcaccggcagtggctccgcagtcagctgggcagtggccgtgactgggtcactctaccctaggaagtgagtgcagggtaagaggacgggctgatccccacttggggccctccagtgtttagagtcagggatgatgggggtggggtgggaggagggggtagggaaggcagacagaagaagaagaaaaccagggaggcgtggtgtctggagtccagtgaagaaagtggtttgggaagcagactccataataagcatgtaatgttcatcacgccctgggtccttgagtcaatgccattaggcagaggctgtcattattcctgatttacagatacgaaatgcaggctcagagaggtgaagggacttgcctaggggtgcacagctggaaagtggaggagccaggc

SEQ ID NO: 17243 - DNA, 882 bp, Artificial sequence
  DNA replication origin
atgggaaggctgaggcctttcttaaccagagaacctggacccagcctaacaaaattaatgatgacagcgatcaacaattaaaattggctctttactattcatgcatccctttaagcaatatttctttctttcaacctcttcttcttgggttcaagtgattctcctgcctcagcgtcccaagtagccaggattacaggcgttcactgccacgcccggctaatttttctttaagcaatatttcttgagctcctgcaggcactgtgttggggactgggtctcagtggtgatttagacaaagtcaacactttcataagggcatcagataattaagtcaataaataaatatgaagtggccatttcaggcagaaattgcaaaaattgaaaataaagtagggttgggaacacagagtgaaggaatgagggactattcaaggtggggaggtcagggaaggcttctccgaagaggtgacattaagcaaagccctgaataaagagggaggagggacaagcttcatgaagcccttggggaagagcattccaggcagagggaacagcaagtgcgaaggccctgtggccggaacaagttgccaaggagggtggggcagaggcagaataagggacatgaggtgcaagggagacagcctggagggtcggcagggtggctgtcgggtaccagcaggccacacagggccttgtgggttggagaacagatgagccaatttatgcctgtttttctggcataatcatggtaccgtctttactctcacaaaggaagaaaagttctggtttggatgataaattgcatggccatggagaggagtttagattttgttcttctagagatgggagccgctgaagggctgaggatggttcgtttgccat

SEQ ID NO: 17244 - DNA, 920 bp, Artificial sequence
  DNA replication origin
ggtcgaggctatggtggccatgatctcaccactgcatcccagcctagatgacagagtgagactctgtctcaaaaaaaaagaactgaagggccaggcatggtggctcacgcctgtaatcccagcactttttgggaggctgaggcaggcagatcacctgaggtcaggagttcaagaccagcctggccaacatggcgaaaccccatctctgctaaaaatacaaaaaattagcccggcgtggtggtggtcacctgtaatcccagctacttgggaggctgaggcaggagaatcgcttggacacgggaggcggaggttgcagtcagccaagatcgcaccactgtactccagcctgggcgatggagcgagactccatctcaacagcaacaacaacaacaacaacaacaaagagcaggagggagggaacccgggggatatctgccggaaaaatattccaggcagcaggaatagaaagtgcaaagaccctgaggtggggtgggggagatggagcagcgcaggtgagggggagtgtggtgggccatggggtcagtgtgcaaggctgtttccaggaccttggctcttactgtgagtgaagctggggggccacgcaagtgggttggagcagaggaaagctgtgatctggccttcctttgaacaggactgctgtggctgctgtgcggggagaataggtctcagggacacagatggaggcagggaagccagtgggaggtggtggtgatagtccaggcaagtgatggcagcggattgtaactggacatggtgattgtgtcttggacatgtcagagtgttgtagcgccaccccatggtgaggccatggggtgaaagagtggccccagagcctcagcttccctgagctggtcctctgccctgagcacccctataggctctggccaccctagtcaggc

SEQ ID NO: 17245 - DNA, 1192 bp, Artificial sequence
  DNA replication origin
gttgcccaggctggtctcgatctcctgggctcaagcgatcctcctgtttcccgccttgtttctgtttctctttgtccatcactgtctctctgcagacgtctctgcttctgggcatcccgtggctttctggctgtcactctggcccagcatctctgtctctctgactgacttcgttctccatctctgtgcttctctttatccgtctctttgtctccccaccgcgtctctcgatctctgcagtccactgtgtctctggctgtctctgaccttgcggccgggcaggggaggcattcgcacactccatcccctgcccgcaggcctgggctcacatgggatctcaggtggggagttactggggcagcagagggatgggggcgtcatgggatcccaggtggggagttactggggcagcagggggatgggggcatcatgggatcccaggtggggagttactggggcggcagggggatgggggcatcatgggatcccaggtggggagttactggggcggcagggggatgggggtgtcatgggatgctgtctcacattcccaacagcagtgaggctgggacccaatacttgggtggggaaagagcacagaggtactagaatcaggctccacggtgaggggccacacttgcccactgctctgttttcctgtgtctgtccttcccagtcccagcaaactttttctgtctcctgattcctttgatctgaccccaccagggtgggggacatgtggcgtaaagggcagtgattgtgactgcatttcccagatggcaatgctgaggcgattatgactgcatttcccagatggcaacgctgaggcccagagacttgcttgaggtcacacgggctattgagcagggcccaatcccagaccctggactctgggcctcagtttccctcccagcccccactatctcctccaaacgtctggtgcccaggaggcaaaaccagtggtgctgagaaagaaggcagttgggggtcctccctctggccactgattcaatttccacccccaccgcatgcagcagagcggccacatttgccgacacgtttctcaggagaccaaggcaataaccaaatagggccggcagggctgggaagcaaacccctgagcactgacccagctgtgctgagccctgggcctgtgtccaggctcagccatggccttgctgtgtgaccctgg

SEQ ID NO: 17246 - DNA, 856 bp, Artificial sequence
  DNA replication origin
cctgctcaatagcccgtgtgacctcaagcaagtctctgggcctcagcgttgccatctgggaaatgcagtcataatcgcctcagcattgccatctgggaaatgcagtcacaatcactgccctttacgccacatgtcccccaccctggtggggtcagatcaaaggaatcaggagacagaaaaagtttgctgggactgggaaggacagacacaggaaaacagagcagtgggcaagtgtggcccctcaccgtggagcctgattctagtacctctgtgctctttccccacccaagtattgggtcccagcctcactgctgttgggaatgtgagacagcatcccatgacacccccatccccctgccgccccagtaactccccacctgggatcccatgatgcccccatccccctgccgccccagtaactccccacctgggatcccatgatgcccccatccccctgctgccccagtaactccccacctgggatcccatgacgcccccatccctctgctgccccagtaactccccacctgagatcccatgtgagcccaggcctgcgggcaggggatggagtgtgcgaatgcctcccctgcccggccgcaaggtcagagacagccagagacacagtggactgcagagatcgagagacgcggtggggagacaaagagacggataaagagaagcacagagatggagaacgaagtcagtcagagagacagagatgctgggccagagtgacagccagaaagccacgggatgcccagaagcagagacgtctgcagagagacagtgatggacaaagagaaacagaaacaaggcgggaaacaggaggatcgcttgagcccaggagatcgagacc

SEQ ID NO: 17247 - DNA, 1324 bp, Artificial sequence
  DNA replication origin
ttatcctccccacctccaatttagggaacagcctcctgcttctaatagtgtaagccatgaagccgaccctacgtcactaactgcctaaacccctctcttgcttcacgttactctcaggagagggctccttcctcctcagcctgaccttccagcccctccctggtagtgcccttccccagaacaagacctcttgtgacatcaaggtcaccaaagccattcctgcctcctcctaggaggctttgaggctaagcagtgtggggtgagagctgggagccaccccgagggcttttttttgagacggaatctctctctgtcaccaggctggagtgcagtggcaagacctcggctcactgcaacctccacctcctgggttcaagcaattctcctgcctcagcctcccaagtagctgggactacaggcgcccaataccacgcctggctaatttttgtctttttagtagagacggggtttcaacatattggccaggctggctccaactcctgaccttgtgatccgcctgccttggtctcccaaagtgctgggattacaggcgtgagccaccgcgcccactccaatggcttcttgcaggaagagagggtaacgagagtctgggggagtgtaggatcaggggagcaccgccctgaacgcagaaaggcttggggagacagtagagagatttgcatggccacagcttgaggggtggggtgtgaactggaaagagcctccaatgtcacattcaggttcttcggggacagagaggccagactggggggctaggtctcaggatccacccgcagagggctggagaggagggggcagattgaagcggggcagaggaggcagaaaagacggctttgctggaggctgtccttgggcagagctggagggggaatctgggggccgctggagccaggaagatgcgagggaagggatgggcgcgatgggggagggagatggggggggtgaacggtgagctcgcgcctgcataaggacagcaggcctccccactgctatcctcctggcccaacagcgaatagcgtgagtcaagagaatcccctcactcagacacccaggttcgggtcccaactttgtcgccgtgtgaccttgggcaaatgacctcacctctgagcctcaacgtcttcttctgcaaaatgggttagtgatcctgactatggggctgttgattcaggattcggcgggaacgcccagcacttcctgagtacacaagagtgctgagaaaatggtagctgttttttgcgattactgactcggggcccgaccagctctggcacgactcagcggaggtgggagtcctgcgggtccc

SEQ ID NO: 17248 - DNA, 756 bp, Artificial sequence
  DNA replication origin
tcgccccctcgcccggccgccccgggcccgggtccggccagggagctcccaggccgcggctcgggggctgaccccccgcccgccgccccgcgcagcccggcggaggcggcgccgtcggaggaggaggagcagggcactgcggctggccccggatcgggcgccagagcggcagcagcttcggcagcagcggcggcccgggcccatgcagcgggacgcgccaccccgagccccagctccggcgccccggctccccgcgcccccgatcggggccgccgctagtagtggcggcggcggaggcgggggcagcggcggcggcggcggaggcgcctctgcagctccggctccccctggcctctcgggaactacaagtcccagggggcctggcggtgggcggcgggcggaagaggcggggtcggcgccgcgaggccggaagtggccgtggaggcggaagtggcgcggccgcggaggggcctggagtgcggcggcggcgggacccggagcaggagcggcggcagcagcgactgggggcggcggcggcgcgttggaggcggccatggcaaagcagtacgactcggtggagtgccctttttgtgatgaagtttccaaatacgagaagctcgccaagatcggccaaggcaccttcgggtaaggctgggcccctcggggccgggagccctgggcctgcacccctagggccgacgtcgggatgcccgggccccccccgagttggtagagaagtcgtctgtccccgggctt

SEQ ID NO: 17249 - DNA, 1583 bp, Artificial sequence
  DNA replication origin
gctccggctccccctggcctctcgggaactacaagtcccagggggcctggcggtgggcggcgggcggaagaggcggggtcggcgccgcgaggccggaagtggccgtggaggcggaagtggcgcggccgcggaggggcctggagtgcggcggcggcgggacccggagcaggagcggcggcagcagcgactgggggcggcggcggcgcgttggaggcggccatggcaaagcagtacgactcggtggagtgccctttttgtgatgaagtttccaaatacgagaagctcgccaagatcggccaaggcaccttcgggtaaggctgggcccctcggggccgggagccctgggcctgcacccctagggccgacgtcgggatgcccgggccccccccgagttggtagagaagtcgtctgtccccgggcttgcctgctggtctctaggccgcgccgcaccccgccccggcctgacggagccggctggtggggaggagcctgaggcccgtggtgggggcggggaggggctgcagagaggcgcccgtgaggggagcgggatctctccaagggacgcccaagtgaggagaagggactgagggaaggaagcagaggctccgaacgagacaggctgccgggtggcggggtagccgcgtgccctgggtacctagcccagccccgcccgggaatctctttgctgctgcccctcctcctgtagtgggggaggggcgggccctgcggaaatggcctgatgagttctcgggtctccctttccgcctgcagggaggtgttcaaggccaggcaccgcaagaccggccagaaggtggctctgaagaaggtgctgatggaaaacgagaaggagggggtgagtacggatcgggcgtgcgggccggccggctaactgcccgggaccccgggtcggttttccaccctgctgcttctgggagtctcaggttgagatttaatttttttgtagtagttcagaaatttccagggaatgtggcttccaccctaaaactaaatgtttcattcttaggcagttatgggtgaggccaggagggggagttgatgcatgcatcgtgtgcactttatttcacgaagttaggaagcctttaaacacctttttttagtgttaaatttcgcttaatgtaaaagaaagattatatatgcatgctttttgaaaggtgtctgatactcaattatttaatgtatttaaaaggagcggtcccttctccaccccatcttagctctagtacaacttcccataaaccttcttttgcgtaatgtgcattagcaaggacatttttaaatcatcatgtttgttgccaacgaaacagccatagagctgaaatttgaagactgaaaccgccgagcgtttagtggctaatagcaaagtattgctgtttcagtttgttgtctcaaaccatcatcttgaagtgtgcatgctactaatatccattttatagacaaggcttctgagacagctggtttcagagcccatgatcttgctctgtctcccaacttggctgtcagtacagaccccagggctgggctctgtactgcgctcactcttgaccactttcccctctttctca

SEQ ID NO: 17250 - DNA, 1265 bp, Artificial sequence
  DNA replication origin
ggggcggggacgctatagtctccgaattcccagccccggcggcccgggcccaacttcctggtccctgtccccacccccagcctccaggatgttccgccccccgagtcccccagtccagggctcccgataccctctcggctagcggagcccggatgttctgcggctcagcgcaggcccacgtgtcgtcgcgcccaggcccgctggcccgctggcccgcctgatacctggtactccatgctcggctcctgcggcaccggccacgcgctcaagccccgccgcgccgcgacctgggtcgttatgccgcgcgcagacgccgctgccaggaatagagcggcgcgcaggtggctccgcgcccgcgacatagtcccggcgcccccggcagcgctctaggcccgggcgggagacgccccgccccgcccccagccaatcagcgcagcgtcgcctcaccccgccccccccgccaatcagcaccgccccgccccgcccgccatcaatcagcaccgccccaaactaccaccgaccagcccccttgcgccactaaaaagccgccccttccgcgtgcaccatcctggtgaggggcaggcctcgggaccaggtttatgagtgtacgctccggggcgtcccctcccttagcgggcacgcactcctttcgtcaccaacctcccaaggccccccgcagcacgtcccaaaatagccggtccgggtcagcagccctcagtctctgccccgaacagggataggatgacaaagctgcggacacctggtggacacctctaaacagctgctgccgtttagagaacggatttgagggccacctggggatggtggggcagtaatccttttctgtgaggaggacacctatttgtcgtcctggagttttcagagctttttcccatctattagcttcttggccccaactgctagcatgaaaaagttgcatggtgaaatccttttgacagctgaggcccagaactggggaggaggaagctgcaaacaacccactacggaaaatcagtctgataaaaggcagcccttcaaatgattgatggagtttccgtacctccttcccctctccctcttcccagcattgggagaaaatatttatgagaaattgtttgatttcgaaataagcaagtgatgttttgggaagagtctgtcattggctggacttctgctcttcacacactgctggggtgccccgaccctggccccatggcagatagagaagttctttcttggtttccttatttttagtcattgaaact

SEQ ID NO: 17251 - DNA, 2283 bp, Artificial sequence
  DNA replication origin
agggaggggacgccccggagcgtacactcataaacctggtcccgaggcctgcccctcaccaggatggtgcacgcggaaggggcggctttttagtggcgcaagggggctggtcggtggtagtttggggcggtgctgattgatggcgggcggggcggggcggtgctgattggcggggggggcggggtgaggcgacgctgcgctgattggctgggggcggggcggggcgtctcccgcccgggcctagagcgctgccgggggcgccgggactatgtcgcgggcgcggagccacctgcgcgccgctctattcctggcagcggcgtctgcgcgcggcataacgacccaggtcgcggcgcggcggggcttgagcgcgtggccggtgccgcaggagccgagcatggagtaccaggtatcaggcgggccagcgggccagcgggcctgggcgcgacgacacgtgggcctgcgctgagccgcagaacatccgggctccgctagccgagagggtatcgggagccctggactgggggactcggggggcggaacatcctggaggctgggggtggggacagggaccaggaagttgggcccgggccgccggggctgggaattcggagactatagcgtccccgccccgggttgggaagtgggaagtggcacaggagctaggatccagaagcccagaggctcagcggtgcttctggagttccagtgatcccggagtctgaaccggcagtgagagtggggaaagagggtagggaagagactcaggaattcaggcttgaaagatccaggagtattgatctgggggtgggctgtccaggattcagaagattggggatccaagtgcctggatttgggggagaggcaggaatcaggggtagtggagggccccagaacctggaaaatagaaaatgtccgcgggcgctgtgtcaagagccggttgccctagaccagaccctgatgccagtgaggcgggtggcactggtttgatgagggtggagcctccaaccagccttgaggtcctgagggtgggaggcacggaatatgaggcctaaggggaatgaaatagcacccccactcccacttccattgtgaaccctcctgaagccgtacctacctgccttcctggctgagtgacccctggcacacccctcctccctctgagttgctcctctgtgggttggaatgtggaaccccagagtcatgagggttggggtggagcttcggggaactccagaattcgaataccccagccttctgtagttctggccccgctctggcagggagcaatatagcaatggaccccattggagagaatgagggcaaaggcccaggagtgaagtcgggggagcctgggcaggaagcaaggctagcccgttagtcatgccaccttctttgtgtagcactccctgggtggggctgaactgccccagactcccatttttgccagagctggaaagatgccatactctctgttgcttaacctacaggctaggctaacagtgctggcatggcaggcgggcctggtactggccttgttgccctggcttggccactggtctgctggctgtctctgtgcctgtggaccctgagtgagccttaacctactatctgggcactgtggttgccaggatgccgtgcgcatgctcaataccctgcagaccaatgccggctacctggagcaggtgaagcgccagcggggtgaccctcagacacagttggaagccatggaactgtacctggcacggagtgggctgcaggtaaggtagagagggcctgtgaccacctcccacccccatttgtgattcccgtagctgaggcagggaccttgtctgtctgtcccaggtggaggacttggaccggctgaacatcatccacgtcactgggacgaaggggaaggtgaggggcaggaccctggggtagggggtctattaagtggctggtggagtagagcctgcccagacaatcccttttctttcaagggctccacctgtgccttcacggaatgtatcctccgaagctatggcctgaagacgggattctttaggtactggcttgtggggggatgtggtgtctgtgtcccaatggaccctggggggctatggaaccagccagtgcttcaggaccagggtcacccccaggaggtcagctgcatgtctctctgcccagtgtttattcattcaataaacattcagttagcacttaccatattggcccatgtttatggcaacctttaattttttttttttttttgagactgagtctcactctatcgcccaggctgga

SEQ ID NO: 17252 - DNA, 2078 bp, Artificial sequence
  DNA replication origin
cggtggctcatgcctgtaatcccagcactttgggaggctgaggtgggtggatcaccagaggtcaggagttcaagaccagcctggctaacatggcgtaaccctgtctctactaaaaatacaagaatcagcgaggcgtggtggtgtgtgcctgtagtcccagctacttgggaggccgaggcatgagaaacgcttgaacctgggaggcagaggttgcagtgagccaagattgcaccactgcactccagcctaggcgacagaacaagaccctgtctcaaaaataaataaataaaaactacaatcatttttgggataaaaacctagccttcaacttgggcccacatggccttgagggccagcccagggctgcagcttgaacattggttgtgggctttgtctctgagagctgtaagacagatgacattgtgggacagatgtcagcagagtgactgattggtatgggactgttggagcccatagaatgtgcaagaccagcctgggtgaggaggctgtcttagttgagaccaacgtggtgaatagggtgagccaggtgcagaggcctggagatagaagatggggaggactggggggctacagatagtccggggggatggggcaccaggaacaaaccgagggacacaggagagatgaggcacggaggccagtagcatcagtccctgcagggtgggggaaggccaggacgctcgggaagggagtcctgatgaccccagctgtcccggcagctctccccacctggtgcaggttcgggagcggatccgcatcaatgggcagcccatcagtcctgagctcttcaccaagtacttctggcgcctctaccaccggctggaggagaccaaggtgccgcatgcaggagggctggcgggtgggtatggttgggggtgctacgtgttccagcaccccatctccccagagaaggggctgcatgggctctgggccctgacatgtccctgtgccacaggatggcagctgtgtctccatgcccccctacttccgcttcctgacactcatggccttccacgtcttcctccaagagaaggtgtgtgccctctccctagaaccctgcatctgaggccttgggaacgggaacctcagcaggcctgggggctccctgcttccatgcggcctctgggcaccctcatatcccctgccatgccctctggtctttgacaggtggacctggcagtggtggaggtgggcattggcggggcttatgactgcaccaacatcatcaggtgagcgcagttgcttgggacgaggggtggcagccaggagcacagcctcacctgccgcctggtggctcagggcagggcctcatggccttttcctcccctgcaggaagcctgtggtgtgcggagtctcctctcttggcatcgaccacaccagcctcctgggggatacggtggagaagatcgcatggcagaaagggggcatctttaaggtgaccaggcagactgggggaagggagagacatggaaggcctgggagtctacgttttcatcctggcttcactgtgtgactggaacaagttgagtctcctctccagactatttccccattgaaacgtgagggatggctgggcatggtggcttatatgcttgcaatcccagcatttcaggaggtcgaggtgagaggatcacctgagatccggagtttgagaccagcctgaccaatatggggaaactctgtctctactaaaaatacaaaaattagccaggtgtggtggtgtacgcctgtagttccagctacttgggagactgaggcaggagaatcactcgaacccgggaggcagacgttgcagtgagccgagattgcgccacagcactccagcctgggtgacagagtgagacttcatctcgaaaaagaaaagaaaagaaacatgagggatgagagacagtggtagcccagacccagggatgtgggggccagagataggagtgtggaggatgctaggtagccctttctctctccttcttccctccacagcaaggtgtccctgccttcactgtgctccaacctgaaggtcccctggcagtgctgagggaccgagcccagcagatctc

SEQ ID NO: 17253 - DNA, 1460 bp, Artificial sequence
  DNA replication origin
tcacatctaatcctcaatacaactcaagggggaggggattggcaccccccagggtcacaccgccagacccagggcttcaggactgcctgccgcccacccccaagttggcccctcacctgcagcagcttcagcagggccgccgggtcccggtccccggtagcattgaagagcaagactcgaacctcggggccactgcgacagaggtgaggagctgggtcaaagggcgccgcccgttctccctgcggtaccaatcccgtccccgcccacgaccccgcccctccccatgggcccgcccccgcccttccccacgaccccgccccgcccttccccaagatcccgcccctcctcgtgggccagccccggccccacccccagccctgcccctcacccgctcggcctctcgcggccctgcagcgcctggcggaaccagcgcacgcaggcctgcgcgctgctggcggtgtgcgcaccgtccaggtaccaggtgaggggcccgcgccgcagcacctgcgtccggcccggccactccgtgttccgaagccctgggggagggcagcaaggcagtcctccaggccctctcccacccccgtcctcaattccgcacacacactcctgagcccgttctcccctgcaggctgcgcccgccctcaacactcaggaccccggcagcccaggaactttttactagcaccagtcaatggcttgggcttttcggctgtctcatctggtggaatctttcaggcaaccctgaaagggcctgctattcccgtttgacagcctgagagcccttagctggggccgggatgtgatgcgaggtcggtttgtctccaggaccttgtcacttgcccttgataacaggcgtggcacacagcgggcccaccatttgctgaaggggcttaacagcatgagcacctgctgggtgctgaaagctttgggggaggcaagaagcagatgactggatcaccatcctccagaacctcagggtctgatgatgatgatagtgacagtgacagcagctaccactggctggcactttatcccacattggccaggctctgcactcagcaccttagtgatgtcacctcagcgaatccccaccacagcccgtggcagtggctcctatcatcatctactttggcagatgagaagacaggctcagaaagagttcatgagctcaaggtcagggaggtttgctgacatcagagtcctttctcttaagcaccacttcaaattgtctcttatctcccaaacagaaaaccaaaaaaaaaaaaaaaaaaaatctgaaggggcacagacacacgcagtggtcccagctgggcaggaaggtctaactcaccgagccgcatgtgggatgtgggctggaacacaggtgccaggggcagctgccacaggagccctggcctggatgcctttggctccccagcacctgcggggtgtgtgagaccaagtgtgtccgggaccct

SEQ ID NO: 17254 - DNA, 1242 bp, Artificial sequence
  DNA replication origin
aatagcaggccctttcagggttgcctgaaagattccaccagatgagacagccgaaaagcccaagccattgactggtgctagtaaaaagttcctgggctgccggggtcctgagtgttgagggcgggcgcagcctgcaggggagaacgggctcaggagtgtgtgtgcggaattgaggacgggggtgggagagggcctggaggactgccttgctgccctcccccagggcttcggaacacggagtggccgggccggacgcaggtgctgcggcgcgggcccctcacctggtacctggacggtgcgcacaccgccagcagcgcgcaggcctgcgtgcgctggttccgccaggcgctgcagggccgcgagaggccgagcgggtgaggggcagggctgggggtggggccggggctggcccacgaggaggggcgggatcttggggaagggcggggcggggtcgtggggaagggcgggggcgggcccatggggaggggcggggtcgtgggcggggacgggattggtaccgcagggagaacgggcggcgccctttgacccagctcctcacctctgtcgcagtggccccgaggttcgagtcttgctcttcaatgctaccggggaccgggacccggcggccctgctgaagctgctgcaggtgaggggccaacttgggggtgggcggcaggcagtcctgaagccctgggtctggcggtgtgaccctggggggtgccaatcccctcccccttgagttgtattgaggattagatgtgacaaggtgcctgtgctggttctgccaggtgctgcagggccgtggggaggccagtcataggtcattactcatattcccgcgtgtctagactcaagtccaggcttaagaggagggccagatcgtggctaaaggtgtagactctggactcgcttgtcatgcccctttaggcactagcatatcaccctggacgagaagcggcatttccccgagcctcagtttgcctctccgtaaaatggggttgctgctaggggcacccgcttctcaggtttggttgaaggagtcattgggcctttctctgcttggggaaactgaggctgcccaagctgtcagggctgaagtggcccctaggtatcatctcccatttcacagaccaggaggctgaggctgtatccagaacctctcccatttacccacagcctttttccagcctggatttggggccccctcactatctgagtgaccttcagcaagtccccttgccc

SEQ ID NO: 17255 - DNA, 1055 bp, Artificial sequence
  DNA replication origin
caacagcgtggcaagtggtctgtctcctgggcagccatatcccagacccactgggttgaaggttctgtggggtggagggaccccaaggtgttccaagccagtggctgcactggcagcaggcctctgagagggaggcgggaagggtaggcgcggagagcaggctccattctgggtcgagtggaggactggctcccagggtgagttcacaccagtgctcccagctggcggctgctcagtctctcctgctgggcgagcgcggggggccggggctatgccatgctgctggtggagcagggggtgctctgggtgctcccgatgctgtggttggtgctgctgctctccgaggaggccggggcagccaccgccaccacgggctcccgcttgctgggggaacctgggagcgggagcgggggcaggggcggaggtcagggtcctggccagggcccctcaatccctcagaggcttcactgggctcccccgggtggatggaggggcccggcatgctcactgtgggggcctggggtactcacgcgtgtgcgagtagatgtaccagagtgcagcagtgagcagggccccgatgaggaaggcaccaaaggtgatgcccagcacggcgggcaggacgaggcctttgcttgtgcaacctagagagggccgacgccatcagcactgccactctgcccctgccccatcccctaccctgttgtgctggcccatgtgggctttggtgccagctctgctcagccatggaccctcgacttctctgaacctcagtctcctcttgcagcaaacgggctcatcacagccaggcctggcattgagccatggttgctaggactgtccacctagagggcccagccaggccttttgggtcatgcctctgcccctcaaggctgatggagatggcgttttcagggaggatggatggggtaacgtgaggaaactgaggctcgggagtacagagcctgccccacctgctgcatgaccttgggtcaaccctgcccctctctgaggcctttagcaggtagagaatgggccagagcagctccgagtgccct

SEQ ID NO: 17256 - DNA, 1056 bp, Artificial sequence
  DNA replication origin
gttcccttaccgcaacaagctctttctttagtaccagggtcatggcgtcgtcggcacactttgtctggatcaaggacatgagcagctccgggctacaagtgtccttgggaggagtggtctggatcggtgcgggtgaggtctgcagcctaccacctgtggggtagcagaggcaggccaggcggctggtcactgtgtgatcactgtgtgcccgcaccaggcttttttttttttttttttttttttgagacggagttttgctctgttacccgggctggagtgcagtggcacgatcttggctcactgcaacctccatctcccaggttcaagcgattctcaggctcttctatgattagctactcccattgttcccatgtgcagatgagaaaaatgaggctcagagaggctgatgtaccttgcccaagctcacacagaggtgcttcaccaacagtgtggccactgatccaagggaggggaagggaagggaggggcaggggaagggtgctcaccgcagctggaggcatgaagtgagacaatgctggccagcggtagctccacgaaggatgccacaatgctggcattgagcatccgggcctcccccaggaggccttgaggtgtgtctgggagcttgaagccacgaatgtttttctctggaaagatcttgaaggagtattctccagtggtctaatggtggggagagaggcagaacagggggccatggacacagtctgtgccacagcaggccagccagggttatgccaggcctcggtcctgctgtgtccccactcctgctgcgtcttctgcctggccccttccctcacgtatgggcataggtgatttgtccttcagctcagctcgggggttcacctttccaggaaacttccctgatccagaggttgggagtttgggttttgtgtcccgggagctgcgcacaactcacccagatctgcatgttgtggttggcgtcgatgagccaggacacgtaggggggaccctgcaggatgaggacggcatcgagatccccgggtgcgcagctcagttccaccttcaccgtcaccg

SEQ ID NO: 17257 - DNA, 933 bp, Artificial sequence
  DNA replication origin
ttcctcctcacccccaacccccatttcttctgaggcaatggcagggtaggcagtgagatgctgaagccacccagactccccatccctgtccaaccaggagatctgtctggctcctttgtttcttattaaataaaattctgtcttctattgtttcaaatgacttgatgcatgtctagtttctgaatggtaatatcccctagggcagggaccactgatatctgtctttaattcattaattcattcatccatccctttcttctttcttccctttctccctgtcttcccataggcggggagcacccatcacatgctgggtgtcagggtgacgctggcatgtcaggatcctgtgatgggcccagggcccagcacaaagtcagacaaatctctctcagtgcgtactacgtgtcaagcactgtgcaaggatgggcaaggtagacgttgccccctgtagaccctcacagtgtagggagatccagagcctcagggtatagggagagacagccgcaggatggcgtagatgtgggttgaatgagaacagctctggaggggtgggtgatgtttggacaggtggatgaacaaggtggtgtgttcatctggccccccaggtatgcaagggagaaggggctgatctgactgctagggggctccgggctgactgcagatccaccagccagcattctcagctccggcctctttctctcagccaatgggctgactccacaaattacttcctgacctcctacatgggatagagagggcacagggccaggaacagcgtgctgagcctccacatgtctccccagaattccagcctggtcaccttccaagagcccccgggggtcaacaccacagagctgccatccttccccaagacccagatccttgagtgggcagctgagaggggccccatcacctctgctgctgagctgaatg

SEQ ID NO: 17258 - DNA, 1067 bp, Artificial sequence
  DNA replication origin
tggcagggctgcgggcgggcaccggggccggcgtgggctcgcacggggacccgaggggagcaggcggccggagcgacggcgtccctgctccagccttctggggtggcggccgaggggtcaggagaagtggacacagggacgcggggctgggctggagttgctgtccgaaggatgggcggggagggggtgctgggctccaatggatggcagtgacagcagcagtcctggccccagggcgcagatgaaggctgtggtatgaccggcagcagggagctcctggctcatccagcccggccggcccagggaggcaggaaatgcgcttccttagagaaggggctgggccaggccgcctgccaaccgggtagaggaagtgccacgggctttgtcactgggtggggggccctgggatggggggaggcagtggggtgggagggcccaggctctaggcttgtctccccaagcaccccaccctcccatcccaccctctccaaggctggtgggtgggacgcatcagggagccccacagatgaaaacaatcaccctaacagcccaccgaggggaactttcagggggccggtcttggctaaagtagttcctgtagaatttgtgacccacctgagctcactgatcccattttgcagatgaggaaacagaaatccgatgtgttgagatcactggttcaagaagatggtagcgctgggatcctgcccacctccaccacttcacgtcttgtcgggcatcaaacccggcctactaagtgcagttgacatggggctgcctaacaggcaggaaaactgaagctcaggctagggagggaagtcccaaagtggcacagcaaggcggctagggctggcgtctctgggctcagaggagctgcccagggccacacacttcacgtctgaccccttcatgggtggaaaatccttcaccgacaaaacacagctccaggccgagtgtagtggctcaagcctataatcccagcactttgagaggccgaggcagacggatcacttgaggtcaggagttcgagaccagcctgaccaacatggtgaaaacccatctctact

SEQ ID NO: 17259 - DNA, 1762 bp, Artificial sequence
  DNA replication origin
gagggggcttagattaccaggaggggggcggggcagggcggggtcgaggccacttctcagggcttcactgtggttgtccctggcccaggacgctccccctcccatgggcagctgctgaggggcacttggcagctcctacccccgctgaagcacactcagcaggaaaagtggctgccactcctgcctggggcagcaggggcatcagcaaagccacttcagctgctactgggtgccaggcccagcgtagcagaaactcagggccgagttggaccctagctggccctcgaaccagtctgtcctcctccccatgcctcagtttcctcccaagatggcagtgaggatggaacgaggctccccagccctgtgctcagcccatgccaggcccagtcaatgggatcccaggcccgcagcacagaagaggggcccagtacagcgtggttgtgcagtgcagggcaggtttccaggaggcacctgccagtgtgggagtggagggcagagtccaggaaggcttcctgaaggaggtggcacctgagctgagtcccacacaatagcaaggtggggaaaggcatccaggcattgggtacaacatctgccagtggcagctgatagggttgcagagggcagcagaggtcagctcaccgggacctatccactatgtcaaggggcccaggctttgtctgggagccgagagggccacacatgcaaggttgtaagcgggtgtgtgatgtggtctgatacttgccagagaaaatcctgcaaattgcgtggcagggtgtggaggcttcaaggcccatgtggaggcgggggcagtggcccaggccccttacttagcacaggacatagtggtgaggagacagacggagagagcctggggaggggagggttgggcagtgggtgtgcagggctgtggagaggagagaggagccttcacactgactcagcctgtggcttggccataggggcctggagctgggacttggggagggctgttcagagcctgagaagcctgtggggcttctggggcctgtctcgggggcatggatgtctggggctggagagaaaggcctgggctgcctgcacagggatgggggtccttggagcctgaagccaagtagagagggtggtgtgggtgccttgggtggaggtcccggtgcgggtggggtcgctggctggaggtcaaggctggaggggagtgtggctgtggtggttgcgagtggccttggggagggctggtggctgggagtgaagaagtggaggccaaaggtgtccagagggcagttctgagataggggggcgaggtaggggaggtcctgggggctgtggcagcacagggtggggtcgcaggtgtgattgggctcatgggcaggctgagggcaaggtgggggcagtaaagccaggtcctcaaagggtgggggtgcaggggacatgcgtggggctggttgttgggcctgtagaggtgaagagcctgggaccgcctcactttgacaactgtaaagggctgtgttcatgcgagcggctcctgtagattccttcaccccaggcctctgtcccttagaggatccccatccaaacctcatcccagacacacatagttcctggccacctcccacctcctggcagcttccctctggccctggggagcgttgtcaaggtgtctgggcagacgctggccctgcgccctgttttctgggagtttcgaggggagcagctctgcagttgtgtggccgctgtttatgtccctcggtgccatcctcactgtccc

SEQ ID NO: 17260 - DNA, 647 bp, Artificial sequence
  DNA replication origin
ctatcatagggaaagcctggccttgtaccctggagtgtaccttgagcacagtcggggtatcgcaatggaaaactcttggcaaactgtaaagtgtagttcgcgtgtgtgggcacagccacctgggggtccacggtgcggggcacacggtgccgggtgcggtgtcgccgcgcacccgggctcgggctcggtcccgccccgcttcccggtccctggtccgctctccctccctccttcccgccctccctgccttcgggaacgccggctcccggcatgccgcgcgctgacagccttataaatagtcgcctttgccggccgccgcgaggacgggcagggcacgcactggccccggcgcccacccgcacccctccccaggtcagtgcgtgcccgcgcgtgtctgggggggcgcctctgcggggaggggcagcggcaccgggggagggcgggggcgtgctggtgcggggctccctgggggctgtgcggctgtgtatccgtggttgtgatccgtgtgtgtttgcgtggctgtgttccccgggcgctggggatctgtgcctcgctgcctgtgcctttgtggatccgtgcgtgtgtgtgcgtgtgtgtttgtgtgtgttgcagccccttccagcctccgagatagtcacccctttgtt

SEQ ID NO: 17261 - DNA, 1581 bp, Artificial sequence
  DNA replication origin
aggggctgcaacacacacaaacacacacgcacacacacgcacggatccacaaaggcacaggcagcgaggcacagatccccagcgcccggggaacacagccacgcaaacacacacggatcacaaccacggatacacagccgcacagcccccagggagccccgcaccagcacgcccccgccctcccccggtgccgctgcccctccccgcagaggcgcccccccagacacgcgcgggcacgcactgacctggggaggggtgcgggtgggcgccggggccagtgcgtgccctgcccgtcctcgcggcggccggcaaaggcgactatttataaggctgtcagcgcgcggcatgccgggagccggcgttcccgaaggcagggagggcgggaaggagggagggagagcggaccagggaccgggaagcggggcgggaccgagcccgagcccgggtgcgcggcgacaccgcacccggcaccgtgtgccccgcaccgtggacccccaggtggctgtgcccacacacgcgaactacactttacagtttgccaagagttttccattgcgataccccgactgtgctcaaggtacactccagggtacaaggccaggctttccctatgatagctggagaaactgaggctcagagaagagcggctctttccgcaaaatcccacagcgcattggtgccagagagaggccagaccagggagcgagagggctgaggcatcgactcaggggctttgctggccacagtccccaagcccgccctcagagcctgcccagaggccctggccgagacccacctgggactcctcttcccctgttgggagggacccttcgagctcctctgggactggaacccgccaggaccccaaagaccacccagtaaggtagaagattatagaaaaccagccctgctcccctggagttgcccgggacattcagaaggctgtggatagccagagaggggatttgcggtcttgataagaagaatagctcccataatgagcactcactgtgctaagcagcagactccagccgcatctgtgaatccttagacacagcagagaacgggaggcgagcatgtcaaataccttgcgggaggttccctggtagaaagccacgtgtttatccagcgttttgcagggagactggcacatagtagtaggtgctcagtgatgtagccgggcagggatgggagcccaggcagcagccccagatggtgaggtgggttgaacttggaatttgtattataggccctagggagccataggaggtatttgagcaagagagtgagactaccaggagattgagaccaccttcagtggtggtgcctcagcaaccacagcagccaggagaccaggaggcctgggtctctgctacctgtgatgtcagataagtccttacttcttgggaccttagtttccccatctgtgggggggcaggtgcagtggggtcagaggtgttgcattagaagctgtttgaaaggccctctcaagggtgtgtgcattggcacctttggggaaagcaattgacaaagtaaatcaaaatttcaaatggaccgggcataatggtcactcctgttaac

SEQ ID NO: 17262 - DNA, 1356 bp, Artificial sequence
  DNA replication origin
ctcagagaggtcacatggcttgctcgaggccccccagccagtaagtggtgaaaccgggattcgcactggcagctgacatgctgtactgaccatggccttctcagagcaggattgtgacggggcggaccagggggacggtggtcctggctgagggcacagctcgggcaaaggtgggaaagtgggcggcgggcagggggcatccgcaggaaagggtggccacgcgtagtaagatataggcggctggacccctgggcgccttgaatgccaaggtctcagggcagatggggccaccccaggattctggactcctgtcttttgctctaacggtctgtgagggcaagaacaagccgctccctgcttctgatgaggccccgttttctgctctgtaccgcagggcctggactagataggagtctgggcctccctgactggcagtgaggggcagccgctggagaaacccgaagccgagctccggatgaggggcgctcccacggggagggggcggggttggagagggggcggggccatgatctaaccaatcaggagcgaggtgtgtgtgccaagcctcctctggcccgaggttctctggctattcctggtggccgtgtaggagtaaacagcggctaggtcaaagggctcagagaatacaggaactgagaggcccctggagcaggggacggagctgaggagggccccctaagccccagtttcttccctctgcactcctgcccgccctgcccccggcctgtctgctggaggtaggctggacacagtacattttccctttcacaggtggggaaccctggaaaggagctgggttttggttgtgggagaggaagagattggggtgtgcggagcagagctgggccggcctcctcactgccaggtcttccaaaggcccccccagccaccccctgagactgtgattacagccatttgacagatgaggagtcagccctggcagagactgtcgagcctggactagaaccgagcctctcagacttgagtctgtgcccttagcccccgagagatcctgcttgttaatgcactaattcattcagcgatattcctgaatctccgtggctgtggaggcacagggaaactgagtgaggacctgggtgggctgtatcccgcaggcagctcttagcctggggggatgggaggacgtaggggagttcctggtccatgccaggcttggaggatgagtgggagtcaggaggccataggagggagggcgttccaggccaacctgagagagagccagagcagaggagttcgggggcctacaagcggtgttgttttattctgacaccacagggacccaaggcagggtttagagcagggtgtgaatggggc

SEQ ID NO: 17263 - DNA, 1149 bp, Artificial sequence
  DNA replication origin
cacaccccaatctcttcctctcccacaaccaaaacccagctcctttccagggttccccacctgtgaaagggaaaatgtactgtgtccagcctacctccagcagacaggccgggggcagggcgggcaggagtgcagagggaagaaactggggcttagggggccctcctcagctccgtcccctgctccaggggcctctcagttcctgtattctctgagccctttgacctagccgctgtttactcctacacggccaccaggaatagccagagaacctcgggccagaggaggcttggcacacacacctcgctcctgattggttagatcatggccccgccccctctccaaccccgccccctccccgtgggagcgcccctcatccggagctcggcttcgggtttctccagcggctgcccctcactgccagtcagggaggcccagactcctatctagtccaggccctgcggtacagagcagaaaacggggcctcatcagaagcagggagcggcttgttcttgccctcacagaccgttagagcaaaagacaggagtccagaatcctggggtggccccatctgccctgagaccttggcattcaaggcgcccaggggtccagccgcctatatcttactacgcgtggccaccctttcctgcggatgccccctgcccgccgcccactttcccacctttgcccgagctgtgccctcagccaggaccaccgtccccctggtccgccccgtcacaatcctgctctgagaaggccatggtcagtacagcatgtcagctgccagtgcgaatcccggtttcaccacttactggctggggggcctcgagcaagccatgtgacctctctgagcctcagtttcctcatctgtgaaatgggaacaataagagtcggtaactcaaggggttgttggaaggattcaagcagatgtggcaagggacacgcggggcttgaaagtgctcccacattggccgggcgcggtggctcacgtctgtaatcccagccctttgggaggccgaggtgggcagatcactaggtgaagagatccagaccagcctggccaatatggtgaaaccccgtctctactaaaaatacaaaaattagctgggcgtggtggcgtgcgcctgttgtcccagctactccggaggc

SEQ ID NO: 17264 - DNA, 1498 bp, Artificial sequence
  DNA replication origin
cacccccagctgactcagtggctgtcccctggtgatccggatctgggtcagcaggccaggtggcacaaggagattggagcaaaggtcactcaagaaatggttttaataattgaaaagctggtgcctggaggctaccgcctccagaaaccatgtgccaaaggccattggaaccaggaagctcttctagccatctggcctagacccagcctggggctggtcctgctggcagacttagtgaatgcccctaccaccaccaagcctcccaggaggggaagggcttggtggcagcagaactgtgggctagtcactgggtagtgggccaccctggtcaccacgtgtgtctctctgggctccaggtttctagactcgaggcacaagtccctaggccacccttcagaagccaccaagcagttggctggtgctctccaaaaatcagaagtgggaaagtggcccccaccccctaccccatcaccccacctgccccggcgcatcctgcctgaggcccaccattttctgcccgcaagctacgtcagcttctaaaaataagtcttttctgtgtggccagctgtgcaggggagggagttctgcctggcacctgctcccctgcccatgaggaaccagagaccttgactcaggcagtcgagatgaactgccccccacatccagctctctctctcacagcccggggcttctgcagtaaagacaagagcggctgaactgaacttcacaaccccagttccacgtaggctttgcctggtgagctcgtagcgttacctccgttttacagggatagcaaggtactgacactgcagagtggatgccacctgcctggggccacacggtctgcaagaacagggttggactttgaggccattctgcccttctctgctcagcagtagggaggtcagaagtggcagtgggtcctggggtggagaggctgctgagctgctccgccagtcggggcctctgcgttccctggaagtcctccttcttcccacttaccggagccttcatgctgtcgctgtccctcagtagtctaggggctgctgtctccagggctggggctgggaaggggtgggagccgggcacctgccaagacccagaaactcagagccgggaggggtaaggcaggtggggttctaagctatagggaaaactgaggcaggagagggtacaggccggggtgaaagcacatggcacccgggaatccaaccccttgacgtctccaaacaccggaaggcaatgtccccatcctaaaggagcaggaatcagcgacgtttgcgagacctcctgccaacccaattcccagtgcgcagatggggaggaagaggcagcgaggaggcgcccccagctcaaggtcacccatcaggtctggggcagagagagccagaagcccggaattccaccccatccatcctacctctctacccgggggacgaatggagaggccgggcgagggcaggacgtaggtttttcaccgcccttccagattccactg

SEQ ID NO: 17265 - DNA, 1229 bp, Artificial sequence
  DNA replication origin
gaaggccccctgaagagagaaacagagcggccctaatctgggagggtcagggccggatggtggacagatcggggaggagaggagggcgagggccgaaggcgagagaggcggtgccgagacctgggagcgagatccacgtgcacaggtcggggaagggggccgggtgggagccgctccagccaggcctgggcagtgacctctttctcttgccccccagccacgaccagcgcttcttcctgaagacccaggggcgccgagaggtgcaggctctgctcgcccacctgccccgctacgtgcagcacctgcagcggcacccgcactcgctgctggcgcggttgctgggtacttggctgggggcggggctcggtgggggcgggtcctaggtcatcatatacctggggagggcggggtatgtgggcggggcccaaatgggcggatttggggttgtagggcatgggggtggggccatacgtgggggcggggcaccactggggctgtgtttaggggtgggatcgggtcgggatccggaccagccaaggaagggtccaggtgccgcggatcttgagaaggaggcgtggcctggcgctgggattggcgccggatgcaccccgggttgtggagtttggggatcctcatccggcgccctctccccttccaggagtgcacagtctgcgggtggaccggggaaagaaggtgggtgaagccgaggcgaggtggctgggcggagcgggcggctggagggcgacagccggcctccctcactccctgtcccggcccccagacgtacttcatcgtcatgcagagcgtcttctaccccgccggccgcatctccgagaggtgagtggcctaagcaggtttgggcccccatcccagccgaaactcgcggcccgaagcacccacactcactagccagacggtgaaaccgaggcccaggaaggagaaggggcgttcccaagatctggtgggtcagagacagtgacgcccacacccagcatctctggagcactcagtgtgcgttaggcgccgtgttgggcccttcgcatgctttttaattcccagaaggacgctgaggggcagctcttatcctccttcctagatgagaaaccgaggaaggagaaggccacacagctaacatgtggggagcagggactcagacccagcctctgactgcacgtaaccccctgtgccctccagcgctgactctacccacaggttccccgccccccggc

SEQ ID NO: 17266 - DNA, 979 bp, Artificial sequence
  DNA replication origin
ctcacatgcacaatagggtgcagctgccatcatgagccgattttatagacgaggatgccaggcaatgagcaggtaagtcagcttcctaaggccacctagcagatcgtgctcttgtctgatccacaaaaccgcaagagcagccatgaacagaacctgctgcacgccgggcatggctgcacccttcagggccatcagctagtggaatcgtcaccacccaaccctctgaggtggggaccttacggtccctgtgttataggtaaagaagcggaggttcaaggcaccaccgggagaggtctgttctccagggggcaccaagcagtaggcctcacctgaaagagcgatcggacagatgcaggggccggggtggccgcggcggcttctccgggggccggtgctcccgctcactgccctcagggccctccacggtcatgccaaggcccccagaggcgctgctgctggtggacgtgttgcggcggtgcgtcaggtctgagaggctggaggagcgcgagtgctctgtgctgtagcctgtcaggggcgacgcaggggagcatcacaatgggggatcccgaggaaggaggaggccacgggggcagggccaggcagccactcaccggagatcttggactgctggctggcatagctggagttgcgggagtggccagagtggaacacctcctcagggctggacaggttctggtcgggttcctctggcagccctggaaggcaggaaggggcagggggtgaggtgacaggggtcacccagtgctgctcactgtcgcccttcacaacgtgccctcacagagcctcccatggcagggcgccatttaacagactgaaaaacaggttcagaggagcagcaaccagcctgagccataggtcaccctccgaacccaggtcccttcattccacagagggcacacttgggtggggtgcccaccacaggtcagcgaggaagaagaacgctgaacaaaaactgcct

SEQ ID NO: 17267 - DNA, 1053 bp, Artificial sequence
  DNA replication origin
gagctggggcggtcgcgcctgcagcagcgggggtgatgagcgagacctagacacttggcaagtgtggaagggccccttggggccggtgtgaggaggatccgggggattctgtgtgcctggggcaggttgcacaaggcaggactgggcctgaggcagttggcagggtgccaggcagccgccagccaaatacctgggggtctagtctttcagccttctcttggggccctgcgtgccgcctgcagtaggtccattctgcagacttgcatgtacagcctatcagggatttgtaccctgagcgattgtgcaggggaggggtgttcaggccaccttgcacccgaactggccactggggctgtcatatgattcaagagtccaggccagccacgggttccccggcacccccaggcgcctgggaaggcccgatcgcaggcactccctagtctggctggagggaggtggctggattttggcctacccagccccctccgagtgactatcctcctctggctggagctgggctgctttgcattgcaaatacccttgtcgaggaggctgctgccctctctgaaagaggctccgttgagtttggttttgtgttgttcgtccccatcctggcaggtccagctgcccagcttgttgctgaatgcaactgagttcccaggctgtcccttgccaattgggcccagctggggtcacatcatcctggcctgtctccgaagagccttggacttctacagatgggagtgtgactcttgactctgttactttctgggcctcctcttctggaaagtgagcctaatacaggtggagaagctgcagcagcgagaacttagggcaggctggatgctgtggcttactcctgtaatcccagcactttgggaggcctacgtggaagacttgcttgaggccaggagttcaagaccagcgtggacgacttagattcctgtctctatttttttttcttttttggggggacgcgatttaactctgttgcccaggctggagtgcagtgacacaagcatggctcactgcaacctctacctcccgggttca

SEQ ID NO: 17268 - DNA, 1237 bp, Artificial sequence
  DNA replication origin
cgccaccggccgggccgaagggcgcctcagctccgccggggcccgcggcgcgggtcccaggatcgaggaggaggcggcgcctccgctgcccggggccggcccggtgcctgccctgaggaggcccgaggccggacgttcccggcccgcagcgaccccgacgcgcctcctggagaggcccccgagctcctggcagccccctgggggtgccccaccttccccggcttcacctgcgctggccgcccggcacccaggtgcgggggcgtgagcggcgagggcacctcccccggccgccagcggggcgggggcggggccgccctccgccctcagccttaccggccagccagcccgcccgccgccctcagtctcaccggtccgcccggccgcgcggcgtgagctccccggacatcgcgtctcgggatgctgcaagccagcgcggccgctcgcgcgcagccccgcacctccgcccctgcctctgcctcctgggccatgccctgctgtttacatgccggtgaggtccccggccgctccgaacccctccgagccccggctccccgagggtgaagcccgccggcccgcgaactggactggtggatctctcagacctggggccccggactccgatctccgccgtctccgccaccatcagggcgggatccggctctggtgttttgaggagggggtgtggtgtagggaaaggaatcccgtccctctccaccttttttcgccttcggggcttcagactcagggaactcgctcatggctttcttgatgaagaagaagaaattcaaattccaaactactttcaccctggaggagctgactgcggttcccttcgtgaacggggtcctcttctgcaaggtccggctgctggatggaggggattttgtcagcttgtcgtcaaggtaggagctggggcggtcgcgcctgcagcagcgggggtgatgagcgagacctagacacttggcaagtgtggaagggccccttggggccggtgtgaggaggatccgggggattctgtgtgcctggggcaggttgcacaaggcaggactgggcctgaggcagttggcagggtgccaggcagccgccagccaaatacctgggggtctagtctttcagccttctcttggggccctgcgtgccgcctgcagtaggtccattctgcagacttgcatgtacagcctatcagggatttgtaccctgagcgattgtgcaggggaggggtgttcaggccaccttg

SEQ ID NO: 17269 - DNA, 1565 bp, Artificial sequence
  DNA replication origin
gggcggccagcgcaggtgaagccggggaaggtggggcacccccagggggctgccaggagctcgggggcctctccaggaggcgcgtcggggtcgctgcgggccgggaacgtccggcctcgggcctcctcagggcaggcaccgggccggccccgggcagcggaggcgccgcctcctcctcgatcctgggacccgcgccgcgggccccggcggagctgaggcgcccttcggcccggccggtggcgcccgcctcgcccggcacccttcgagcagcagcgccgccccctgcggccccgacgctgcagccagagcccgatgctgcgaggcgccgcttggagaatgcctgggccccgcgcggccgcccgcctagccgccgccgagcacggcaggggcggggcgccggcggctcagccctcccgctattgcgcggcccggctaggcgggcgcgcagcgcgattggtgggcggtggcgtggggtgggactcgcgggaggcagaggcggctcggggctctcggattggtgcaccgcgcggccgggcccgcctcctagggcggggcggggctgagggaagggagaggggccctgggaaggcagtgggaggtcgcagggctggcggggcagggagagcgcgagcagaagaaaagaagaaacaatgacaaggagaaacagtttgtggctgcagcggccttccagggtcccgccagacttgagctcgtagaaccctgaagcaggcccggaaggtagcgagtctcctttctcagaaagctggcgcccagagagagcccctggcaggtcgcttgctcgccctgaatctctagtgcccctcagcaatgagcagagaagcgtctggaaggcttcgccgaggaggtggctctggctcagtccatcacgcagccttgtgacccagcttgtaacattccaagctgttatctaagctttctgttgtcctttagtttcttgcccagcgtgactggtctcactgactagttagctgttctgggggcagaacccactcgaaagcctcgtacctcccaggcccctcggcatattgtggttcattcatccagtccccaaatgtttaggggcagtctccactaagccaggctgggacctagtggagaacctggtgggcttgcccttcccaaatgctcccagctcaagaccaccaggtggagaagcagacagggacacaggcagcgacaaatctatgggtaagagttgtaacaggggataagaggcacctgacatgggttggggcgcagactcagaaagtctcgaacaaagggagccaagccatccacaggatgcgtgccctgagtcacgcagggtccaggcatagggagctgccagagacctggtggctggagatcgtggtgcccgcagaaagtttcaggcaactacatctggctgtactgtggcagttggagagaggggcaagagatggggctggaaaggccagatctcccagagtcttgtaagaccgtaaggaggaagccacggacacgcgttgagatggagagtgtcctggtcagatttgctttattttttatttatttatttttttttg

SEQ ID NO: 17270 - DNA, 1151 bp, Artificial sequence
  DNA replication origin
aggaggctgaggcaggagaatcgcttgaatctggaaggcgaatcttgcagtgagccaagatcgcgccactgcactccagcctgggtgacagagcgagactttgtctaaaaaaataaataggccgggcgcagtggctcatgtctgtaatcccagcactttaggaggctgaggtgggcggatcacctgaggtcgggagttcaagatcagcctgaccaacatggagaaatcccgtctctactaaaaatacaaaattagctgtgcatggtggtgcatgcctgtaatcccagctactcgggaaattgaggcaggagaatcgcttgaaggaattgctgaggtggaggttgcagtgagccaagatcgcaccactgcactccagcccgggcgacagagcgagactctgtctctaaaaagaaagagagagagggagagagaggaaggggaggggaggggaggggggaaggggaggagagggaaagggagaagaagggaggggaagggaagagaagggaagggagggaggaggggagggaagggaagaagcgactccaggtagcatgagagttaagagagaggacgtccagggggccatgggcatgagcagcagtgagagctagcctggaccggtgggagctggaaaaagacctcttgaggaaataagcagagccctggaggctacccaggagctgggcaggggaagaggtggggcagggaaccagcacattctggcacagcctctagggctctgccaccggacagaccattttgagaaccacatccccctttgtaaacctccatactgaagttagttcatcatctctaaccaaaagactgggtttgtccctgccagttcctcccagcaggcactctttcgcaccctctgagaacctcgactgattggtctagaatttctgcaagggtcaggaaggcagttcagggagatttccaagcaaggcatgtgagtgagccgtcttaggggtagaggcccagccccagaggggcaggtccagctgccactgagaaaaggacaagctgttccctctgggacctgatcaaattgcaaaatcatgagcaaataaatgatcattgttttcagccactaagtttcaagttggcttgttacacagcaaagacaactgaagcaagcagctact

SEQ ID NO: 17271 - DNA, 1232 bp, Artificial sequence
  DNA replication origin
ccattacgctgctggctggcagcggccgggccggtcggggctgggccctacgcactttgcgtagcgaggggggttaccaaaggcctagtgcttggcctcgagcaagcctggcctatcccctgtagggggtgggtgaggggcgaggctgaggaagaagagaaggggaattggggcgcttgaggggattataatttctttaaaaagaggggaggggagaggccatggccgtcccagccaagaaaaggaagatgaacttctcagagcgggaggtggagatcatcgtggaggagctggagctgaagaagcacctgctggtgaaccacttcaacgccggggtacccctggccgccaagagtgcggcctggcacggcatcctgagaagggtcaacgccgtggccacctgccgcagagagctgcctgaggtcaagaagaagtggtctgacctcaagaccgaggtccgtcgcaaggttgcccaggtccgggccgccgtggagggtggtgaggcgccggggcccactgaggaggacggagctggggggcctgggacaggcggtggcagtggtggcggtggcccagctgtagccccagtgctgctgacccccatgcaacaacgtatctgcaacctgctgggcgaggccaccatcatcagcctgcccagcaccacagagatccaccctgtggccctcggaccctcggccaccgcagccgcagccacggtcaccctgacacagagtgagtgacctctcctgcccaggcggcgtgcataagtgggaagggccagcaagctctggggtggcctggggaaggttggctgccaagggtcagaggtcagatgggggtcttggaagaccatgaggccttccaagagcagcacccagacagaagtgatcttgctctctttgggacttcctcagcacgtgggctggacttctgacgtgctggatagctcgccactgagcattgccaccatgtttgtccatgacttacctccacttgccgaactgggtggtccttgaaaacaagagaccgtgtctgtatccccacaggacttttcacagggcccggcttgtagtagacagccaggccatatttgttgaaaaaattgatgggaataatactgcccaagtgagacaacgattctggattctgttttcagtgtgggggatctttcatcaggtgctgctcaggagcctcatggttcctggtgttaatctactccattcattcattca

SEQ ID NO: 17272 - DNA, 1645 bp, Artificial sequence
  DNA replication origin
gtgcagtcccaggcgccgcagccccaccgccaggtcgttgacacacaggccgccgtcccggttgacgtcgagcgtctgaaagagtctccacaggcgcagccggtggtccgggcccccgcagatagcgccgccgcaggggtcccccacggacgccggcgatgaggcagacgaagaggcggcggtggcggcggcgtccggcggcggggaggccacacagcggcacaacacactgctcaccatcgggcgcgaggcaggggctccgggcgcgggcgggagcgggggcggcgggccggcggtgaccgcgcgggaggcaagccaggcgctctgcagctgggagcgcgggctcggagacgccggcaagctggcggaaggggcggcttccgggagccccgcccctccgcgccccgcttcgccggccacgcccgggcgcaccgaaggccagtcacaggctcggatggggaggagggaggggcggagcctgtctaaggacagcccacgcgccacggactacccggatcaatggggtgggcggggtcacccggctccgcctggggccgattcaaactgagggaggcggggattggctgagccgggggccaagagagagaaaatcacgcagcgataggcatgagtaatgtgattggcaggcggaaggccccgtgtccagtttccattgatgaactaactctgtttagactgcgggatcttaaggatgggaggagcggtagtgtacggagagatcgtagcctccagtgggaaacaggatttgtgtgagagcatttgtgaactgcagttgcgaggcagagtttgtgccggtgggaggaattaaaagttaattgacccatgggtcacggccgaaagcactaagtatcctcaggaagcagggttttggtaatctaactccctaaaccaccaataaaatagctgaatttaacggcttaatagtcgtaatactgacaattgaacgacagaatgattttccaatggaagtgaataaaggttaggtgggcggggccctctgggcgacggacacaattttagaccaatgatcaggcgaattacagtaagcaggcgtgctctttagctgagcgacagatcgaaagaaccagtgatcgacgtgatatttgagcagctaccaaccgggaaggccggttttcccggagaagcgctgggaggcgggaagaggggaagtgggcggatctccgcacacctcggcggaagaggcagattcaggaagccattacgctgctggctggcagcggccgggccggtcggggctgggccctacgcactttgcgtagcgaggggggttaccaaaggcctagtgcttggcctcgagcaagcctggcctatcccctgtagggggtgggtgaggggcgaggctgaggaagaagagaaggggaattggggcgcttgaggggattataatttctttaaaaagaggggaggggagaggccatggccgtcccagccaagaaaaggaagatgaacttctcagagcgggaggtggagatcatcgtggaggagctggagctgaagaagcacctgctggtgaaccacttcaacgccggggtacccctggccgccaagagtgcggcctggcacggcatcctgagaagggtcaacgccgtggccacctgccgca

SEQ ID NO: 17273 - DNA, 1592 bp, Artificial sequence
  DNA replication origin
ggcgaagcggggcgcggaggggcggggctcccggaagccgccccttccgccagcttgccggcgtctccgagcccgcgctcccagctgcagagcgcctggcttgcctcccgcgcggtcaccgccggcccgccgcccccgctcccgcccgcgcccggagcccctgcctcgcgcccgatggtgagcagtgtgttgtgccgctgtgtggcctccccgccgccggacgccgccgccaccgccgcctcttcgtctgcctcatcgccggcgtccgtgggggacccctgcggcggcgctatctgcgggggcccggaccaccggctgcgcctgtggagactctttcagacgctcgacgtcaaccgggacggcggcctgtgtgtcaacgacctggcggtggggctgcggcgcctgggactgcaccgcaccgagggcgagctccaggtaggctgcgcgcgtcctcagcactggcggggagggagcccctcgagggccgggtgacaggtctcgggggacggccccttgggctgggcggaacccccactgtccagaggaagggtgccccctgactcactgagggacaccccacttatgccctggtgggagcggggctccttcctgacttctttgggtgcttgagccgggttcttcgtggacacaggtgggcatcctatgggctttctgatgggcgaaaagccctttcttgcccagagtagaaggccaggtctcaggagtgtgcctttgtcacctcctgacctcaaggccaagctggacgctcccttcacccaaggatgggttcatccatcagtccccagcagcaccccctcctttccctctcgtttccatgccagccgtgggccctgatctggttcctctcaggaacatgtgggagttgaaaaaaaaattggtattggggtttcaggctgatccgtgtggacgttggcggcgaagactgacagttctcatggtttaggctcatctccattgccctgtttatccagaaaatgggatcgtgatccccgcggggttggagtgtggacggagtgaaagaatccgggggaaattttttttctaaaagtcaaagcgagattgttactattgtgggctcttggccgaggtgtgggcataggggcgcagagaaatggtcatccctgggcctgccaggaagagaagtgctggcctttctgtatgagaacctcagagcagaggctgtttctttcccttctgtctcttcccccttcagtctgacttggcgggtgtagctgccattttcccaagtatttcatttactgtagcttagcctgatttacagcctggaataggactcctgagtactttacctaagaacctgtttcactgctgagttagtttggtccatttgtacacatgacaattagagaatctcgtagccaagtatgaaaagaatctggtaaaccgccaatgaattaaaccaatttgttgggtgggtgtacataggtgttgttaactcatgttcaagattcttggatcaacatccaaggtatttagcgctaactattaggatcagcctaggaggaccaagagtaacactacgcaagatagaatggttaagtccaggagat

SEQ ID NO: 17274 - DNA, 1799 bp, Artificial sequence
  DNA replication origin
ggtggctgcgggaaaacacgccaagaagtctgacggagaaacattggggaaactgaagtggagttgttacctcttgggagagagatactcacggggagaagctgggcctaggtggtgtcccgcggtggcctcaggctgactggccattctccagcctgtcaggtctgattagcactcgggaggcgggtgtaggctcctccccatctgcagcagccccggggaaagagccctagtccaggactcaggcccctgttcccagcgcggtttagctgccaaccggatctccttctgcaagaggggaaacagaaggaaactttattcccgagtctgtgaagccaggaaaaggggcaatgcctggtgggtgggaaggcatctacacccggggcctcctaagtaagaccaggacctcgaggggaggctggaggaggagccacagcccgcagtcactgggctgagcaggaggaacattcaaaaggcctgggagcacagggtggggtgctgggcagtgagaccttcccctggcctccatgtcatggacagaaggtggacgccttgtcacaagctgaccacatcagatgctctctttcgggactttgggactgagaaagagagaggtgagtcagtccccgtgtgcagctggaaaggcatcaggtaaccctgggtggggtctgaggatggcaggaaaagcctgtctgtgaagggaagggaagtgagagtggggagcagggatggagggatgctgggatggaggatggagggcacagggatacaggaatggagggatggaaaaatagagggatgcaggaatggagggatgaagaggtgcagggatactggggtggagggatgcagagaacggaggcatgcagggatgctgcgatggaggaatgcagggatggagaatgtaagggtacagggatggaggatggaggggtgcagggatgcagagatggaggatggaggggtacaacgaaggaggggtgcagggatggagggatggaggggtgcagggacagagggatgcagggatggagggatggaagggtacagggatggagggtgcagggatggaaggatggaggggtacagggatggagggatggaggggtacagggatggagggtgcagggatggaaggatggaggggtacagggatggaggggtgcagggatgggggacggaggggtacagggatggggtacagggatggaggggtgcagggatggagagatagaggggcacagggacggaggggtgcagggatggagggatggagaggtacagggatggagggttacagggatagagggaggctcctccttcagtgccccatggtattcctggcctagttcctgccctgctgagggaggtaccctgggtccctggagcaaaggcccctcaggactttagacctggccagtgaagtggaaatgccgttctggacacagtggtggctctgggtgccctgatacctgttggcctctcagaagcggctgctgtgactcctaaggccacagatgggcacagcctcaggcctggctgcctcctctaccctgcagcccaagtacctggagttaacacccacagagggcacacagtgggggctggctgaaggactgtggtgcatccaggcggcagggcactatgcgccatgagaacaagccaatgtgacatacgccgacaggcagacgcccaggatggggatgagaacacagccggtggcagaccaaccccgtgggaaaaacggaggtcaccaactgcacagccacctgcttccaaacgtcacactccctgcctcg

SEQ ID NO: 17275 - DNA, 1158 bp, Artificial sequence
  DNA replication origin
cagtacaggcgccgcgacttccggccactgaaagccccggaaacgacccgacccggcaccaggtgttgcggttctctctgccctcccgcctcattgtccgcttcctactgtgacccgaaccataaaattttcccgaacccgaaggggccttggaaaccacgtgtctctgatttcgcccacgcgaagcggccggcccgccgaccccgagatttccagggagaggatggcaaagtggggtgccaggctgctcggtccttctgctgggctcccccgccctagctgaagcccggagcctccaccgcataggcgtctccgcggacagccccgggatggccccgcccggcgcccgagagggggcgggactcgcagagtgggcggggagaggggcggggcgaggggggagctctgagtcccggctctgctgctccgccgcgtcccactcttctcgctccgctttcgccccgcatcttccaccttccttccagtccttgcggcgaccgagcccgcagtgtcagtccccagcggggacctgagtatgccggtgaagacgagagcggaaggcgaggacgacggcttcggggaagcgggtgacccgaggagactgctggagcgaccttggcgtttccgggggtgccttcccgggaaggggaatcgggatgttggcttcgaagggaccgaagggcccacctcgacccgccccgagtgggtttggagttgtaggtgctgtctcggatgcagggcgagcacccgcgagcgggtaaccagtcccgtgagagctgcaggtccccagccccgttttacagatagggaaactgaggcagctgctgggacactcgcccatatgggttttgctccacccacttccttcagccactttacagaccaggagttgagggactgctcgagcttagagtgtttaggggtggttgagggtgacccccatgttctgtgctctactctatccctatccaggccttctcccagcgccactctcacgctcctgcttgctagctcctgcttgctagctcctgctcctcccagcttcatcctcctcctgtttacattaattgctcctgatcttccacactcttgattttccggattctaactccatcaaaatgtaacttgatgtgttcaggccccggggacacctaggca

SEQ ID NO: 17276 - DNA, 856 bp, Artificial sequence
  DNA replication origin
gaattcatctgtgttcatccttcctctgttccttagagcaacgtttatagcacatttccatgcagacacacagacagtggtggggatggacatgcacagtcgttagaaaacaagacggagagaggaggggtgcctgggagcgggaggaggggacactggatccagcctggaaccccacccagtgccttcatggaaggcttccagggaggtggccttaaaagagccaacctgcttcaaaaggaaatgtggggtgttcccggcaggggctggagtcagagagagcccccccttcaggaaggagcaagccatcgcagggtcaccctgagcagagctgctgagcagcctggaggggcaggtggccacgctagcacctagcacggtcctcaggccccgccccagcggatctgctgcggagtggcttagagcagggctcttgggccgcagggtggggagacttggtggggtgcagcctagggggtcgggagaccagcgaaagtgaagcggggccgtcacaggtgtgagagaacaggcgcagggtgaagaggcagggagccagggatcagccgcccccagtgggtttctgactctggcagctgagtggattgggattggggcatttgtggagcaaggagcagaatacagacaggttggggagctcagccctggggtgccaggggatgggaagtgggaggactcaaggatggggtcaggtttgacccgagagctaggggaacggctggcatggagcagactggaagtaccgaggtggatccccgggagagggtataggaagggaagcagcaagctgagtgcaggggagaaatgcagggtttctgtgtgttgggtggcggggggg

SEQ ID NO: 17277 - DNA, 726 bp, Artificial sequence
  DNA replication origin
ccgctgctctggggctgggcgccatgtcacagcaggagggaggacggtgttacaccacgtgggaaggactcagggtggtcagccacaaagctgctggtgatgaccaggggcttgtgtcttcactctgcagccctaacacccaggctgggttcgctaggctccatcctgggggtgcagaccctgagagtgatgccagtgggagcctcccgcccctccccttcctcgaaggcccaggggtcaaacagtgtagactcagaggcctgagggcacatgtttatttagcagacaaggtggggctccatcagcggggtggcctggggagcagctgcatgggtggcactgtggggagggtctcccagctccctcaatggtgttcgggctggtgcggcagctggcggcaccctggacagaggtggatatgagggtgatgggtggggaaatgggaggcacccgagatggggacagcagaataaagacagcagcagtgctggggggcagggggatgagcaaaggcaggcccaagacccccagcccactgcaccctggcctcccacaagccccctcgcagccgcccagccacactcactgtgcactcagccgtcgatacactggtctgttagggagaaagtccgtcagaacaggcagctgtgtgtgtgtgtgcgtgtatgagtgtgtgtgtgtgatccctgactgccaggtcctctgcactgcccctgggcagcccct

SEQ ID NO: 17278 - DNA, 854 bp, Artificial sequence
  DNA replication origin
cacccccaccaccggactcccgcctccacctccctcacagtcgaactccgcccattccgcccccggcctcgcccctctcccgggcgctgggcggggccaccacggggctgcccctggaaaagcccaggagtagggaggtccgggaggagcggcgggagaccgtccaagcccatctgctgcttcggcccctccgcgttggcgaaatcgaaaacggggtttccttgttattttttgagatagggcctggccctgtcttccaggctggaatgcagtggggtgatctctgcctcccagcctgaagcgatcctcccacctgagcctccagagtagctgggactacagacggctgcaccacgctggctattgtattttttggagacgggggggggggggggggaggggtttcgccatgttacccaggctgctctcgaactcctgagctcgagccatccacccgcctcagcctaccaaaatgctgggattacaggcacgagctactgggcccagccttggaaacggggtttccacacctcttgtggcttccggatatacctcttgtggcttccggatattcttcttcacagcctcgctgagagtcacgaagggtctccttcctctttgcctctctgcctgcaccccagtggagaggacccaacacccctacccctggatctgggccttcctggtcttcagcgcttctcttagggctcattggttacaacctgtgggtgggaatcaggctggactccagctctggacaagagaaacaggaacattagctaggcggggtggctcccacctgtaatcccagcgctacgggaggccgaggtgggaggattgcttgagcctaggag

SEQ ID NO: 17279 - DNA, 1022 bp, Artificial sequence
  DNA replication origin
tttattttcccttttttccagaaaggtacaacttgctggggtaaagcagagctgaaattcaaacccaagtgaccctgacccccaagtccaatcctgagtttcggctgttaccaacctggaggaccctgggcaggttccttccttctgaggcctcggtttccctagctatataccatgagggggttggactttaagatgcagccgatttcccaggacgctgtcgtctgtgagggtggctggctctaggcaacgggtgccctttcctagaacacaggcacatatgcacccataacccagatacgctcctccagctcctccaccggctgcttcccccttggtctcaagctggcagctgagtgtatgtgagtcatgggctggctcagaactgggtcccgcagtgggcacaggcccagaccttgagtcctcagggacactgtgttgctgagcagggcagctctggagtggccgtggaggggagggagtgatggtttctagtggagaccagggaaggcttcttggaggaggcattttgagctggtccttgaagggctgttgtggttgaggcattctaggttgcagggatagttgagcaatggcggagaggctggaaagtcagaggcttcattcattcactcactcagtcattcaacaaatgcttattgcaaaactgtgagggcaccagggagccagcagcgaacacaggaccgttcatctttcatggggaaacataacagcactcagataagcacagcagtcaatcctggagagaaggtcgtggagggctgaggagggctaggggctcagcatagaggcctgatccagtctggggcattgggtgggctcccggtggtgacatccatactgagacttgaaggatgagtgggactcatccaggaggagagaagggaaggaagatgggaggacccagcaccttccaggcagagacagcagcatgttcaaagggcctgaggtaggtaaaggcaggtgtgagagaggaaaggaagaggcagggaggcagggct

SEQ ID NO: 17280 - DNA, 1085 bp, Artificial sequence
  DNA replication origin
ccgcagggaggtgggttgggaacaggaaggaagtccccctcgatgccccgcgggatggctgacccttccgggcggcagacggaccttggtctccgagcctccccttcgcgatgcggaggacgcgggacagagggtatgagccgcccaggaccccctcgcacctgctagcgccccgcagccgccccccagcgtgacttgtgcactgggcgggctcgggtggcgcggccggaggcgcctggacctcccgtcccccagagggcgctgccccggccggccccgcccgcatttgggccttacgagcccacaggccccggagtagcagcggggaggccgggagcccgcgggccggagccgcccggccgaggcgtgggggctgcggggccggcccatccgtgggggcgacttgagcgttgagggcgcgcggggaggcgaggtgcggggccgggggcggctgggtcgtggggctccgcctgcgagctggctgtgtctgcggaggaggcggctggcggggtgggagcgggcggagtggggcgcgaggaggtggcggtggtggagagaagccgtcccacggagctcaggaccacggtgaccgggttggacgggtgccgatgttattgacacccgggggcccagagagggttgcggtattgaaaaggggctgtgagtgaggaagtgatgggcgcagagagaggctgaggctgagggtgggaggatggagccgccagaaatggagagatggagggacttgaaggaggggctgttggcagtgtctggggggcattggcaggagggtggttgaatcttgcccctagcaggactggaggtaacttggaaggatgggccaagcgagtgtggcaggctcttggcaggactgggaatgcagctgtgaagctcctcagcagtctctgcgggctgtggctgcggggagtggcggtggatgggaggggagcaggcctgacttatggtggggaccccttgcctcactctgctttctgcccctagccaccatgttcagccagcagcagcagcagcagctccagcaacagcagcagcagctccagcagttacagcagcagcagctccag

SEQ ID NO: 17281 - DNA, 1048 bp, Artificial sequence
  DNA replication origin
cccagccgcccccggccccgcacctcgcctccccgcgcgccctcaacgctcaagtcgcccccacggatgggccggccccgcagcccccacgcctcggccgggcggctccggcccgcgggctcccggcctccccgctgctactccggggcctgtgggctcgtaaggcccaaatgcgggcggggccggccggggcagcgccctctgggggacgggaggtccaggcgcctccggccgcgccacccgagcccgcccagtgcacaagtcacgctggggggcggctgcggggcgctagcaggtgcgagggggtcctgggcggctcataccctctgtcccgcgtcctccgcatcgcgaaggggaggctcggagaccaaggtccgtctgccgcccggaagggtcagccatcccgcggggcatcgagggggacttccttcctgttcccaacccacctccctgcggccgccgcggtcctgcgatcctggggccccgcgcggggctgcggtgagagggggcgcgcagttggcggatgtacattcattcgagggacccaggccaggcgagagggcggccaaggtcttacagtccgtcaggagtttgcccacggaggggtggagggagagtccccctccaagtcttttctcagtagatttggctaaggaaggagtaggtgaggagggtcgaggccaattatcaaaaaatagccctaggggccgggcgcttccgcctgtaatctcagtactctgggaggccgaggctggaggatcaagaccagcctgggcaaaatggcgaaatccctctctacaaaaaatacaaacattagccagggtggtggcgggcgtctgtagtcccagctactcgggaggctaaggcaagaggatcacttgagcccgggaggcacaggctgcagtgagctgagatcgcgccactgcactccagcctgagcgacagagcaagagctgtcaaaaaaaaaaaagtaaaaattttaaaaagaaaaggagaggaaaacagagccctgctcccttatcctgcacctaaaatggtcctgccccca

SEQ ID NO: 17282 - DNA, 1349 bp, Artificial sequence
  DNA replication origin
tcagtgccccgggcggggactccagggatcccgggggtcgggggtcggcgcctgggggcgcgccgcgcctacctgcctacgaaattctcgagcaccgagctcttgccggcgctctggccgcccaccacagcgatctgcggcaggtcgaggtccgcgttctggccgatggcagagaaggcgtcttgcagccggttgaccagcgggatgagatcttccatgccgcggttgcccatggctgcggcgggccccgcaggctgcgatccggctgccgctagcgctcccggctccgactccggctccgccgctgcagccgcgcgcccagactgcctgcgccgcggggcccccgcccctcggggatcggagcgagcaccgctcccggacgccgctagggggagcccgcggcgctgcgggccggccgccgtgcgcaggcgccgtccggggcatcatgggtgtcgtagttttcaccttctgcggcttttggggtgctttagcagtgtctggggtgcgcggatgctgcgcagaatatatttgtcaatgggttgggtctcactcctagtaccaggcctcttggagagtggtctggatgtttcactccatcttaccgatgaggaaacaggcctggagagcagatgggcttcctctgaggtcacagcctcctgacctcagaggtcagaactccgagatgagttccccttcatctcgctggcttctatccctagatcctgactctgatctccaacatgtcctcttctgcctttggtcctcagtttccttgtttctagaaggagaaagttggaacatgaattcaacaaatatttactaggtacctgctagaagccaggccctgtcctaggcactgaagattcagcaacgaataagacagccaaggcctctgccctcatagatcttgcatcaagctggggagacagacagtaaataagtaagcagataaatgaaatagtaaaaatgaaaataattcatagtaagagggatggaggaaataaacagggtgaaaaaaggtatctttgtgggtgtggaaagttcacattggcttggcaggagtcgggggtgttctctgcagaagtgacatttgagaagagaccaaaatgatgagaaggagccagcagcaagcagatcaggggaagagcatgccaggctgaatgaccagcaagtgcagaggccctgacacctggagggcccttcttgggagagttggaagctcttgtcctagagagtggaagtctttgctccaacccatcaggatggtggtaaaacagcgtaaaacagtgggattcaaatccagggctcctacaatcctaccctgcgtaccctttcacacagacagacca

SEQ ID NO: 17283 - DNA, 1670 bp, Artificial sequence
  DNA replication origin
ctggccttctcactagctttcagaggatcatgaatgcttttctgcctactccttcacatcaacctaagccccctcccctgccctgggcctgcatctggacaccctgcacatcctcctgtggggacaacggccaagggcattggggtggagagggcagccagagggcccaggcctcctggggcacggtccaaaccttgctccaccactcaacaagcaagtactcgatgaaatctgctgtggtcagggatggcccctgcgtcatgggctccaggaaggcaggggctgggcatgcaggtccccaagcctaattggctatcagcgccccctcccgcatgtttacaaaagcacctttccacccatgaactcggtggagcccacagtcaccttctcaggaaggcagggcagcggctgtcagcgtttccattccgcagatggggaaatggaggcccacccacccacacgtccctgtgcctggtgcaggacccggctgtcagaggatgtgcagcgtcgagattaggaattgggctttggagtctaacagctgctgccctttctgaatgtgtgaccttgggcaaggcatctaacctccagggtctcagtttcctcatctgtaggatgggcatcatggtacctgcctcttgggagctcctgtgagcctatgaaggactcagcatagggggatgcatgggatgggctcagtagatgcgggctgaaatcaccagttggtcccctccctaccccaagcctgaagcacgcagcctggcatggggcaggagttcagccaacattcaaaggacgagaggtaggaatatggtttctccattctaaactgctggatatccctgactgctggcccttggggaaggggcccgtggtgtgtctcttgcctgtgtctctgcagctccgggggtcatgtgatcagaaggggggctctgcaggagccattggagagacagatgccttcccctctgctgaccagatgggcacggccgcccccacggtggccttccaacgtcccacacacacatggctccagtcaggccctctccctctcacctctagggctggcatgggtttcccaggacatttgaggggcaggaacaaccacccagtcccactgtccatgttagagatggggacactgaggctcagagagggcaagtgacttgcctgaggttttgcagcagaacctggcttggacagaactgctgtacctctgcggacaagggcccctgcctccctctcccatgtgccagtcacttttttggccctgaaggtcattggaagaaagcaagagtttctgaagaagatgggggggagatgaaagacggggtcagtgtaaactctctcacttcatcccccagtctgcccagccccccaacccacctccagtacctggagagctcctatctttcttctctctcctcagcaccagaaaaactatttctgcctccctttgggggtttgtggggagcctgcgggtcacgaccctgcctgccccgctaaacccacgaccctttgtctttgcggttgttcctctctccgccacctaggcctctcagcgccttgtgggatcagaggcgggagggggattaggttctgcaaatggctcccccctcccgccatccctgtcttagtcatctctgccctctgccgcctctccctccaac

SEQ ID NO: 17284 - DNA, 1026 bp, Artificial sequence
  DNA replication origin
ttcagtcatttagcaaacatttgtggagggtgcacgatgtctcagcactggggattctatggtggaaaagaccaagactctgcactgcagagggagaaactcagaagacaactggaaaatgtggtgaacgtcagggaggggagtggggctgctctccccagggaggtcagaggtctccaggaggaggtggcatctgagatgagaaccaagggatgagaagctgtgtaacttgccaggggcgggagagttccaggccaagggaaaggtgcaaaggccccggggtagcaaagaatttggtgcctttgaagaacagaaaggagaccctgtagctggtattcagctagcaagggggagacaggacctgagagataggcaggggctagatctacaaagcccttaggccatgaggagtgaggagtttgggtttattttctctcttgtgggaagctttttagtagtggagtgatgagctaattctagcaagggtgtgacttggggagcgggtgagggaaaaggcaggagactggtggggaggctgctgcagtgggcagggggtagtggggggcctggacaagggcttcagctgcaaccagaaggagaatggtgggtgggtttcaggatatattttagaggaagtcctgctggaggatgaatgtggagggtgaggaaagaggaatcaatgatgacttctgggactttgacctgagctcctgggtgggtgttggtgccattaacagagtcgggaagagtaaggaggagcagactggggggatgggggaagaccagggtttggttctgaacatattgagcctgagatgcctgttagacttctaagtggaagatgtcagctggcagtttggtgatgcaagttgagagctcagggggaagacgggctggaagtaaaaatttggaagtcgttggtgtagagatgggatttaaacccgagagtagatgagctcatcctgggggtaagtgtagatgggggagtgtttgtggacccagcacacaccagcctttcatgaacag

SEQ ID NO: 17285 - DNA, 1139 bp, Artificial sequence
  DNA replication origin
gggaccctcttcttcctgagggggctgttggaggctacagcatcctcaacgggggagcggggctctgggtggggcctgtgattttggcctccaagccccctcccaggtccctgtctcctccaagtttgtcctgggcaggggccccaactctccaccttgggaggggccctctgtcgtcactggcgggggcgccaagccatctggacctcattaccccaaccctggcctcccccaccatgggggcccctggaagggatggagtgtgcagtggcatggggtgcgggtggggggtggcttcctgccggtctctctgcaggctccctagatgcccccatgggtttggggtctcccatgttgaggttccttactcagggccagggagaccatgtgacctggggctgagggccggagaccgggtgacactgtgggggaggggcacgtgccactgagggggtcccctgatctcatgcctgagcctgcaggcctttctggagcttttgtgtacatctgagttaagtcgtgtgcgaaaacagctctgagaatcatatgtggggagatgggagtcagctgtgggctgtgggtgctgggaggcggggtgtgtttgtgtgtgtgtgtgtgtgtgtgtgtgtggcttgtgggtctggtgtgtgggtgttttttaggagtgtgattggagtataagcatctaggtgtgtttggaatatgtggtctgcatttgcatctgggggtgaaatctgtgtgcctggggagtgactctgggcacctgcctgtgcttggggtgtaaaagcaggtgtgtgtggggagggggctctaggagggagggtgtgagtatggggtgtttgagaatctgtgtatgtctttgggatgtgaggatggggggagtgttccagttgtgagggtgtgtatgggtgtgtgtgcatgcacttgtgtgtgtccgtgtgggacatgggtgtgagattgaaagtgtgggggtgctcatgtgtgtgagttctggggctgtgagtgtcaaggtgcgtgtgtgttgaatgtgagtggattcttgcactaggaccactggggatgtggaggtggtccaggctggtgggagagtggtctgtacttctctactcaaccaccagccctcaggttttggggtgagg

SEQ ID NO: 17286 - DNA, 919 bp, Artificial sequence
  DNA replication origin
ctccttgggtcactgaggattcagtgaagtgagtggtaaaatgcttagaaggggactggacctttgacaagaggacaaccatagtcagtgaagtctctagcttggggcccagatcccaccagctttctccgtggctctctaaggacccctctgatggccgctggactgaactctcatctccgagtagcagagggcccactagagtcagccttgggtcaggaaggaagaggactagtactgccaccaccctataggaaagagagcaggagaagaggaccaggcctgactagggccctttggctccagtgcctggcagagtgtctcatgaagagcatgcactataccagtgactatggaagggaggaagggacggagggagggagggaaggggagaatggaaggaagggaggaagggagggagggaggaaaggagggaggatggaaggaaggaagggaggaaggaaaagagggagggaaggaggagggaagggaaggggaggggatgggagatcttgacatgatgtctagctcaaagcaggaactcaataagcatctgtcagtggatggcttgctgtggggcctaggggaggttcctctcctccctggatccctgtacccagcttctactcagtgagggtggttttggggctgcagcagccacagccaggggcaggcaggcacctctgctccgtgttaaagagggcaaagatatgcttgctcgacataaagcccttctccacgtcccgcagcttgaggttgtccacagacagcatgtatttcttctctttctcctgtgggtgcaggtaggagcaatggggtgaggttggcactgttctctgccacacctcactctctaagagtccccctgactggcccagggcttctaagcatcagccccctcccactgcgaaggtgcagc

SEQ ID NO: 17287 - DNA, 1226 bp, Artificial sequence
  DNA replication origin
cccagggcggacccagcaggcggaggcccaggagcagggccccgcgacccgggccgggctgggggcacggcgggggctcggcgctgcggcgtggggctggacgtgggcgacctgagggcgacagggagcgaggaacaaggagaggcgagatgagcagctccgcccacccagaggccccgccccagcccagtgctggccacgcccatgcacgcaagcccctccctgccgcacccctaaggcggtcgccggagcttaagccccgcccccagcggcgccaacgccccagctccacccagccttgcagccagctctccacggcaagccccgccccgcgacaagccccgccctctctaagctccgcccctcgctccaggtgggagccaccccggtgacgcgggcgcgccactgcccggtcccggcattcctcccgcgggccccgggctggggggctttggggccgtgggggccggccctggtacctgcgtccggccggtacgctctgcacctgcagccaggagtcgtccacgggcgggggcatgggcgtgctgacggtggtcgtgttgatgtcgccgatgatgctgagcgcctccttcagtgcgtggtacatgcgcagcatctcgtcgcgccgctgtgcctgctccgccgactcctccatcagcgtgttctggtccccacacgagtacaggttggccagcagctccgagaagatgaactccttggtctgcgagtaggcaaagagggaaggaggtggggacctgatgcctgtgccgccctggccgccccaccgggccctgctgggactgtgagctggtgtggcttttcagacgcggctcctacactgcgtagactggaagattcacctccccaccgcgcttttctcactcagatgaggacactgaggtccacaggaaaagtcatctgaccaaggtcacagaaccgggaggggacttaggacctatcatgccaccagaactcttgtctactcagttgtttttttttttcttcttcctggagatagggtctcgctctttcaccaggctggagtacagtggggagattaccactcactgtagcctcaacctcctgggctcaaagttatcttccaatgtcagcctctccagtagctaggactacaggcacgtgctaccaccaaccccagctattcttttttttttttttgagacggagtttcactcttgttacccacgctggagtgtaatggcaca

SEQ ID NO: 17288 - DNA, 1153 bp, Artificial sequence
  DNA replication origin
gcggggcttgtcgcggggcggggcttgccgtggagagctggctgcaaggctgggtggagctggggcgttggcgccgctgggggcggggcttaagctccggcgaccgccttaggggtgcggcagggaggggcttgcgtgcatgggcgtggccagcactgggctggggcggggcctctgggtgggcggagctgctcatctcgcctctccttgttcctcgctccctgtcgccctcaggtcgcccacgtccagccccacgccgcagcgccgagcccccgccgtgcccccagcccggcccgggtcgcggggccctgctcctgggcctccgcctgctgggtccgccctggggggggcgccccccgtgccctccaggccgggggcttcccctgaccctttcggccctccccctcaggtgccctcgcgccccaaccgcgccccgcccggggtccccaggtgagtaggggctgaatgcggctggagaggctgccggacgggcgtggccgggagggaaatggggctggattccagagcatcggacctggccgccagaaccggccgtttctatcccaggcaatcggactctgggtgccggagccacgccacgtgtggccgagggctggcggagcctgcccccgagggagcgctgagtcccggaggtggtcgtttctggggagggggctgtggggctcgtcccacctgcccccttctttccagcacttgcatggcgcttccctctattttcactcttggcggccgcccacacgttgcattcctcctcctttcttcttcttgctgtcctccatcctccattccgtccaattcctctcccagcccctggggagcctaccttaggtctgactctgaaccccgatctgctctgagtgtgtggatttccttcagctaccctgatgtccccacttcccagccctgactcctttgagccatcccagggggtgtccagccactggcccacaggagcagaggccaggctgtgactgtgtgactagaaaggtgtgtgatgtgtgtgtgggcgtgcacacgagtgtgagagtgtaagcatggcacccaggcccgggctaggacaggagcagctggggaagcagcctgggccgtgggcaaactgatggcttttttcctccccccaaccaccccctcc

SEQ ID NO: 17289 - DNA, 923 bp, Artificial sequence
  DNA replication origin
gctctgttgtccaggctggagtgcagtggtgcaatctcggcttactgcaacctccaccttccgggttcaagcaattctcctgcctcagcctcctgagtagttgggattacaggcctgcaccaccacgctcggctgatttttttgtatttttagtagagacagggtttcatcatgttgggcaggctggtcttgaactcctgacctcaaatgatctgcccgcctcagcctcccaaagtgctgggattacaggtgtgagccactgcacccggccctcacgatctaccttaagagtggtggtagttgtagtggcaactccatctgggggatgagagaaggagtaggctgcgttttgggggtggcttgccagcgaagaggagagactattagcaacgaaaggagtggccagggtgaacgccaagcattttcctgactggggagctatgggtttgtttaaaggcagggctgggtgaggggtgaaaagagcgaggaggagagatggctggtgctggactggagtgaaaggcatctgaggagccaggagacaggatggggagggagaggagttagcctaggacaggacaggataacacttctttgaagactggcgggcatgaggaaaggaaggggagggattcgggaatgacctggcggttctcagtcgactgggagaagatatggaagagggccaagcggggattggctgctgttgggatggggagtggggccgggagcgcacaagggaaggtcgaggatgggaaagggggtgtgggggaagaaatactcacaggggatcggaaggccccgcggcaacttcgggtaagtcttggttcagtcctagagaggaatccgaggggaaagtctgattggacccacagcccgctgtgaggacggggtactgtggggatgcgggaggaggagcagtt

SEQ ID NO: 17290 - DNA, 745 bp, Artificial sequence
  DNA replication origin
ggaatctgcattttcataaacgttccgagtggttacgagctgcaaccaggtttgggtaccccgacctaggctatgttccagttacccacaggaaacggctccaagccgcccccacgggggcgaggcgcgggcggccttaccgtggcggtaggggttatagagcgccatcgccgcggagccggcggccaacagccctttctgcagcggggaggtggggaggtggtgcgagtatagcgggccggcgccgtcgctcctagcccggaggggcatttctgcggggcaagaaaaaggccgaggtcagaggagccgggcgccctcaggctccttcccgcctgcgcccagaacccggcgccacttgcctgccgcaggccgctgtaggcccgggagcccgcagagccgacggaggacagggcgcagcagagtcgccatggcagcgggcgtccgcggaggatgggcgggtacgaagaacgccgcgattctgtcaggcgacggagcgtcggaggggtcaaaactcactgaaaaaccgattctgacggcgtagcctacggcctttcgaggggaaacatcgcttcacgggcagaaggcatgtaggccaagtaggcgaaggaaacgcacgcgaactgtctaccgtctacgtccaccgatccaagactctcgccatgtcacctcgccccagaaagtgtctgcaaaggacacgcaaccacgctcactcagcgccgggccctatttccttctccacagccgg

SEQ ID NO: 17291 - DNA, 1173 bp, Artificial sequence
  DNA replication origin
aacccaccagcccggtctatgctcacccggcgtcggctccgccgcgcggcgccccgtccagatgcggcccggttgcagcagcgtagacagcgtgaggggcattagccgcccctggacgcacggagccgggtctcagcagggtttagccggctctgcgccctgcatggcccggccgccccgccagccccgcccgccgcccggccccgcccgccgcgctcctaccccgcccgcctcccgcaccccaaacctgctgtgccaggccgcagcaccgcctgccgcaccttccccgaagccggcaagccacagagccggcggcgcagcgcagccccagcgcgcctgacgccgctcggccccagcccgccctgctcgcgcaacggcttcgggcggcgccgccgcgcggcacgctgggagttgtagtccacgccgcgcggccccacccagccgaggagacccccgagtccgcgaggagacaggcgggcttcaccccggcccttcctccctgccgaccccggcccttgccccctgctgtccccagcgcccggatgtaggaagagcaccccagtccacaccacagccgaaaacccggagcacgctctcgggccccggccgagttcagcaaacacccagcaccacacctagaagctcgctaagagggcggtttcaggcagaggtgagcggggcggccgggttccgcagccggctctgtggcgcaatggatagcgcattggacttctagctgagcctagtgtggtcattcaaaggttgtgggttcgagtcccaccagagtcgaattttgatggctcctactccctgactttcacctgcgtgttttaaggactccaggacctatctaacaaataaggttcagaacgaaaatcataagtcacacccaactttgctgcgacacagccataaacctggtgtctaggtgactacgagaaatcctttctcgtaccatggtgtcttgtgagcagcctggcacacctgttggcacaaaggacacggatttggaggcccttagttaacttcaccatctatgatctctggtccctgcaacaaatcagttaacctatatttgtcatgccacccttatttgtcatgccacctccagagccataggcgagtggccagattctcggccctgttgggactcttggcctctgaaaaattggt

SEQ ID NO: 17292 - DNA, 1382 bp, Artificial sequence
  DNA replication origin
ttgtcagacatggttgcggaggaaaagcggagcgaggcatgcgagaacgagcgaagtctggtctgcgcagtggccaccaccgagttgtcctgagacgtgttctaagaggcttttctagccaaaacatgacagttcactcttctgacatccagggtccctaaaaccggatggcctgggggtgggtactgacttaagagcctctggctcgctggcagtggtggctcacacctgtaatcccagcactttgggaggccgaggcaggcggatcatgacgtcaggagttcgagaccaccctgaccaagatggtgaaaccctgtctctactaaaaatacaaaaattagccaggcatggtggcacacacctgtaaccccagctactcaggaggctgaggcagaagaattgcttgaacccgggaggcggaggttccattgagccgagattgtgccactgcactccagcctgggagacagagcgagactccgtctcaaaaaaagaaaaaaaaagtctctggctcgactccccacccagaacccagggaggttctgtggatgaccaggccaagtcaaaggggcagctccctggaaaaggagccctgcttggtccctgcccatagactcaggtatcgcagtgcgtctgttggtctatagagggcgacccagaaaacgagttagagcctggaagtgcttgaaaggtgaccgcccagggggcaaagctgattgagggaggcgaggaggaccttgaagacaccaccacccatcacacagacacacacagccactcggatgaatctttggggtctagggcttaggggaaggcgaatgacttgactgtgcttcaggggctgggttgagctaggactcttgggttctattcctggagctttgaggactcgatcaaggggacatctgatgggactgtttttctccgagttttcctgttcttgggagtagatgaaggtcacaaatgtgaaatggcctgagagcctccaagccaggaaaagggaatggtctggaccacaagaagccctgggagaccatctccccctccccctcgcgaaaagcaaaagccgggggcgggggaactgaaccagagtcctcaaccccaacgccagggtccagggtcctcagatctctggcctcccatagcccgccatagcagaggggcaggaacctgtcctggaaggctggggcaagaagaggccagaagagggtgactagttccctcgggcccctgtcccgggtcacgcgtgccgccctcgcccctagacagcaaggtaacagtgcgtctgtcggggaaatagcgccgcagggcgcgccccccacctggggtccgcaccgccacctcgcccgactcggcctggcacatgtccccacccgggaacc

SEQ ID NO: 17293 - DNA, 1970 bp, Artificial sequence
  DNA replication origin
tacttgctagtccaaggtttaacttactccctcccctcatctctacccccagcagaatgagctgtaagcagcctggggagggtctcaggagcccatctggtggcctgtggagcggggcaggccagccagggtcaagggctaggggtggggggagcaggaggggtgtggctggaggagcagctgctggcggtggggggagtcggcactcaataggggaccccagctggggttccatactgatagcagtgggggacaggcagagccctcagctgtacagacagggaaattgaggctgagaagcctccagtctttgggtagggaggggccttccttcagctactcaggtccattcatcttccccatgaagacgctggctctggggctggagcgccttgtcagcggccactccatgtttagactgaggtacaaggagtggaaggcagccaggtcacctggccacagagcctccttcaactcttgacaaactggaggggaaccctcccccaccacagctgctggaaaagggagtgctgggctctggcgcctgtctgccttccgctgctcacgtgcttgagaaaggctcatttttagcacctggcctcttttccctgcctggagggagcttaggggacagagcagggaagaaggcaggcaagggggacagggagacctggaagcagggcccaaggggatgtctgattgcttcgttctcccctctaagggtgcccaggcccagagaagggccctcagccgccgtgcagagtggagatgaagaggacgctgtcctggtcctgaagctggtagtccagctcaccctggtgcgggagagaggggagcgggagaccctcagggccaccttcccaggtccaccccaggagttgggagaacaggggctgaggactggctgctctggaagagacagactctaccagaaaaatgggtatcctatacctcaacctgcaaatcttcaggatggaggagtactcccatgtccccagctacccatcccttcctcacctggagtgggagactccagcagcctcagtgtggggctggagtggggcggaggattacccagccactctatatgtgcctgaggagaggcccaacgctttcccactgaagcagcaagggcaggggctgggggagggatgtcccccaaggtactgaccagtagctcccagtcggcatcgttaatcagcaccagaattcctggccgcctgtgggaaagatggtggtgagtagcaaggagtgagaggcaggaggcagtagcacagaggaagagaggctgagagctttgggctgcaggagagtgtgctgaggagccttcctcctggggtctggctaaagatatcccaggaaggggaggctggtctgagtgtgaaggaaaccaggtcagtcatgcatggtctttgtagccagatggaaaatgggtgcaaatgccagccagcaccaccacccagaccatgggcaggtcattttgtttctgagtatcaggttcctcatctgaaaatgggataagtgatactgtctaacccacaaggcctatacgaaaacgaaatgagctgatatgtgtggagtgcttgccacactgtcatggtaaccattagtaggacttttccaggggtctaatcttattctcgttagccctggaaaagaacttcggcttttttttaggcctctgcatgcccatcctggagagaaggctgttttgcctcttccgaatcagttgccatgccacatggcaatgctcacgtgcagtcctgcctggcataaggcagggtaggtcaacatttggtcaggcagcttagcctggctcccactggtaatggcccaaggagcactgctggccttagaggtggcctccaggaccactggaccatgacctgaaggagggctgatcccctaggcctgatcccttaggacctgacagtgacctatgcttcgaggcaaataagcgagcctcacaa

SEQ ID NO: 17294 - DNA, 1443 bp, Artificial sequence
  DNA replication origin
ggagctgttccaagtctcttgctctgttccctaacatggagaccctgacctcaggaactagtgagggttggtcacacagcctttctggacagcactcagaccccaacactggccttaatttgcacccagaccagctcctccccatagtcccaacacggctgctcccactccacacaagcccagagggtctctacctgcagtagtcctggagaaaagcccaccagccagcaggtcatctacccccaaaagaatgatgtgcacaccccatcccccaacactgctgggacaaccttttgccactttcatctccacagggtgagagaaattccaccttaaattattgacatagaatgaaaagcaacattttgggtgggatgatgcttttggtgggatgttagcaccctaattctttttgggggtctccctccagcaaagctcttttctctaggtcatggaaaggaaagaccacagaaagggggctcagcagtcttatctatgctaccctcattttgggttctgaggctgctggctgcagctggtgggacaaagccttggacagacgggtggggatgcgtcccgggacacagactggtcagcacagactggctctgccactcccttctccagatggctctattagactaccccctctcagattgtctgagtgttcacccccacccctcttttgggtgaagggtagctctgaggccctaggctgaggatggagaggttgtatcacagaccacggctggggggatatgaggtgccacccgtttccaaggatgaagctccaagcaaggctagtaaacaacctagtcttttatttgcccaaggccggctgttgcaagcactgaggccccaagacttccagaagggaaggggaggaggggcaaagcactgtgcctaccaggtgctgcctgccccgtcctgcttcctgcaggaggtgggaagggagagaaaacggacattcgcgccatcaagtatctccccagttttcagccactatattcagttgtggaggaggaaactgaggcacacgcatccccccaggcttctacttgctagtccaaggtttaacttactccctcccctcatctctacccccagcagaatgagctgtaagcagcctggggagggtctcaggagcccatctggtggcctgtggagcggggcaggccagccagggtcaagggctaggggtggggggagcaggaggggtgtggctggaggagcagctgctggcggtggggggagtcggcactcaataggggaccccagctggggttccatactgatagcagtgggggacaggcagagccctcagctgtacagacagggaaattgaggctgagaagcctccagtctttgggtagggaggggccttccttcagctactcaggtccattcatcttccccatgaagacgctggctctggggctggag

SEQ ID NO: 17295 - DNA, 1735 bp, Artificial sequence
  DNA replication origin
cgggtggcacctcatatccccccagccgtggtctgtgatacaacctctccatcctcagcctagggcctcagagctacccttcacccaaaagaggggtgggggtgaacactcagacaatctgagagggggtagtctaatagagccatctggagaagggagtggcagagccagtctgtgctgaccagtctgtgtcccgggacgcatccccacccgtctgtccaaggctttgtcccaccagctgcagccagcagcctcagaacccaaaatgagggtagcatagataagactgctgagccccctttctgtggtctttcctttccatgacctagagaaaagagctttgctggagggagacccccaaaaagaattagggtgctaacatcccaccaaaagcatcatcccacccaaaatgttgcttttcattctatgtcaataatttaaggtggaatttctctcaccctgtggagatgaaagtggcaaaaggttgtcccagcagtgttgggggatggggtgtgcacatcattcttttgggggtagatgacctgctggctggtgggcttttctccaggactactgcaggtagagaccctctgggcttgtgtggagtgggagcagccgtgttgggactatggggaggagctggtctgggtgcaaattaaggccagtgttggggtctgagtgctgtccagaaaggctgtgtgaccaaccctcactagttcctgaggtcagggtctccatgttagggaacagagcaagagacttggaacagctccctacagctgcacttctagaaggtcagcctgtccgattcttgtaacctggaggtccctccccatctgcagccccctgagctgcaggagcggccccatcagtgcacctgattggaacacactagatttcaggtcctggaaactgggcgctaggatccgtttccctggctgcagagagtgggaggtgtgatgtggaatatcccttctcccagcacaccccaattaatactgaagagtagggcaggaggaggtgctgggaaaaccgggtttcttggcacatgggggtgcaagcactgtggttgaaattggccatgtccaaggcacaccagacgatttcaggtcatttttagccctagactggaaaggggtcaggggacaggtgacctgggctcagcccccagcagctcccaactgcccctctcccaagcaactcctgatccctgcttttgaggaaataaacaaataaaaccccgctatctccgaagatttttctttaatgaaaaggattcgtttttccaaattctatttccaaagccgaggagattgccgggctggagcgcatcgttggtgacgcttgcccgtcggaccctggcagcggctggaggaggctcagcccatcggtccgtccggaggggcttgcgggaggggttggtttgtttgggatttaggggttggttgaggatttgttttgtttaggtagggagtattggggtgataagttagaacaactgcgaaacgagttagcgggcgcattcggccggcctcttctttcacccccgacttcatgcggcttgggctgagggcggaccacattcggccccgccgctgcgtgccggcttcgttccggccgaaatttgaaaggaggaaaaacgacgcgatcgactgaaggaccctgccggccgggactggtcacccgcagagaaggaagaaggacgaggatgcggatggcggcgctggtggcaggg

SEQ ID NO: 17296 - DNA, 876 bp, Artificial sequence
  DNA replication origin
cagcggagattcattacccgccgacacaatgaccattgatggccccgtggcgttattcaaatccagtaccaattgcagccgagcccctttctccgcgccaggcccgtattgttggagcggcccactaaaagcccgccccggccccgagccgccagaggcgcctgctcgggttcagccttgcgcctcggcagcccgccggctcccagtccggctccacgggcgctgcaggtgacccggcggcgcattccagcactccccgccgcccgggccaccgccgccaccgccaccgcaggcgccccggccgcgactcagccacaggaaagcggagagcgcccgagccggtgcgtgcgcggggctgggcgggggcgggggacccacgaatccagcagcccggaccccgggctcggaaacgcgacccggcctggggctcctgccttccggattcccggagatcccaggctgggggcagggagaggggagtcggggttccccaggccagacagaggagattccccctcgacctggggcggcgctgagacccaacgcgggccactctgcggactccgggccgcgatcgaaggagccacgccaggggcgatggggatccccgcacagggtcaggatccgcgtgcttgctagtccaccttaccgccggatgggcagccgctgctgagcgcctgctaggtggtccgacgcgcagctccgagctgtcctggactggcgctttttaggagcgaaggggaaccccgcaggagaccagggccctgaactcaggggcttcgccactgattgtccaaacgcaattcttgtacgagtctgcggccaaccgagaattgtggctggacatctgtggctgagctccgggcgcaacagggg

SEQ ID NO: 17297 - DNA, 1775 bp, Artificial sequence
  DNA replication origin
ggtaaggtggactagcaagcacgcggatcctgaccctgtgcggggatccccatcgcccctggcgtggctccttcgatcgcggcccggagtccgcagagtggcccgcgttgggtctcagcgccgccccaggtcgagggggaatctcctctgtctggcctggggaaccccgactcccctctccctgcccccagcctgggatctccgggaatccggaaggcaggagccccaggccgggtcgcgtttccgagcccggggtccgggctgctggattcgtgggtcccccgcccccgcccagccccgcgcacgcaccggctcgggcgctctccgctttcctgtggctgagtcgcggccggggcgcctgcggtggcggtggcggcggtggcccgggcggcggggagtgctggaatgcgccgccgggtcacctgcagcgcccgtggagccggactgggagccggcgggctgccgaggcgcaaggctgaacccgagcaggcgcctctggcggctcggggccggggcgggcttttagtgggccgctccaacaatacgggcctggcgcggagaaaggggctcggctgcaattggtactggatttgaataacgccacggggccatcaatggtcattgtgtcggcgggtaatgaatctccgctgtctctcgggctggccaggcagctgcaacctgcgctcaggcagctcttaaagacatagcgtgcccctccccgggggccgcctccccctctgcaccggccggacccctcgtcctcccacccccactcggcaccctcaactcccgatgccccgcctgctccctcggcctgacccctttgcccatcgccccctcccttctcctgggccaggcaccagcatcccggccctgctctcccgtggacctgactcaggccccggccttggctgagctctccaagagcacccagggcaccccagagtcttttacggcccaccccctgtctcccagctgcatggaaaccaaaggcctctggagccccctccctaggcccctgcccaggggcttccactggagggtgagggggaacagtctggaagtcagagggtcaccccctgagaagaccatgctgaaggataaaggagaagggggtacagtccccacccctgggctgaggatgccatccctggagaccacaccccacgcgggagctggagcctgccccctcccccgaccaaggaccagagcttgattcccaggctccagcaggctcctgggtacctcggggctagcagcaagggtggggggaggggagcaggtgggtgtgagaggggcgtggaatctgtgaatgcttgtcttgtcattgtctcttccattggacagtccacccatccaggagagcaggggctctgtccaaggtctaatgcgcccccagccccacccccagcctggtctggcagagacggttctcagtctattgggtaaatacatagccagcttctcacccccaaagcccagcctgtctttcccaatgaacctcacaccctaaagtgggagtgtgtggccatttttcccatacagcctgccttccattcaccccagagttctccaagcacccagaatacccctgcctctgtcctggcacaccaagctgccttgctctgaaatgctctcctgtcctcacaatctctgggtggccttgccacgtgcccggctgaattgtgaatatcggtttgtctgagtctcctccctaggacaggaaacgggtcctacggatctttgtgcctccagggcctagtacagtgccctcc

SEQ ID NO: 17298 - DNA, 1609 bp, Artificial sequence
  DNA replication origin
tgatgactgcccacctcaagtcctcccctggtgtgcctagggtgtggggcctggcacccagtcctgcctggcagagcctggagagaagtgagccgcggttggtggagtagtcgcagcggcccggcgcgttctcagcccggctctttgtctgctgctttgtgatggtaagtgctgctcctaaatcagttctgtgacactgttattgttgcccagggcgcaaagagtctaaacttttcccctgaggtcaagaatgtggctggtccccaagccgcccagagcagaggcctgggtggctgggggtggggatggggcctcgccccgagctggggcgagatgttggggggagggggtcagcgggaacaaaacgctttgaaatgcctcctctccatcactgccaacattgtccgctgcccgcggggggcctggcaccgcctcgccggggctccggcccccagccctggccaggcgcggcccgacatctgaaaatggacagaaggttattgtcccttcccgcagccctttgtctgccccagttccagatgtctaggctgggaccagggaactgacccatggtgggcaggggggagaggacaaaaagggagagcacgggtcactgcatcctgaggggtcgttcccagaccctgagatcccacccagccacagccaagtcaccttctgggttgtcttagccctgagattgtccctgttcccctgtcccctccctactccaggttctggcctcgagagagaaggccctaggggtacaggagtcagagcaggggaccttggcagactcacggacggggctgaatccagctccacccggtaactgtgtgatcttggacaggtgtggccctctcccagcctgctttccccatgtggggaccacggaccaggttcattcacaggtaatgatggagccctcctacgtaccagctctgagctgagcatgggggcacgcggtggtgcatgggccacttggatcctgcccttgaccattgtggttaaatagaagagtaacaggcagcatttcccacccactacctctgggtcaggtcctgggctaatcacttcatctgcgtcatctcatcctttccataacaaaatcaaagatgcagaggcgtttttcctgtctccattttgcagctttggagactgctagactcttgagaggtccagtcacttgcccaaagccaggcagtctggaggcagcagagctgggattctagcccaggccgaccgtagccaccaggaggagtaattcgctaataaatacttggaaagaatcgagcacagaacctgacacagctccagactcagaactggtggtgtttactccatgcatagagtgtccccattccacaggtggggcgactgaggacagggagagaaagcctggggcaaaaagctccagggaacttaaacagtaacaccaacagcagttccagagtcaccagggctggccagagtgagacaggcagacttggtttcaaaccccaaaccccaactctggatgagcttggcaagtgatttatttagattctccgtgcctcagtttcaaggtttcctcttctgtaaaataaaaatattcccaactggccaggcatgg

SEQ ID NO: 17299 - DNA, 1085 bp, Artificial sequence
  DNA replication origin
ctcatgcctgtaatctgagcactttgggaggccaaggcaggtggatcacctgaggtcaggaattggagaccagcctgaccaacatggtgaaaccccatctctactaaaaatacaaaaatcaactgggcatggtggcgggtaatcccagatacttgggaggctgaggcaggagaatcgcttgaacccaggaggcagaggctgcagtgagctgagatcgagccattgcactccagcctgggcgacacagtgagactccatcgcccaccgcaaaaaaaagcacttagcagatgcctggtacacagcaaacggttaatgatagctatgattattattctgaataaggttaacatttatccctttgagcctcctgctgggttcacctgaggacaaggctctgtggagtggggcgggggttaggagttgttgaggggggtggggatagcaaaacttggtcttcttggggtccctagaagtcccgagatgggctagttctgtgggtcagggggaagcagaaggtatcagggctgagagagggaaggggctgcctgggcccagaggagttaacagctcccaggacctggctcaacagggctgccacgctgcagccacagcaacgattttagcggaggagccaggactgcttcctgatgggcaaaacagctggctgcccagagaaaacagctggcctggtcccagcctcctgagaacagaggcagagcctcagaggaggacagctgcacatctgggatcctgggagaggagggcatggccaaaagggagagagagggtggtccgtggaagtgtgtgtgggtgttgggtggacccccagaatggggggagctgagggcagattcctcgagcagagaccagggtgcgctaagtctaagcagaatgggcagagatgcctccagctgggctttgagggtgtcagtcttccctcaaataggaaagatgaggggcaggggaggatattggggacaagcctctgctcagccctgggtcctcttggaaccgggcttggagccggaggtggggagggtgtccaagctgagctcctggattcccatctgccgaactgcacccag

SEQ ID NO: 17300 - DNA, 1730 bp, Artificial sequence
  DNA replication origin
agttttctctccttggcccggggcaccggagggccagggcccggggacccgcgccagccgcgaccctggagcagccccgcccggctggaccccggaggggcgacggcggaggggccggaggaccggacaggggaggggtgctaggacgagtgcgtcggggccggccgggcgtccgagaacagtaggggctcatggaacccctgggcgttgaacccccggaatccggattccccggcccacgcagccgactcttcgacctgagccgcagacccagaggggcggcgcccactcggccaccacctcccgggcttccccggctcccgccccatcctccgccccgggcgccctctggcggccctggcgctagctccgcagaccagccgggccacgcgtgggccggagacccagcgtggggggcgcagagggagtccccctgagctgggcgcgtcctcccgcggcggtccgctccttaagtcccctgtgcgtcacctccttgcgtcggtcgccagcacccgcattgcttcggccctttaagagagcacagccaggccgggcgtggtagctcacgcctgtaatcccggcactttgggagaccgaggcgggaggatcacctgagatcagttcaagaccagcctggccaagatggtgaaatcccatctgtactaaaaatacaaaaattagccgggcgtcgtggcgggtgcctgtactcccagctacttgggaggctgaggcaggagaatcgcttgaacccgggaggcggaggttgcagtgagccgagatcgcgccactgcactacagcctggatgacagaccgagactccgtctcaaaaagaaaaaaaaaaaaagagcacagccctcacagccctctcttggtctgagtgtagaactaggggacaccacggagctgctcactgcgacccgacccgtccgtcctccaaagcaggggatgttggctcccctggagcaccgccggggtccttaggaccctgctgggagggaaagaactctgcagcctctcgggagaggagcagaaaagggagcggcctggcggcaccacagatgggatcgaactgggtgtctgtcaccaacctcagacaggtccctttccctcaggagcctctcgggtaaaatcgggctgataacgccacccatctgggagggtttgcagggattcctcgagagaatgaatgcactggcagcttttcccgcgtggaggcttacacacaggaagagctccgccctggggctgggaagacaggactggaggagagggaggctcccccttcaccctcccaccgctgggaagatctcctttcctaggaacagcacggggtctcccttcagccttttcccagggtcagggaggggagccagggctgtgcacactatctccactgcaaggggagggctgaaggtccatagaggaaggaacttacctagtgcaggggcagcacgtgcgcactgaaccctggagtcctgatctctagcctagctcaaagcctccaccaggatcgggtggcagcttccatttgaggccatttctaggccagcggccctgcaatgagaagcattctggagagatgccagatttcttctcccttgcacggtagtcccctgcgggaagccactcccagccccagaagagggattccctttctaaagcaaagcagtgttccctacttcacccaccccagagtcattccacagcctctgcctgtcctattggtcca

SEQ ID NO: 17301 - DNA, 1900 bp, Artificial sequence
  DNA replication origin
gaagagtcggctgcgtgggccggggaatccggattccgggggttcaacgcccaggggttccatgagcccctactgttctcggacgcccggccggccccgacgcactcgtcctagcacccctcccctgtccggtcctccggcccctccgccgtcgcccctccggggtccagccgggcggggctgctccagggtcgcggctggcgcgggtccccgggccctggccctccggtgccccgggccaaggagagaaaacttgagcatccacgcacaggggtggggagcaggatcccactctgagggtgcactgccccgccctctccgggtctgcctcggccccgcccgggccccaggccccgccccctcccctcggccggcccgagagctccgggggccgctgcagccgcccaagcgcccgccatgcgcgctgcccgcgccgcgccgctgctccagctgctgctcctgctggggccgtggctggaggctgcgggcgttgcggagtcgccgctgcccgccgtggtccttgccatcctggcccgcaatgccgaacactcgctgccccactacctgggcgctctggagcggctggactacccccgggccaggatggccctctggtgagagacccgggcattggcaccgagtgggcacctaacccccagcttcgcagatggcccccgcccccggcggccctgtctgctcgctccctgcccagacaccacctagacaggcccctcccctcacagacggccctgccagcccgagccgccagagaggaccccgagccccctgctgggagacgacagacctctgaggccacaggccgacgcgggacacccacccctccttctggtcccctactccttcctcttggggccttccctgggtgtaggttgggcccagccagcccttttcaccccagccttcagggcccagctcaaccccagtgggacctgtggttggctggatttgaagaggagcagacaggaacctctgaagtccactggggcccaacgtggcagggatcgaccacgctggaggcttccgggcacaggttgggggtgccatcagcactgggctccgggctgtgcaggggagtcagaccggcccccccaccgcccccgtgctggggccagctctcttggtagatcttggtagaggggcgggatcctgtcagccaagggcagtcccccttcctggagcctctcccctctggcatctctgtacccccagggcactgggatcgaaggccacaacccctggtctgtagacaccagaacagggaggagtccctggctgaggttgggggtaaactgagaaaaatgacaagccaccctcttcaacacaccacagttgggctgggggggtggagccctggcctggggaggccgcccacaattaccacagtttgggagtttgttagttcccacccctgtaagacttgacacgtagtcttcatttctggggaattggcttaaaggggcagcatcacccaaaacctgggcacttggctaaacccccacctctgttatgggggccccttccccaggagaggggaggctgtgccccatgacagcagagcttggacccatctgcattcttagggacgcttagagcatggtttggtccttattacaacctgggggtggaggaaagcagcagctcttctgtctagtccccattcagagagggacaggggctggcctgtggtcacacagccacaggtcacataggtaggtatctgcccacctaacgaaggtaaccagggaatgcaccaggtgtgatccttaaagtcgaggtacttttcatctttcaaaatgcattcgttggccaggtgtggtggctcacgcctgtaatttcagcactttgggaggccgaagtgggcagatcacctgaggtgagg

SEQ ID NO: 17302 - DNA, 1093 bp, Artificial sequence
  DNA replication origin
gcctctcacacagctaagcacttttttctgtcttcctcgtttcctctttgctcttgccttttcctccctttctccttcaccctctgctttgccttcccacaacctccttgtctctcttctccctctctttctcaccccttcccccttccagaatctggagcgcagcgggaatcagcataaggcagaagtggaggccatcatggagcagctgaaggagttgaagcagaagggagaccgagacaaagagagcttgaagaaggccatccgagcccagaaggagcgagccgagaagagcgaggagtatgctgagcagctacacgtgcaactcgctgacaaggtcgcaggcccgcggtgcccagctcctcacctgccctgaggagggctgggtgatggcagaggggtggtcagccagatgggtagcggggaggggtgggtggatgagggatggtagtggtggaaaggatagatggctggggaggagggagagggagttaaggggatcaaatgggtaaaagctggagggatgggtggctggagatgattggaggctttgtaggagagttcagccacatcagctttgtgggtgagaataatggttaaggaaggatttacaaacaggatgcatttgattgctagaaatctgggagcactagctgggctcccactgttgcttccagcgccctctagaaaggtgaattccagaatgaggtttaggttaccagggtgagaaaccacctaggatgagcccgctcccagctcctggcagcctcaccactgacactaggctaacaggcccttttgtcccgtgttcccaggatctttatgtcgctgaagctttatccactctggaatcctggaggagccgctacaaccaagttgtaaaagaaaagggagaccttgagctggaaattattgtcctgaatgagtacgtcttagagtaggagagggaatgtggcgctgttgagggacttgggtgtgcaggtgggaggggcctagtggctcagggaaggccacgtggctgctgtttgtactctccgggttgggggctgcactgggctgtgatgtgggtagccctgagctgggctttctggtt

SEQ ID NO: 17303 - DNA, 1747 bp, Artificial sequence
  DNA replication origin
cacgcgccacaaaagcagcggcagcggcttcccccactcagccgaatggaggcagccccgcggcccgcccggctcacctgtccgcgcgccggccccgccccgcctgaagagctgcccagctcccacccgggggtcggctgcccggggccccgctccctcccggagctccccggctgcccctctcaccggctctcggggggtgaggggcgtgggtgcgtcgggccgaggggtgctgaaggaccgaggagcctccgcggcctccgctccacaccgttcactccgcagcgggtagtggcggcgacgcgcgcgccccgcctcttttataagcggctacgcgcgctcccgcggcgggcgggcgcgagcgccgggggaagcgccccggcgctgcgcgaggggtgggggagcgcgccggcggagcaaagggggcggtgctcccgccggctcgccgcccgaccgcccggcggaaagggccgagcgatcccggaaggagccgaagcgacaatgcgggggaagaggtgagcgaggggcgggccgcgggaggatggggaaatggggcgcgcgcaaggggtgaggggtgatggtgcagtgaggtcactgcctacgccctggcggtagagacgctcccgcctcacctccctccccgcagcttgcgccccgccaccgcccgccctgcggacagtcgtctgcatcgcaccactccgccctgggagctcttccaggactgcggagaagggcggggcgggggtatcgctgcagtctggctggggatgctgcgcgccccggccggaaaaacgcccagtcccaaagggtgagatcacccgagtgcgtctcttcctgctcactttcccgaggaggaggctggcgctggggtcccaagtcagcctaattcggtgggggctggggtcaagaagacgcggatgatttggggccccgggtttgaggaggtggtgagaggaaaaggccaaatccgaatcagaaaaaaaattaagtcgactaatttggggcataaagctgtcattctgggatttggagagttaatttcttatgttcttggagattatgggggaggaaacggcagcggcaaaataataatttcttacattcctgcaacaaaagctttctcacaggtcgccagtggaataggctacattcatcctatttcataaacaagacattaaggttctttctggcacaattaatcgaacttgccttgtgtactaggcactatgctaagtatttcgtgttaccttttcatttcttaatctttgcaataattttatgagatgttttcccattttacaaatgggcactcttacataatgctcatgtaggctaagtctcttggcccaggtcaggcagctaccaattggaagagctaggatttacatctcagcagtcagaaccttccctttgcaaccgtatgtgtattgccttcaaataggaaagggaggcattttgatgcgggtggctgctggggtgcagaaagagaaaaataagattctcagaatttctgatacttaaagtcctagcagtttaaggtcctggctctaaactctgtagccagaagccctggattaggaagccctttccctatccccattccggtgacagctgggccgcagccactgggagtaacacccagatcattcctgtgcagtcaggcagacggggagctctgcagcttaggaaggcttcagcctcctggttaccaagcagctctcctctttaaataaatataaagtcattg

SEQ ID NO: 17304 - DNA, 993 bp, Artificial sequence
  DNA replication origin
agaggcggggcgcgcgcgtcgccgccactacccgctgcggagtgaacggtgtggagcggaggccgcggaggctcctcggtccttcagcacccctcggcccgacgcacccacgcccctcaccccccgagagccggtgagaggggcagccggggagctccgggagggagcggggccccgggcagccgacccccgggtgggagctgggcagctcttcaggcggggcggggccggcgcgcggacaggtgagccgggcgggccgcggggctgcctccattcggctgagtgggggaagccgctgccgctgcttttgtggcgcgtgggctgcggaggagcagccgggccgaggctcggcgccgccgctggaatgtcactgacggggggagggggcgcgaggccgccgggtccctcccaaccacccccaagcctggctgcggcgcggccctgccctgccccatccggctgcggcaggtgggtgggggctccctcgtcgggatcttcgccagccgcctccctgcagaacgctccccgcaccgcccccggtcccttccctcggccgggagcgacttctgcagctcgttcttccgaatcgcaccagcaatgccggccagccgtagagggaggaagagcccggggagcccgagcatagcgtaaacggctctctgaccttaatttcatcctgcatggcgaatctctgccgtctctctgaacgcagaagggtctgagactggccgtctccttttctttccttgtaataaacatttttctttcttcctagttgtgatttgcttgtaaataataggtaaatgcagtgcttgcatggtatgtggctcaaatcaaataacttaatagcttagcgttcttgtttgtgtgtgtgtttcctgggactgggtctttcgagtcgagatacagtgtcaaaaattctaccataccactgttgaatgatagaacagtcttttgtttgaaagctgtccctgagaatttgattagacgctt

SEQ ID NO: 17305 - DNA, 893 bp, Artificial sequence
  DNA replication origin
ccttgcaggccctgggcctatccacacccagcccaggaaggctccaccacaaccctcccctatgagccagacctagtcaccagaacagtcaactctctatccagctccagctacgtctcccaaaatgcagccctcacctctaagtttaatggggggaagggcaggcatgaaactgctggttacaatgtaatgacaagagggtgaggcagcatgactctgggactcctaactcccaagtgttggggctcacagattgcccacaggaagtgactttccagcagagagctggaggtggtgcacaggtaaggagaggaaagggcaagtgggtgtctaggccccgagatcagagggtagagtcccaagaggtcaaggtgaagggtaccaccttgagggaggcctccaggtggggagtctcagaagtgtgaaccaggagaggtcggcggggaccgggttggcgggccagagaagtttctgagcacctggaggacgcggggaggcaagggaggggtttaagccggggagtgggccacgtgattggctatgctcaggctgaaggggaggaggaggaagctggaagccaagatgaggaggtggcagagattcaggccagagttgtgggccgccgtcggcagcaagaacagagagagaggtggacagatctgagagatactgaggtagaaccaccaggaatcggggatttggctggatgtggaggggtgaaggaggggcctcaggctggctggcagtgccccttgccaagaaagggagccccagaggaggaagtttgggggctggggagacaagctcaggggtcagtgttgagttgggggcagggatgagctcccgtgcactcccgttctcccagtctagtcccttctggttcttcacgcaaa

SEQ ID NO: 17306 - DNA, 1197 bp, Artificial sequence
  DNA replication origin
gggctcctgttcgcggaggggaggcggaggcggcggcggcgggcggctcggctccctcactcgcgctcggcgatccagccagctcgctgctcgctctcccgagccgcctcctcctccacctcctcctacggcgaggggcgggcgcagggcgcaggcgcgccaggccccgcgcggatgctccgcctccggccggggaggctcgcgccgcggcgccattggcctgggcggcgggatgagggggcggagtcgcggcgcggagacacagggcccggcgagaggtgggaggaaggcgcgcggcgacgcacggccgccccccgcgccgcgtcccctcccccgctctcccctctccggcccgacccaggacactggcgcgcggcaggccggtgggcggggcgtcgcacggaggcgcgggtgcccccggccggcgcgtcacgtggtgagcgagcggcttccctgctccgcggggcaccgggagcggggcgcccaccaccccgaaagtgcaggcccggcctcgtatgggggccccgaattccgcccggcctctcggcgccttccacttcgtggagaaagcagggggcaccccattctggatgccagatggggaactgccgatcggactcaaactcgggctcgtgtgcgaagccccaggctgtgtaatccgcgcgcagggccattcctgggttttagtccaagccctgcccagcaagcttgtacccttgagcaagtcacccttcctctctgaacccgtttctgttatgaaatgataaaggttacgacactgaagccacattaaactcgaagtcctgtgaaggcagggaggtaccacattagtccgcggtgcccagcgcccgcaagaatcatactgagcgttaagtgccagtttcagcagcgcatggcacggttatctcaccgaggcctcacaacagccccaagcgataggcggtgttctgttcatagagatgaaaggggccaacaagttctacttgagaggcaaagttctgaaccactaaggagggccaaagcattttgtttaaataatacttttcaagtaatgcggatgccccacattctgtccctccagcaccccaagacatgaaccataaaaagccagaaaaaccctgattagtagcatttgtttgtttgttttgagacgggagtcttgctctgtcccccaggctggagtgcagtggcgcaatc

SEQ ID NO: 17307 - DNA, 1024 bp, Artificial sequence
  DNA replication origin
cggcggccgcgctgcgaggcgggggcgctgcggcctgctcggcgcgggcggaggagacccccccttcctctcccccctccctcgctctcctccccctccctccctcccgagaagcctctctttattgtgctccgccatgatgcctcgctcccatcagccgccgccgccgccacatggtgcggccggacgcggccccgcgcccgacctcccgcgcggttccgcttcgcgcccggcccgcggcggcgcccccggcacccccgcccagaggctggccccggcggggcttctgcctggagctcgggtggggtgggggcgcggggaacacgcgggcggccgcgcgctgggccttggccggccgggaggatgctctggccagcccgggcgcactccccacgtggggcggccgccccgtcgcgccagcgtgcggagaaacctggcgccgcgaccagtgtatcgggggtcttggaaatggctaagaaagctggcctctgcctaggaggctctcggcaggggggctgccaatccgggatggttaccggaaatgaaccgcgcgatctggccctttcacacccacttagctttgtagggggtttgtagtctttacaggacaaaagggcacctattccagagcacacccccttttcttcctctcccttctgtgcctcactgctttccgatctcatagttgctcccagtaagtgctccaaagtcgtgtggggccgcatctgaggtctgcccgcctgaattgggttggaggggttcatgttctgagaaggcgaaggccagggtgtaggatggtgccccgtgactttccagtctttgtaggcgtgcctggtatcttcatcgtaatagcagagtcgtcaactttctatgaaaggtggttttaccttgataggtggtagtggtggcctaatttgtatcattgtcatgggtttagtttccatattctagttagcagctgctactgttctcttgcaagtgtataatgtgaaataataaacgtgaagacttctgaataaggtta

SEQ ID NO: 17308 - DNA, 950 bp, Artificial sequence
  DNA replication origin
ggcgatgacagaggctttctcgcaccccccgggcccgcgcgcccctcccacgccgttcacctgccgcggcgccccctcctccatggcgccgctccggccgcttggggcccttctctcagccactccggtcccggaagccgcagaccctccgccaggactttcaaacttgaaacttcccgggaagcggcgccggagacgcgggatcgggcgccccctcccgagacccgctggcccgcgggaccagcgccgcctcccgtccgcgccgatccagcgcccgggaccccacgcccgaggtcccgcgccccagcgcctccctcggatccaaaattccgcgggattctgggcccagtacccgggcttcggcgcctgcggttcccgctgggcgtgaccgcgcctcacccccggtttggacgctcaggaggcacatcgcccgcgcccaggtcctctggccttccccgccgcgcgcccgcgggagccggccagttagggacagggatgggggaaacagcgccccctgaaggttgccgggtcgcccagccgggtgcagccggtggagctggccgcctcctctaactttgagcccctctacaacctggctcccgcctctaacgcgctgggcctcctcgaccaagcccctcaagtctctctttgtctcgcacgttgttggtgtaatgtgggctaatccaaaattgtctctctcctcggagtggttggcccagactagatattagtcactacaagaatgtatactaggccaggtgcggtggctcacgcctgtaatcccagcagtttgggaggcagaggtggacggatcacgaggtcaggagttcgagaccagcctggccaacatggtgaaacccccgtctctactaaaaatacaaaaattagccggtcgtggtggcgggcgcctgtaatcccagctactcaggaggctgaggtgggagaatcac

SEQ ID NO: 17309 - DNA, 1283 bp, Artificial sequence
  DNA replication origin
atgtgcctcctgagcgtccaaaccgggggtgaggcgcggtcacgcccagcgggaaccgcaggcgccgaagcccgggtactgggcccagaatcccgcggaattttggatccgagggaggcgctggggcgcgggacctcgggcgtggggtcccgggcgctggatcggcgcggacgggaggcggcgctggtcccgcgggccagcgggtctcgggagggggcgcccgatcccgcgtctccggcgccgcttcccgggaagtttcaagtttgaaagtcctggcggagggtctgcggcttccgggaccggagtggctgagagaagggccccaagcggccggagcggcgccatggaggagggggcgccgcggcaggtgaacggcgtgggaggggcgcgcgggcccggggggtgcgagaaagcctctgtcatcgccccggagccccgaaccgcggccgcttcccccgatcctcccctcacccgcgccccttccctgcccctgccctggccccggccccgcgacgccctcgcagagcagacctgatctccgggttcggtggttcctggaccttgcacagtctccaaatcagtccgcggctgacccggagactgaaccccaaccagcccgtgagcgaggacggctgagtccgcagtgtgcgccaccagggtggtccccagagtgtccttaagtcggttctcctcggtggggctccaaggccgacgggaattagccgggatagaaaggcggggcacaggggcctgggggggttagaatgtgcgcgcagcggggggcgcagtctgtgcgcgcttggcagtggcaggagtccttcccggagcacaggaggcacgaggggagcgtagatgagaggggagcggcctcccccgccccagggcgggaacctttgggtacatagcgggttctagaatgcggagggggctgggtttcctgccagagctggcagtaggtgcgcgtgggcccggaggaccgaggccatgtctatctgctcctgaggagggagaggtggtgtcctgttccggagcgagtggttgggaggggggcatttgcggacaggagtgggtccccgcaaagagcggaaaggaggtggtgtgtgtgtccatgttggagttccaacccagggcagacgggaccatgggggtgttgcggggtgcgtgtagactccttgagcgcccaagccagtcgtttaggccgccttcagggctggggctcggtctgccccctcccacccccttcctctggaggtccctccgcctgttccagacgtagcttgtac

SEQ ID NO: 17310 - DNA, 1790 bp, Artificial sequence
  DNA replication origin
ctgccagagctggcagtaggtgcgcgtgggcccggaggaccgaggccatgtctatctgctcctgaggagggagaggtggtgtcctgttccggagcgagtggttgggaggggggcatttgcggacaggagtgggtccccgcaaagagcggaaaggaggtggtgtgtgtgtccatgttggagttccaacccagggcagacgggaccatgggggtgttgcggggtgcgtgtagactccttgagcgcccaagccagtcgtttaggccgccttcagggctggggctcggtctgccccctcccacccccttcctctggaggtccctccgcctgttccagacgtagcttgtacacattttccgatttcctgcggggctccgccctgcagcggcagctgggtgactcaggaccccggtggccgggcccccagctccatgggacctttgtttgctccggtctttggctctggccctgtggcctagggcggtcagaggatttcctgagcctcgcccttgccctctgacagctgggccagcaggccccgctgaggtctggggtgggggggtccctgagtctggggttgcggccccttccactgggctcaggagaagatggaacacagagaggtaagatggggttcctgcaacagcccgtgttgcggggcatcatgggttacccggcctgaggtcacctttggcaccggttggtttgaaatgctggcggctggaaaggaggtgttcctgttcctggctccaacctgggtgaagccgtgagagagccttctacttcctcccgggagctgagcagggagtgggcacccggagacctccccagttcctctctgtgcctctgctttgctacctgtggcattgggacatcaggggaacaagccctggctcccaggcccctggctgccttctcatgtggcttcgtgtgaacccctattcggcgtagcttttgtggctcctggactctactttgggtcccagatgtagagagagcagcctgattacccagggctgccagggacagctggggcccgagagatggtggcccctcctctgtgtcttgactgtgggcaagttacttcacctctctgggcctcagtttcctcactagaaaataggggtaatagtacaggcgtggtggctcacacctgtaatcccagcactttgggaggccaaggcaggtggatcacctgaggtcaggattcaagaccagcctgacgaacatggagaaaccccgtccctactaaaaatacaaaattagccgggcttagtggcgtgtgcctgtaatcccagctactcaggaggctggggcaggagaatcgcttgaacccgggaggcagaggttgtggtgaaccgagatcgtgccatggcactccagcctgggcaacaagagcaaaactgtctcaaaaaaaaaaaaaagaaaaagaaaaagaaaaaagaaaatgggggtaatgaccaccgctaccgggtggggtggctgggaggagtgatgtggtaatatatgcaaagcacttagaatagaacctggcacccatttaccgtgtgaactgtcccccccgccacatccttctctaacgggcggaggacaggagcctggcctagatgagtggcctcggagtttccatctggctcaggcctgagctctaaggggagagaggcttccaaaaccctgtgcgagtcagtcctgggtgccgtcccttccttcgcctccatctgcagtgagcaaaggctgctggtggccgctgcaccccatggctgttctccaccctctgctttccaccggctctg

SEQ ID NO: 17311 - DNA, 948 bp, Artificial sequence
  DNA replication origin
gctgactggctctcggggtctgatttactaaacccacattattgagctccagctctatgccggcttctaggagtccttactgcagggctttttcgagcccataggtcgggacagcccaggactgggcatgggaggcttggagtggctctgggtaggggcccagccagtgccctaggggacttcatataccctctcttcctttgcaggaaaccccctcggcttcaggacttccgctgcttagctgtgctgggccggggacactttgggaaggtagtgggctgaagagggtggtatgggacgggattgggggcctcatcacatgagccgggaggacctgatctgtgggggcggtaaaggctccctggtctggcccacctggagcacaacctctctctggccccaggtcctcctggtccagttcaaggggacagggaaatactacgccatcaaagcactgaagaagcaggaggtgctcagccgggacgagatagagaggtgtgtgggggtgccgcagggcacccaggatggctggcctgggctgtggcatccagagggcagttgaaggttcctggggctttggagaggtgaccccgtggggccagccagcctgcattctcttttggcacctgcagttgttaactgtgtttccttgggcaggtcccctcttctctctgtcagtttgctctactgtaaaatgggggcattggtggctgtgcacgttcagagctccttgtgagcccctgacatatagaaaccatcactctatggccaggcgtggtaactcatgcatgtaaccccagcactttgggaggccaaggcaggcggatcacttgagtccaggagttcaagaccaatctgaatcacatggtgaaaccccatctataaaaaatagccagacatggtggcatgtgcctttagtcccagctacttgggagggtgaggtgagag

SEQ ID NO: 17312 - DNA, 2478 bp, Artificial sequence
  DNA replication origin
ctgcggtgcaggggacaggggcctggtgctgggggagggcaggggagcccttccctccccatgccgggtccctgggagtcctggctctgtccacccctgtgggagcattcatcccaccctccctctacacccgggcagcagcacccaccatgccaggtacaggccccacagaagcaccaccagctgcagcgccaggtagaccacaaagagtgggtggttgcgctctcccacacagttctccatccaggggcagtggtggtcgtagcggcggacgcaacggcggcactcacggcagtgccgagccctcaggggctgctgtgggcatggaggagagtggaggctcagtgccagccctgctgtgggcccaccactgagggaaggaatcagggcctgattctggaaggccttcttggaggaggggcgaggcccaggcagtggggcaggaggaggtcgaggagtctcagctttggcccaacctctcccacgggtgtccgtgcatcactcaccagcaccaggcagtatctgcagcgccgaagagggatggctggaggaaccatggctgtctgctcctctttgagctcctcctggaatgaggggtggggtgtaagacagggtccccttgggagacagatggcattggcgggcagctcccctaggggccggcttagctctgggtatggagtttgggacccatcccatgcagaatggaggtgtggggtatggcggagcaccctggactgagggcggctgtgtatgtttgcaagtctcttccttctctggggcccagcagtttcctcactactgtagatggggctctaggggtggcaagaggagtcactgaactgctcccacaagagcctgcagcacagagcctggcatggagactggtgctggttgttaggtccctgttggtgagagtaggggcccctggttacctgaggctggggctgcacattcacgtagccagggtccatgagtgacacagcgaggtagagcagcagggagcccagcaccaggagcaggaaggtgaggggcaggagcagctccccctgctcctcccattgccgcagctctggagaggccggagagcacagtgaggctgggccgggtagaacaggagtgggtggggttggggtgcagttggaggtggggaagtgtgttcctggctgagcaaaggcctggagatgttggttccatgagtggctgtgtgtggccagcagttcatctgcacttttatctggagggtcagagggaaccatggaaggttatagagccagatctgttttggaaaacctcattgctaaagaaatggatcaggggaagcctgggggcagagaatctggccaggaggaagaagagagtcgctacaaaggcctggcaggaagtgagggaggaaggaatggacagggggctgctgggtcaagggagccagacctgactggatgtgggagagagggaagaggggtccagcgtctctggctctgcaatggtgagagactggttaggtctgaaatgcctgagagagatacagtgggaagggtgcagctggcaggctcagatgctgcagaggggcatacggaagggtccagcaggcttcagcccagggaggtgacaggattttggggaggtagggtgcagggcaaggagtgagggggcatgagaccaccagacagcagagtgtagacaaatcctgtgtcccttggttgtaagggggagcagagaagaaagggtgggttttgaggggggttttctgatacggagacctgagcaagtttttaggctaaagggtgaaggtggtggaggaggtctgtcttgggaggaaagccagaaggggccccagtccagaaactgaggctggaccgccatggaaggagggctggggtctgctgtgggggacagtgggggaggctgcctgtggcaggtgaggcgctgggtagggggctactaagaggaatgagggaaatggaggtgggtgggtgggtgaatctgtgggaagatgggagacaggccgcaccccatggagtgttctctggcctgagggtttgcctggacttgggcagctagtggccatgggggtgtggggggtgtgggtgtgggcagaatgccaatctttgcatctagttgagcctcctaatcgtatggataggaagatttggggtcagttcctgggaaggatcatgtgggtcccaggatcaggggacatggggctcaagtcggtccttggatctggtgggcaccggctgggtcctgggatggacagggcatttggcaatgatcaggaagatgctgggattaattagggatcaacggggtatcagacagagagcaggtggctcttggaatgatagatggggagagggcttcaggagctggtggagatcgggccaatcccaggatctccagggattaggcgggagacccagtgtgaccagaacgtctggggaagtacgcgggatcgggtgggtccggggtcgctcg

SEQ ID NO: 17313 - DNA, 1029 bp, Artificial sequence
  DNA replication origin
aacagagtgaggctctgtctcaaaaaaaaaaaaaaaaaaaaggtgggcattcattgactcttgcaaccaggggatgcagagtcagtatcagcttcagggacagccggatctagagggctcagacaatgttgttcagaccatctcttgctccctcctttagtgctgcttatccatctctatgtgtctttataagttggtctcattttctccagccacagacagggtaagccctctccgcccagcgtaaagacggctcccagttgccttatatcccattccttaggcttgagatccaaaagaatgctccttcctctcagcatctagacagtaatctcatggaaggcctgtgattggttctgcagagtcgaaagcccacagcctgccgctcgccatcctatggggtgaggggcagtccctccaatcacatgggatgggaagtcgattccccaaccaaaaaaaggatgttgagctgagaaaaacaacagatgtcagaggagtatcctggaggagctgggatggggccaatcagagggaggcggaggaggatgctggtatcagtgggaggtgctgtggaaaggcggggctgagtggagaaggccctggggacacagggaaggaggacagcctgcagcctccggtgaggaaagtccgcctgtaggtggtggctcacagcaggagaggcaagacagtcccgtgctagacaaggcgcttccattatttaatcctcccaaacaccttaggaggaagacactattgtaatcccccttatagagacagaaaacagctcagaggggctcagtaactcgcccagggtcacacaggtaggaaggggcagtgctgggatttctgactcccgcctaagttggatcacccatagtcagaatgtgcaccacgtacctccacttttctctcgtccgtttgcaatatctgagaatacatagcaaggaggtaaagctgtcaccacagagcaaccttgggcgagccttggccctctcgagactttagtcatcacatctttgaaatgggtac

SEQ ID NO: 17314 - DNA, 1295 bp, Artificial sequence
  DNA replication origin
ccaaggcagaagaatttttcttagtacagaacaaaatgaaaagtctcccatgtctacctctttctacacagacacggcaaccatccgatttctcaatcttttccccacctttccccactttctattccacaaaaccgccatcgtcatcatggcccgttctcaatgagctgttgggtacacctcccagacggggtggtggccgggcagaggggctcctcacttcccagtaggggcggccgggcagaggtgcccctcacctccgggacggggcggctggccgggcggggggctgacccccccacctccctcctggacggggcagctggccgggcggggggctgaccgccacctccctcccggacggggcggctggcctggcgggggctgaccccccacctccctcccggacggggcggctggcctggcgggggctgacccccacctccctcccggacggggtggctgccgggcggagacgctcctcacttcccagatggggtggctgccagggggaggggctcctcacttctcagacggggtggctgccgggcggaggggctccgcacttctcagacggggcagttgccaggcagagggtctcctcacttctcagacggggcagccgggcagagacgctcctcacatcccagacggggcagcagggcagaggcgctccccacatctcagacgatgggcagcgggcagagacgctcctcacttcctagatgggatggcggccgggaagaggcgctcctcacttcctagatgggatggcggcccggcagagacgctcctcactttccagactgggcagccaggcagaggggctcctcacatcccagacaatgggcggccgggaagaggcgctcctcacttcccagacagggtggcggccgggcagaggctgcaatctcggcactttgggaggccaaggcaggcggctgggaggtggaggttgtagcgagccgagatcacgccactgcactccagcctgggcaccactgagcactgagtgaacgagactccgtctgcaatcccggcacctcgggatgccgaggctggcggatcactcgcggttaggagttggagaccagcccagccaacacagcgaaaccccgtctccaccaaaaaaatacgaaaaccagtcaggcgtggcggcgcgtgcctgcaatcgcaggcacttggcaggctgaggcaggagaatcaggcagggaggttgcagtgagccgagatggcagcagtacagtccagcctcggctgggcatcagagggagaccgtggaaagagagggagag

SEQ ID NO: 17315 - DNA, 928 bp, Artificial sequence
  DNA replication origin
tgctgccccgtctgggatgtgaggagcgtctctgcccggctgccccgtctgagaagtgaggagaccctctgcctggcaactgccccgtctgagaagtgcggagcccctccgcccggcagccaccccgtctgagaagtgaggagcccctccccctggcagccaccccatctgggaagtgaggagcgtctccgcccggcagccaccccgtccgggagggaggtgggggtcagcccccgccaggccagccgccccgtccgggagggaggtggggggtcagcccccgccaggccagccgccccgtccgggagggaggtggcggtcagccccccgcccggccagctgccccgtccaggagggaggtgggggggtcagccccccgcccggccagccgccccgtcccggaggtgaggggcacctctgcccggccgcccctactgggaagtgaggagcccctctgcccggccaccaccccgtctgggaggtgtacccaacagctcattgagaacgggccatgatgacgatggcggttttgtggaatagaaagtggggaaaggtggggaaaagattgagaaatcggatggttgccgtgtctgtgtagaaagaggtagacatgggagacttttcattttgttctgtactaagaaaaattcttctgccttgggatcctgttgatctgtgaccttacccccaaccctgtactctctgaaacatgtgctgtgtccactcagggttgaatggattaagggcggtgcaagatgtgctttgttaaacagatgcttgaaggcagcatgctccttaagagtcatcaccactccctaatctcaagtacccagggacacaaacactgcggaaggccgcagggtcctctgcctaggaaaaccagagacctttgttcacttgtttatctgctgaccttccctccactgtt

SEQ ID NO: 17316 - DNA, 1421 bp, Artificial sequence
  DNA replication origin
caggatgagggaggcagaagcagtgacatcaggggcaggagaagggccgcccctccgtcgttcctgcagcccacaggcaatgaggttagaaggtggacgctcgagaccctctgccgagggggtctgccgattcctggccacacccgcgcttcccccttctgaggggcagaaggggcagcctggccaggagtggcccagccgggtcaggccccatggccccttaccggctcttgtgcagacttgacatggtgttgacttccggaccccccagccgcctccgccgcctgcgcctctgccgcctgcgctgccgccgccgccgccgccccccagggacgcggggctctgcgcaaaagcctccggcgggaaacacagccactagcctgcgcgttccaccgcctcagccccgccccgccccgccagtcacgtgccacccctcgactctcacgcttccacacggtactggcggctacggccggccgggttgagcggggcaacctcgggtctggtgggcgtggcaatcgcgggccgggagccccagcgccgccgaccctgcgggccaaatttgagaacccgccggtgacagcgcagactgtgtgtctctggactattccttgcgcttccctgggcctcagtgtctacttacgcaatatacctgtcaccctgtcgtcttccctgcactcacccccctgtaattaactactgcatgattgttacaggagtctcggcctcccctgctaaactgttcaggccccccagcttatcttggtctctgcagaatcctcaaggcctgtatagcagggactcgcatgaaccgccgtgcgcggcccaactttttttttttttataaaaactataccagcaaaccctataaaatgtaagttaggaagaaagaaaaaaacacaaatgatatcttaagaaaaataggctggaccgggcgcggtggctcatccctgtaaattccagtgctttgggaggacgaggcaggcagaccacttgaggtcaggagttggagaccactctggccaacacggtgaaaccccgtctctaccaaaaatgcaaaaattagccgggcgtggtggcaggcgcctgtaatcccagctcctcgagattaccttctttacaaaagatgtaaaaattagttgagtaggccgggcgtggtggctcacgcctgtaatcccagcactttgggaggctgaagcgggcagatcaccaggtcaggaatttgagaacagcctaaccaacatggtgaaacctcgtctctactaaaaatacaaaaattagccgggtgtggtgacgcacaactgtaatcccagctactcaggaagctgaggcaggagaattgcttgaacccgggaggcggagcttgcagtgagccgagatagtgccaccgcactccaatagcgccaccgcactccaacctg

SEQ ID NO: 17317 - DNA, 1026 bp, Artificial sequence
  DNA replication origin
gcggcggccaggtgaccgcggtcgaagccactgccgcggtagtcggcgttggtggcacggtggtacgcgtgcaccgagtcgtcctcgcggaagtcgcactcgcgccggtcgccgtcgccgcggagacgctcgggtcgcagctgctccaccacccagagcgcgccgcgggtgcgcgggtcgtagcacagcacgtacgactcgcggctcttgagctgcgccagccccggcagcccgtacttggccagctcgcccgggccgcggggtcccccgggcacagggggcaactcggctgccgccgccacgggcagcacgggcagccggcccagcagtcccggcgccgcccgcgcgtcctcccgccgccgccgccagccctcgacgaccgcacccagccccgcgcccgacgccagggtcaggccggcccgcagcgcccgcatggccggggagcgacctagcggcgggcgacccgcgaggctcttaaaggagccgcgtcgcgggatccaacgagggcacagggctgctggggccgcggacgatagcgtgacctcccttccactcacaaacactgccaagggcttgggcctcggaacccagaagggagcagcagagcccaaccgggtgtccccggcgtcctttctttgcgcatttaagacgccggtatgaggggcgtggcatcgtcgcctcagctcgcgattggccaccatcaggcctggctccgcacccgcctcgcaggccccctgctggtcgtggggtgggagacactctctcctctgcgcctgcgcagggagctcctgcttaatacgctccgcggaagggtcaagcactgtcgaaagcttttactgtcactgcttagtctcaccctctacaccgctcggagagtgagctcctagttcgcagagcaggcacagggccccaggtatatctggccctaggctatcctccatgacaccataaaataagccccgcaattctaccagattggcaaaggtttctttttttttttttttttttttgagacggagtttcgct

SEQ ID NO: 17318 - DNA, 1235 bp, Artificial sequence
  DNA replication origin
ggggaaactgaggctcaaggaatgaaagtcactccctgaaacccagggctgatagagtgctagccaccaccctctgtccctcccacagcccaggtgtcaaagtcttttctcagctcccaagagtcgaatgaaggaagagcctgtctccacctttcagagaggactgaggcctgtccccagccccacccagggtctcctgggaagaccagcccttccaactaccaacccgttccttttcccagtctgagccacaggaagagcctagcggggaatgccatgaatcgacctccatcctgagctctccaggcctgggacaatggaaagtggatagggggctgtcttcccagaaggaagctgggtcagaggttggtgccccatgggctccacccagagccccatggcagtctccatccattggtgccaggacctgctgggaacaggctgagagggtggttggcccagtgcacagtgcctggcactaacaacctgatcgtgggccaggtgtctgcctcgaaactgcctgaaggcaggcagggtaggacaatgtctggaggctcacggttttatagactaggggtccccaacccctgggctacagaccggtaccagaaccgggccacacagcaggaggtgagcagcaggcgagcaagggaagcttcatctgtatttacagccacccccccattgatcccacagcagcctgagctccgcctcctgtcagatcagtggcggctggagattgtcataggagctggaaccctatggtgaactgcgcatgtgaggaggttgcgcgcttcttttgaaaacctaatgcctgatctgtcgttgttgcccatcacctccagataggactgtctagttgcaggaaaacaagctcagggctcccacggatcctacattactgtgagttgtatatttcactatatgttacaatgtaataataatagaaataaaatgtacataaatgtaacgcacttgaattatcctgaaacccgccctcacccaccaagccgtggaaaaactgtcttccacgaaaccgcaccctggtgcccaataggttgggcgctgcggttctacaacagacagccttcttctgctgtgtgacactgtgcccgtcactttgcctctgtgagcctcagcgcctcatcactaccgcaggaggaaggtgaataacggtattatccccatttttttgacgaggaaagcgacgctcagggaggtgcccagggttcgca

SEQ ID NO: 17319 - DNA, 1493 bp, Artificial sequence
  DNA replication origin
taccatggaccaggccctggggaagcatgtgacatcaaccaagaggtcacaggttttgcagagggggacacaggtcatttgcccacagcaccaaggaactaggtgatgaggcctggactccatcccgagcctgtggattccagagtgagctgctcagcctggacctgttgcctctcagccccagccctctgcaggccagaaaaaccacggagcacacccagaggtgctcagttgcttccacctgagaggcagggctgcacaggagcaagagtggaggccctgggtcaggcagatctagattcaaactcccgagaagggtggagggaagtgctccaagcagagcagagactgaaggcgggagagcctggtgcaccgcggacctgcagggggaaggcatgagagctcggtgcactggggacctgcatggggaaggcgggagagctcggtgcactggggacctgcatggggaaggcgtgagagctcggtgcactggggacctgcatggggaaggcgggagagctcggtgcacctcggacctgcagagggaaggtgggagagcttggtgcaccgcagacctgcagggggaaggcgggagagcttggtgcactgcagacctgcggggggaaggtgggagagcttggtgcactgcagacctgcggggggttccatattggcagaacaagattgggtgggcatgccaagaggtgacagcagggagaagcgggggcagattcagggcctgctgctgcccatgggcagaggagagatggtcaggggtacccgacaggtctttggctgtggaggtggaatgaggggactcgaggcagggaagctgacaggcttgccaagaaaccagatgagtagggaactggtattgacccagagcctggggcaagcctggccctgtgagtggcagtaggggcctcaggtgagtgggaggttctgccgcccccctggtttccaccttacctgggcaggaagagtggccctgtgcagacatagacgttttggtagctgcgggtcaagctgcggctatatttctccaggttgttccaggcattctggttgaggtggggcacctggtaggagagatagggcttagcaggactgtggctgggacccttcctcctctatcagagggccgccccaggtcctgaggggatggacaggctcagagatatccagtgagacaagcggggggaaactgaggctcaaggaatgaaagtcactccctgaaacccagggctgatagagtgctagccaccaccctctgtccctcccacagcccaggtgtcaaagtcttttctcagctcccaagagtcgaatgaaggaagagcctgtctccacctttcagagaggactgaggcctgtccccagccccacccagggtctcctgggaagaccagcccttccaactaccaacccgttccttttcccagtctgagccacaggaagagcctagcggggaatgccatgaatcgacctccatcctg

SEQ ID NO: 17320 - DNA, 1754 bp, Artificial sequence
  DNA replication origin
gacagggctgtcggcccggcgagactgatgggagtaccagccttcccagcagagttcccgtagcacagcgtcctatgcctgaccccaaaagtgggtacacaggttccatgaggccaggacgaaggctccagctgcacgtggcttcccccgtgggacagatgcaagtgagaccccaaggggagagctgctgtgcccaccgtggtcacacacaaggaagtggcagaaccagggccctgggagatcactgagcgcacggctaaggaaccagaggcccggagcaggggtgggcagggccccctgggtcacccagtctgggagcacaggacgggcactagcacccatggttgactcccagctacactcatgtctcgtcgctgtggcaagaggccaagggggatgagaggaccacctccagacaaggcagccacgggcaagggtgggtgacagggcaagagtagcacccgcccctcggacagatcccaaggccccagtggctggcagtcggggaggcaggcgggctcacctccgtgcggatggtacggctaccctggccaggacaggtattgacgtacaggtcaaagaggacactgggttcagccacctccaggttggggtcagcatccgctccagcttccagaccctggaggcccccgaacaccacaagagcatgcctggcccatgtaagagggggtcacctgagcggccaccgaggccccacccagcacagcgcccagacctcagtccctccccaccccagacagcaggggcccatctgtgcagcttcacccaccaggcaggttcctggccacattcctcctgccctggccgcagccccaggaggtacacacctgaagttgggaagctgggcagaggccacatctgagccgcgctctgacgtcccgatggtcaggtcatacccatcttggaagggggcctcagcaaacacagcacctgggggtggggccagctcagtgcaggtcctgctccccacaagccatagctccgggtattatgtgtgtgtgtactgaggcgggggtgggtgggaagagctgtgtggtgtgtgtgtgtgtgtgtgtgcgtgtgtgtactaaggtaggggtgggtgggtagagctctgcctgtgtgtgcattgaggcaggggtgtgtgtgtaccgagcaggggtgggtagagctgttcctggaaagtcaaggactgagcagggcagacaccaagcctgtgcttggctggggaacagggcagagactggataggaagaggcaccaagaacatgaagtgggcctctgacttctctggcccttttgcctccattcccaaccctacagaaacattattgatcaataatgatacttttgctcagtagtccttaacagcattccaggcagtgcatccagggagaacaaggcccagagaaggggaaggacttgcccaaggacacacagcaagttgacaggacaaaaaccctggtctgatatttgggtcaggcaaggctcccggccacctcccagagggatggatggatattcagagaagtaaggtctgtccttactgaggcaggaagccagtcggacggtgtagccccagtagagaccagctttggtgcgagggtcctgcgatgataccactttgccatggtaggtcttgcagtctggaggggtaacagagtctgtaaagatggggtgagggaatggaagcaggtggctgaaccctggagctcatcaggccaacccaggggttggggaaccttccagatacc

SEQ ID NO: 17321 - DNA, 1068 bp, Artificial sequence
  DNA replication origin
aaggtggtgccccggagactccgggcactggggagcccagaggtaggccgaacaccgcgggaggtccccagggggccggcccggagacagagccccagatgccccgggcgccccgggccgggcagctggccgagggcgtgtgtaagtgggtttcgagaggtgacagctcgcgcccctttccccaccccgtccactcacctgggctcgccgcgcccggccgcccggcaggcagccccaggccccggccgctccgtcccgccgccggccgcagcgctgctccggcgcctccttttgtttgtccctcactgcaccactcagcctcctccgccccggaagtgacgtcaccgccgggcgcgaacgcggcggccagggcgtcgccatctttatgaggagaattctagcggcgctttctcccgctctcgcctccgcgctagcgccctgctgcttcggggcggaagtagcggagccgggctcggcccccttaaagggacagggactgctgcaacctacggggtgtacttgggaacgaggggtgaagcggcccaggtgagggtgagtagctgtgtcggagcgccacttccccaaggtcaggtgccgaggctgggagggtcggctaacggttccgagcttggttgtgctagagtgcttaatgagtttgatgctactaagtataacggagtggctgcacagaatgattgagccgcccgcgggaatcaactgcgcgtgctgctcgctgattctcgctcggacactggggctggtcctgtctgcacccaaatccccctcccacgaccgcgccggtggagatgatacccgagacaacagaattctggacagatctggggttggaattgggtccccagactccaactctgcagctccataaatcccgctgggtcctcgcaaattccctggctgataacagtaccggcaaccaaattaaaaaataatccatacagtggaatactgtgcagccattaagacgaacaatgtttaatatgcactaatgtagggtgacttctaagataccttaggttaaaaaaggaaacaacagtaaaaacagcgttg

SEQ ID NO: 17322 - DNA, 1647 bp, Artificial sequence
  DNA replication origin
caccttggccagtggtgaccaggaggggtgggcgtggcctgcccacgcccttgcgtgctgtttctccagatttatactcttgctaatgaaagccttgacaagacagtattcattcgttcactcgtttactgatgtgtgcaaattgttatgttttgtttgtttgtttttttggtagagacagggtctcactgtgttttctaggctggtctttaaactcctggcctcaaagcctcccaccttggccgcccaaagtgctggtattacaggcatgagccacttcgcctggcctttgtgcagatgttttttgagcacttctagaatccagctatggagcaaggcgccggggacatggggatgaagaaggccaagtaacgaggcagttagcacagtgcgtaggcgctctgctggagcaccaggtccctgggaacacagaggaacaggcccctgaagaacgaggaggaggaagccaggtggaggggaaagggacagtccaggaggttctggtggggaggagcagtgagatgggctgcccaggaatgtgggcatcctggagagcagaggtggggctatgggggggggtgtggatggcaggggggtcctgtcctacacctcagtttcaattgtctcttcatttgtttaacagccgatcccttgccagcccataggctctgatgactaagacctagctcttttgttcaagcaagtgtttaccgaattcctagtgattgagtgggtgaaggaatgagctgacttgcagcgtgaggttcctcttgcggtagtgtgtggggtggggtgagtgagaggtgggaggtggaagagagctgttaagagaccacgattagccatcaggtgaggccacggggcctggcgtggccaaggcaggtagggatggagagacatggacggatctgggagacgctggagggggaattcaaagggacgggagttgatggtgggggtggtctgagtgacttgagcttttttttgtggattgttgagactggaggaagcacaggttttcagaggccaaggtgtgtctcatgtcaggtgtctggggctctgggatgtccaagggaccatcttgaatccacctgaagcccaaggagtcaccctttccaggctcatgggtgaagatgggtccttgacttgctcactgtggagagcagagagggagaaggacaggagtctgcagaagaggagggcgaggccagagcgtggggcacatggggcctggggagttggctggattaggaactggtgactttggccagagagttaagggtggacagggtcatggaggcagagtgaggagagagacagcggctttcctgcagttggtcaggaaggccagagagccaaggacaacgctggggccctggaagcctcctgagagagttgtccttttcaaagatcaggtcgagttgaggcctttcagtgccgatggggacccactgaagtctctggggaggtaggagagggtgcaattgggggattgggaaccaacttcaagcctccagggcacgggccggcgacaatccgacaatccagcagagaaggatcggtccagaggatgggtgtggctgtggtgggagccgagcaactgagagtacctccccttttctctctggggcctggagagggctccct

SEQ ID NO: 17323 - DNA, 1065 bp, Artificial sequence
  DNA replication origin
aggccctcccgccccccaggcgctctccaggcctacgacgccatccctgcctcctgtctttaggggtctgtgaactccagaaaggcacggccaggcctcctcctctatcctcagggcctccccagggcctggcattcagagacagcaggaggtggaggggccctggggatgggacagctgccgccctgagttctccacactactcagtgtggctggccctgccgccagctccagcgttttgcagagggaaacaagtccagctccatggccacagggcaccggggccaggccgtggacagaggtgggggctgctgcccctccccagtgtctcaggactgacctgatcacatggcagtgcccccgccttacccaagctggcttctagctcctgtgcagtcagaggcagtggtgtgggacgtggggagagaggaggacgaggggtggggtgggggtggggtgcgcttaccgcggaggcgctggccgagagaatgtaattacgaggtctagtctcctgaaagtcaggcaccgtctggcggggaacagagttcatgtggggagggggtcaccctgggccagggccagggtcgaggtcaggaggctaccccagagtcttgcacaaggagatgccaagaggcctgaccccagggacggggatacaaacacaacacaaacccccttctcccgactccaaccacctggagatgaggggcctagggacttggagagtccagacaaagatcaagtggctgcaggcactggagctcaggagagcaaatgcggtgaggagatggccgaggctgcctgagcaagtcacaggctgggctctcccctgccaggggccacagccccctcctccccagaccagtggcactcagatgccccagggtcccgcaaacacagcccacccccaactgggatggctttttccatcccagaatccgcacaccacatctcttgctcctgcatcaagggccaggcccctcccgacaatgaaggtggacagatggatgcatgggcagacagagtgacaggcgtccaacatttgcaaaaagctgactcacaggc

SEQ ID NO: 17324 - DNA, 1252 bp, Artificial sequence
  DNA replication origin
atgtttactagaaggtgctgtgtcccgctgaggattagcatcccagcgagaattcactgcttaatgtgttccaagtctggtgggcagccccagccctagtggagatgccaggatcccagagcccctcggattggacggccccagtccatctgggaggggggaacccactctgctgttggtatggcaaccacactatctcccacatctgggaagaacctgatctgccagttccctgctagggctggggccctgctgcctgacctggccagggctctcaggacctaggcagggcagggcctaggtgtggctccgcttggtgggagctgccccacagggtcactgttactggagtgggagccagcagtcaggccccagcctcggggtgggagggagggagctgagagctttataaatagaggctttctctgctctgcacgcccaccccactgctgccattttcccgggagcagcctcggactccagcaccaaaccccttcctcttggcaggattggggcagagtggcaggccaggggatagagaggcctgaaatgtgacctggcaggagaggccacagaggggctccgcctgagaccaagctggcctggatgggagacagtcaggagggatgggagaggggttctttatgatcaatacatgtgatgggctcaggaacctcccagtccctgcaggtacaagaaacaactttaagagcctccccgatccagcaaggaacaaggccttggccctgagatgaggatccagagggcaggatcccttttgtatgggtcattctgggatggtctcctgcatggagggcccctgaactgtgctcagaaagtagggaggggctcatgatgttggtccaagtggcaggagcagcccagataagggcaccgaggcaagaaaacctaaggcagatttggacaagatgccagtgggggtgggagagggcaggaggagtgatagtactaatactattagtagtaattgcagtaacagtaatagtagtggtagaagtaatacttataaagtccagagaggtggtggcatcgtcatcatggagctaggcagactgcagtggacatgggatggatgccgtctagtttgggaaagcctggtagaacttctcacctgggcagatgtggcctgtaagggagggcggggtggggagtgctgctctgaaccttggtaaggaggggaggtgttgaggtgcacatttagggtgatgcccttggtaccatcagggtagct

SEQ ID NO: 17325 - DNA, 1456 bp, Artificial sequence
  DNA replication origin
gcgcggagggctggtgccccgcagcaggtgggcggggtgcggttggcggcggcggctgggccgggggctgccggctgcgctcgggccgtgcgcggcggccgtgcgggcacgccatggacttcaacatgaagaagctggcgtcggacgcgggcatcttcttcacccgggcggtgcaggtgaggcctggcgtcgcgccgtgcgccgggggcccggatgtgcggcgggcggggagcaccctgcggcagacgcctggggacgcgggaaagccctcccgggctgctgccctcgtccccgccgcggcacacctctgcccccctgagcccttgctgaccggaagagggaaagagcccgtgcggcccgagccgggccttggccctgctgcctggggcgaggcaccggtgcccaccctttgggctggttgggttaccctgctcccctggcgcctgcctggctgaggaggggaggaggcaccggctgggtgctacctccctgcccttgtccagcagtgactggcgcctggcggggcatttagcgacctgggtcccaggcccagggactcatgcgtccaccacaaccccttctccgagcctcagtctccgcacctgtgcaatgggcggctggtgccatgagtccctcatggccatttcacacgtttggatagtcaggccggaagccaggagttgtttcttttctgctccacgggaggtctgtttccttggtccctgggcctgggggatggagagagggctggggtctggctgggaagctgtccaggcccacgatgctgagattggaagaagtcctatccgtttaggggcagagagtaacaggcaactcaacatcatgggaagacctagggtcaggtgtgggtgggaatgtgccctcctgtgaccttgggggaggggccttcatctcactgggcctcagtttctcagtctgaaaaatgggatcagtattcctgcctcccaggacagatgcgaggattctgtgggactctgcatatgtgtgctcaccaaaggcaagctcattattggtgtcaaagtggttaatattgcacctgtgcagcatgtgaccttggacaagtcacttctctcagagccccgccctccccttctgtaaatctggtgtaacaccgtggttatgggattcagtgggattccgcaggcccggggctggcccatcccagggttctgggagcaggtcctgtagtcttgtctttgtcgttgtcgttgtcatcgttgttgtttctgttgagtacagttctctccccacccccaacccgggcactcccctccccaggagcccacacccagccagcaacccatgtagtcatgtttactagaaggtgctgtgtcccgctgaggattagcatcccagcgagaattcactgcttaatgtgttccaagtctggtgggcagccccagccctagtggagatgccaggatcccagagcccc

SEQ ID NO: 17326 - DNA, 865 bp, Artificial sequence
  DNA replication origin
tcaggggggcagaggtgtgccgcggcggggacgagggcagcagcccgggagggctttcccgcgtccccaggcgtctgccgcagggtgctccccgcccgccgcacatccgggcccccggcgcacggcgcgacgccaggcctcacctgcaccgcccgggtgaagaagatgcccgcgtccgacgccagcttcttcatgttgaagtccatggcgtgcccgcacggccgccgcgcacggcccgagcgcagccggcagcccccggcccagccgccgccgccaaccgcaccccgcccacctgctgcggggcaccagccctccgcgcacccgcctgccggcctgcccgcctgcccgcccgccgcagccgccgagccagcccgagcgcgcagggcggggcgcggaggccgcgggtcggagccagaggggcgggggcggagctggcggtgccggggcgggacgggacggcagtggggcggagctagaggggcgggggccgggctggttggcggaagccgggcggagtcggagggggcgggactggcgggacaggggcggagcgagagggcagtggggcggagctacatgggtgggggcgaggccttggcgcggccagagcgggggttggtctggggagcaggttgtgctgggcagggctcgctgctgggcagtgctcgctgctgcccccatgcgcctgccgccgcggattgggccggcctctttttttccttttactaaaattattaaaactggaacacatgtgctcttagatgattgcaggtacacgccataattacatattatttgccatcttaccaatgcttttcaaaagttttaattgataaatatatatttacggcctacaaggtgatga

SEQ ID NO: 17327 - DNA, 1431 bp, Artificial sequence
  DNA replication origin
gaatgacatgaaagttgatgaaggcaacatgtacatactggcccaagtacatgacaggatggcccaggtaggtggagttttgaaagctcccaggtgatttaatgttagagccattgacttgttgacccagaaccagggctgggagagggaacagggtctggattttgaacaagcccccaggtgacttgaggctcaccctgcagagccatgctgggataggtgacagaaactggggtaagtatagaaagatgaacaaagccagatagaagagggtacagcttgggaacagagctctccactgggttcaaaggtgaaacctaggccgggcgtggtggctcacacctgtaatcccagcactttgggaggcggaggcaggtggatcacgaggtcaggagttcaagaccagcctgaccaacatggtgaaaccccgtctctactaaaaatacaaaaatcagccgggcgtggtggcacatgcctgtaatcccagctactgtggagggtgaggcaggagaatcgcttagaccccgggaggcggtggctgcagtgagctgagatggtgccactgcattccagcctgggtgaaagagcgagactccatctcaaaaagaaaaaaaaaaaaaaagaggaaacctagaggtagacagcaaggagaggtgaagaccagtacaaagcctctatctgagccccaagggaaggcatttggggtcaggagcacctgtaggtcatctccttgcctggggctgtgaggagctggtttcaaggttatcacacatctgtgctcccagggcagctcattctctccaccctgacagtcacccaacctttgatctcctcctctcaccacacagggggctccaggccccagctccagaaccccctcccttcccgtgaccgccaccccaaccctcctccaatttggggaagccacagggcctcccaggctgacaaacagctgttccagcggtggagggcaagtcccaagcctgactccggctcagtcaccaaggtcagggcagaagagaggaggagaggtcagagaggaggagtaacgggaggaaacccaagggaaacagagtggaagaaatgggaatgggagggagggggtgtgaataaagagcggagatgaagaggcacaaacaggggagaggcagcaggcctgggtggtgggaggagaaagcaagagaggcccattttagagatctgttgcacatattggtgactactcagtcacttagtgactttgggagactgaggcaggcagattgcctgagatcaggagttcaagaccaccctgggcaacatggcaaaaccttgtctctcctaaagtacaaaaaattagcggggcatgttggtgggcgcctgtagtcccagctactcgggaggctgaatgaagcaggagaatcgcttgagcccggcaggtggaggctgcag

SEQ ID NO: 17328 - DNA, 821 bp, Artificial sequence
  DNA replication origin
ggctggacatgggagctcagtggtggacaagagacaggtatgtggtggcaccagggagctcattgtctggggagcagatacttaatcacaatcccctgtgatggttactctaatgggggaatgtgggataccaaggagatacctgggcttgcctggggaggtgaagggctccagaaagaaaaggggtccaaggccggatgtggtggctcacgcctgtaatcccagcactttgagaggccgaggcgggcagatcaccaggtcaggagttcgagaccagccagaccaacatgatgaaattagccaggggtggtggcatgcgcctgtaatcccagctactcaggaggctgaggcaggagaatcatctcttgaacccgggaggcggaggttgcagtgagccgagatggcgccactgcattccgagactccgtggggaggggagggaaggggaaggcaagggaggggacgggaggggagggtggtccaaacagcggatgcccagtgcccggcatggtgggactggtgagaggtctggcatggggtgaataggagactgggcagagtggctaaagggagtcggggatgttgttggggtccaggcggaatgagtgcacaggccagagtcattagtggggttgtctggcacaggggaggaggcgcatgggatgataagcttagacacccaggctgagggtgctgtaagtactgtggtaactttggaatataaaattagccgggggtggtggtacctgcccccaaatacttgggaggctgaggcaggagaatcgcttgaactcaggaggtggaggttgcagtgagccaag

SEQ ID NO: 17329 - DNA, 1588 bp, Artificial sequence
  DNA replication origin
tgcgcagccgccggggaaggagacgctgcccttccgcagcgatggcatcccgggtgagtatcggccccggccgagcccccaaggcgggcgggcagcgcggcagggccgggacttgagcggaggaccgagtaggcgcaggtgtccgggcccaacaggaccaggaaggtgtcggggttggaatgagtgggtacccgggccggggacggtgcgagagggtgccttgcttgggagcggaacgagaaggtacttgggtcagggaggtgatgcccgggcctggaacgtggcggggattggagcaggcgcgcaggtacccgatccgaggcggggagagcacccgggatggaaggagcaggcgtgcgggccgtgagcggcgccagagggtacctgggtgagtttcaatgatattccggggtgggggcaagagaagaaggggctgcccaagatgcctggggtggagtgagcaatttctgaagacggggatattgctgaggtccaacgcggggatgcccggtgcccggcatggtgggactattgaggggtccggcatggggtgaataggagactgggcagagtggctcaagggagtcggggacgttgttggggtccagacggaatgagtgagtgcacaggccagagtcattagtggggtggtctagcgcaggggaggaggcgcgtaggatgatatgcttaggcacccaggctgagggtgctgtaagtgctgtggtgacggtggaatgaggaggtgtccgcctaagattgtagggcacaagagatggctgcccaagtggggccaggccctacacagcagtagaagtgtccatttggtaggggaccttgccgtgggcttttcattgtggagaggaggtggaggggtctcagcttaggccctggaggacggacagggtgccagggggacggacacagtgtgggttgactggatttggatccatccctggagtgaagcaggcttgggggctggtgatgttacctcgcacctgcaggctctgcctcccagtggggacagcaggggctgctctggactctcccgcaaacagtgggcctcagtcacccctgtagcgtttatttgttcaggctcatctttaacaccatgtgggcttctcacttgggggcccagaagtcctacagttgtggcctggaaggagcagtggcagttgtagcaggcagaagctgggaaaccctgccacagccttgagatcccccagagcttggccgcttagtactcggtgacctcaggcaggctgcctcatctcagagcctccgcgtttccccatccttgagataaacattggccattgcgagggttctgagaggactggacccaaagcctgtcgtggagagcctgttctggatctggcctggaataagagcttgggaaatagtagctgctggccctctgatgttcttgtcttccctctttctgagacctgagccagcctggggttggggtgaagggtagggggacgtggcttacagtattaacctaggtcctgaccactgcagctcacgtagctcaattcacagcctcctgggcagatgtctctacccctgacaacctggaagcttcctt

SEQ ID NO: 17330 - DNA, 1137 bp, Artificial sequence
  DNA replication origin
atctggttcaggtgtctcctcggcttacaggtttccacagtcaagtgaggggccagtactgggctctcacggttgcatttcctgtcctttctcagccctgacctcactggactgtaatcggctccctatccctcccagtcagcagcggctctcagattcatggagtgctgagatcagcctgtagaaaacacagattcctgggtcacaatggggcctgggttgatccagtaggtctgagttggagcccaggtgtctgcattcttatgtgctctggtggttctgatacaggtggttacagccaccactggagaaaccctgggcaacatgaggacagggcctggtacatcctgagcctggtccagaccagacctagagcaagtgtctgataagtgacacgagcgcccctgaggtgagttgagaattacccaggaaatcccactgagagtggctctttctgcgagtggccaggccagtagagcggggaccgtgagctggcctgtgtggccggagatgatggcgactcagaacccaccaaagagcccagaaggcccactgccctgctgtgcgcactcccagcctgggctcgtcggggtcagctggcctcggtttcctcaggcactgtcattattagcctctgagaagcaggaggtgtgaggagcgggccgggagcttctcagaatagttccctgggacaggacagccatccatgatctgggccacattgccgctcccaaataggccttgggagcaaagtccatgaaatgcaggcctgtcagtgctgggagcctcccgagggaggatgaggatgaggaactatgaaatgagagggagttacccagggagggttttcctggcagagagaacagtgtaagccagtgtcctggggcccgcgtgtggctggatgaagtgggcaagagggaaagaaggggtaaggtggtggggaggaggcccacaggggcctgaccacccgaaactttgagggcactgttaatggtggggacagagggaagctctgaaggatgggtttgttgttgggtttggtttggttttcttgtttaaaatagaacattcagggcaggcaccgtgactaaacctgtagtcccagcactttgagaggccgaggcgggaggatcgctt

SEQ ID NO: 17331 - DNA, 1393 bp, Artificial sequence
  DNA replication origin
gctcatcctcgcaccactgcgcctgcgcggcgcgcgcgccggccgagcccctccgtggttcactatttgacagttcccaccccggtcccccggcgccccctccgcgggctcgagcaggccggagcgcccgggactgagaggccgtccctgggaaggcgtccttggagccgggaccgccttttacctgcaggatattcgacgtgggtgagggtcaccggccgccatgaagcggggagcgagcactgtccgtccgctgccatcttacccggagaccgggcttcttcgagcagccaatggggagccaggggggcggtggtcctgacctatcacgccggggaggcgccgtgcacccaatcggaggccaatataggtagcggcgcagccattcagcgtgcaggccgtgggggctggcccgagcggcgaatcagagagcggggcccctgggagccaacgagccgccccagctggcgcccaatctggggcgagcgcaggtaggcatctggccaatcagagaaggggagggttccagcaccgaacagggagcataacagccaatcagaaggtgaggctgcctcagcttgtgggcagggcgggccaatcaggcgctggctttgggggcgtgttgaactttggtgggagctttggttcggctgggacctgcgccctgaatgaaggcttccctggtaccccctgccgatccgcggtcttggggacctgcgcgtccgatagcgcgtgctcgaagaggagaggcaacctcagctccagggggtttgaaccgacccactttcagttacgagtaaactgagaccagagagcagagggggcttatttccctctgccccatactggccggcgaaagggcaagtcacacagagcaggcgacctttttgtcaaaagtgtgtggggcggggcgcgcagtaggcgccctaaacgctggactgaacagagaagcttaattgatacttaagagtggaagcttagctacagttaaggactccttcctcctttcattcatttaataaagatttattgattcagtcacgtctatgctacttaatgaggcgtcttgggagcatttcaaacaagaagtcggttttccacctacccctcagttttcccaagacattcctgcgtgaacagccacaccttcccacccgccttcacctctcctacccgactctgtctctggctggattggattacagtgcaggtaaggtgggctgggagggctcagcctcttgtctcctgccgctagcatgtgctgtttttgtctgtttgtttgttttttgagacagggtcttgctctgaggcccaggctggagtgcagtggaacgatcttgctcagcctcctgggtccaagtgattctcctgtctcagcctcccgagtagctgt

SEQ ID NO: 17332 - DNA, 977 bp, Artificial sequence
  DNA replication origin
ttagtgcatcaaggtccaaattatcctaacgagcttaagggcaaagccggggatccatgaggaaaggggattggagggggttagggcaggcaatcctattagaggcagaaaggtcccagctggccccgctgatctctcactggcctgccccgcctcaccctgccctgccccgcctggccggcctccacctgccttcatttaccaaaatctcagggcacacctgttctgtgccaggctgtgtgctgggggcaagcacagtgacagccatggtcccctgctcactgtgttcacggcaggcagggaagagctgcgacgcacctgcctatgtgatcagtgctgtggcctgacagcttgtgtcgggagcctatgtggggacgtgggagctgggggtggggggaggtggggggggatggggggatggggagggtaggggggtgggagggtgttgtgggggttgggggaaacgttctcagcagagggaagggcatgcacaactcctgaagctgacaaagcttggtgactgcaccagacggaggctgccggggctggagcccagggagcaaggggtgtgttgtgggatgaggctggggacagatcacacaggaccagtcaggtttctagattttaactgggaccctagacaaaccccattctcctctactgagtctctgtcagcccctctagaaaatgggggtgattggccctggttccctcaggttcctgggctcactctggatatagccacagcccaaattgggtgctcaaatcccctcagtaacctccatcagtagttctcctgctttcgcttgcatacctcccggatggggagctcactacatttctgtacttctgttttgatcaataacaactgagcccacttgtgctgcctcgtctataaagcgaaactccccataactaattggaacccagccaggtccctcttgcctctgtagtctcatcctggtccctacccctgc

SEQ ID NO: 17333 - DNA, 2570 bp, Artificial sequence
  DNA replication origin
ctcactcacccagttctccgtcttcctggcccgacgctccagccccttctgcaggcgctcccctacacctcctgaggcctgaaactcatccaccagctgcttggtgtgggcccactcctcctcactcacgatgggctgcagcgccttcaggtagtggtccagggactgctggagagggggcacgggcagccgtggcagtgcatcctggtgtgccttgaagcggctggaagccttcatcaaggagaagggcttcaggaagcccagaggcttcacctgcaggtagcagaacatcctgttcattccctccccggctctggagccctggcagccccaaagctgtagtcctgggcacttaagtgcccatccctgggggcagagacggcctcttgggtggggctggccctggcctcccagccctagagctctaggtgtccccgcctctctggggcctggagatgcaggtagggatgggggagggtggggtgtggccatggttcttagcaaggctcaggggaaccaagtcaggatgaacggcacctttggggtggcagaggtgagggggaccgcccacctgttgggttgcacaggcccctcctttctcaccctggaagaggagccagccagcagagtggtgactgtccctcttggaggtccccacgtccttttctcccaccctttccaggttgagaaacagaagggaagaagagagaatcacagagagccagacaatggcagcaccttcgggtgaggggccttgggcttcctcctgcctttgagatggggcaggggtggggtgagggcagtgctgtggcgagagagccgggtggcctggcatggagggtgagaggcggcagagagagaaagagaaagtccaggaggccctggagtgggcagagacaggagggcccgaggctgctcttgcagtgggcaggcgagtggcaggagctctgttccataccttctctctctgctgcccgtcctcctccatggcaggactgaggttctgggccctgtctgtctgccttggctggatctctaagcctaactgtgctacaaagtgagtgagcagaacctagccagaggcagccacttgcctgggctggaaagagaagacaagagccaagattcagcgggaggcaggtggcagtggcgatggctgtggtggaatcgggggttgtggcagtggcaggggaagctcctggactctagaagctgctccaccctcccgagctcccagaagtagaggaatggggagcaggtgagagggctagtgggggggcattccagtagaagggaacctggaaagttctttcctttcttctctgcatgggctcagtgccagggagtcaggacaaaaggtaataaaaaatccacctgtcagaatctgcgaagatcgttttgatgagggaaaacttggctggaggacagagactgcctggccgctgaggttacaccacagccctgggatcggtcctgaaattagggttggtgcaagggagcagacaccaggaaaaggccatcagtggatgggacagccagaagccctgcctatttcctgtttctctccaggactcctgggacccatctgagccatccctctacgaacactcattttttcctgagctgtggctcattcagctagggtccaagagcggaggacttttggtatgaaaaataaaccaaaggacactgggattgggctggatttgaatgagcaggtccaggggactctgggcaagtccctccttgcctcagtttccctgcaggaaggtaaccagtccagtcggatggtcctggaggatgatctagaggctgtttgtgggatggatgcagcttgggagacagtgacaagggtgcggtggaggctcagggtgttgcaacacctaaaagagcctctaggcctgagcctggatgcaccctccgccctctggccccgtagtgtgtgtctgagacagagtgagacaccagcaacatatgcttggatcagggacggaagggactgaaattaggctagcatccgggctgctcaccggggaggactgaggggtagatatagccagggtggggaagggggctagaggggaggatatagccagggtggggaagggggctggagggaaggatacagccagggtggggaagggggctggaggggagggagaccatggggctgccacctgccagttctgaggcctttctagcttgatgcctccgcgtgtttctctggccacacacaattccccagggaccgtctgataaaccaaaggagtgtgaccaactggacagggtcggaggagtggctctggcctaagcgtgcgacgggtgtgtcaatcggagaataactgggagagtgagctagggtctggatgctcctggtctctctcccctaccggcctgtctctgggtctaagggtgggggtgctaactgaagccggggtcccccttgtctttcctgggtcgttggaactgaatgctccaggacgtgggtttaatcccgcttctgaccttgcgccccaatctcctgctctgccaaacctgggacgcccgcctgaccccaccccatcagctgg

SEQ ID NO: 17334 - DNA, 876 bp, Artificial sequence
  DNA replication origin
agctggaggccgggtcgaacagcggccgcaggacgcggtctccgttcccggacgcaaccgcacggcccgcccaggccgtccagggccctcaggcccgggatccgccgcactcaccacggtcctggcagcgaaggctaacatcttcgctgcccgtccgcggacacgcagtccgctccgccccacacaccgggcaaagtccgcgccgccgccgccgcggctggggtcggtgggtccttgctagagccttcgggccaaggtcgctgagttacagccgccagccggtagaggcagccccgcgcccaccctctgggccgagcgggctgcgggaaggcacccggggaggaggactcgcgaggcggggcctgggccggtagcgggccccgggcgggcaacggtgcccgggaggttggctgtggggcggggacggggcatcgatggggcggagtctccttgaggagggacaggaggggcggggacggaggggcggggcgtcgcccggtagcgggtcgcagtaggctggctgcgagtcgggggcgggaccacggcgggcggggacagaggggcagggccgagggcgagtcattgagacctgtggaggaggaaggaggaggtcaccgtccagctgtctctcccctgtccccacatgtcttctaagctgttggaggtagtggtgtgcacctttccaactccgtctggtgtccttgagcctaactcttagagtgataggaaaacacaaccatgttgaccggggaatgtcctctaatattccttgggttagggtcagtaccacccacaaagatgacaggtggtactccgggacaggagactgtcccggaaaaacatggctgagcacaacccaaacttgacgccccgcac

SEQ ID NO: 17335 - DNA, 1478 bp, Artificial sequence
  DNA replication origin
gtactccgggacaggagactgtcccggaaaaacatggctgagcacaacccaaacttgacgccccgcacaatcgtggcagtcgcggcgcccgacgttcgggcggccgtgagcggtcctagcgcttggcggccgttggcgcgcatgcgccccgcgcgccccgcactgacatggccgtcgcccggttccgcgcgtccgccgcgcgccggccgttaataggcttgctccctgagcgccccgcaccgacatggcggccgtcttcgctgtggtgactttaactctcggttttcggttatagccggccggcgctcacttgtcttcaggaagctcggagcctttggtggagccggggagaggaagggtgggtgcaagagtgaaaggcgagaggggactgcaagcatccgggtcggctcctggccggagcaagatggctgagggcgagcggcagccgccgccaggtaaggccggcggggccaggccgggccggggtcgggtagggtgggggcggtgccaggtgtgggaggctcaggagggcgagagtcatgacacggaggaactggaggggcaaaagctgaggggccccgaggagggactgagttgaatggccttaggggagaggtgggtggtggggcgccgctggggagggaaccaggggctgcaaaggggtggtgattggggcgcaactctgggttttgtgggagtccaggctgcccgaatgctgggtgggcagcgccgtggtcataagggggccttttgcatctctgggcagcgcgtgcttaagtaagctgctgactcggtggggaagctgccagggaggggggcgaaagtgattccggaggctgccgtctttattagtcgctgcttaggggatggggtggtgctccgtgggcctgcgcccgcctcgcctccagtttcggcctccgcgtcctgctcacccctcatcctcctactctctggttccagtgcctgagaatttattgagggaaactgcccgtggtgtctaaatccctaattttaaaaggctggttgtgcaaggaggttagtctctccggcatctccttcggtaactcttatttaccttgtagcctctttttagttcatcttaaataactgggatggaggtgctacggaaggatcttagagaccctttttgtgcagaaggagaaggctgtttgccgacctaccttgaactaagaaggactggccatagataacttttacattcccgacagaggcaaataggttggccgaccaaacacagctaatgttttgaaagcatttgatattcttgctatcctgtctccaatgttggggtccctgggaaggtctcaggagggagaaatgttgaaaatcagaaaaggcatcccctccatgccccacaaaagaggtgaacaaagagctgggttccgtttcttaggacattcaaaaccagacatttattttgtacaaaacctctgggtgtgtgcccttagaacaaggat

SEQ ID NO: 17336 - DNA, 1258 bp, Artificial sequence
  DNA replication origin
ttcctttgccagagttacaggcaaaggactgtaacctccctgaaggacttagggagaccctggggtactgaaggcctgggggcagcctgcagcccctccaaagaaactacctctctggcctttctgtgtgtaggggcccagggccactggagctccaggacatgggcctagccctggctctgccagaggccttttgaggatctgttctttggccctggtaggcgaggctggccaggaggcaggggctcttgtcttccagtgcccatctgcctgcctttgcctcggagcccttgccgggcaggcccctggcagacaaagccgacaaagccgacagggtgcctcctggttgcttgctcagagggccctgtccagagagtgaaactggttacacagctccatgctccctgagctttcctgggcctggaagtgtgcacagggctggagcctgcagactggggaaggggtggggtagggtggggaggtgggggaggggctgggggtggagtgtggttgagcagggcagttgaaacaaagctccccagaggtgaggcccctgtaggctcggggtgcctggctgccctcctggaggagagagcctggggtgattctgagtgaagcgagtggtccaagacaaggcccccagggaccagagtgggctttgtctctgttgggtgcctcgggctcttgcctggctgtggtggagcctgggagagaagaggaggggagggaggagcctgttgtccttgctcctgaacatgggtgtttggatgggctttttgggaacctgggccaggggagggaaatgagggggataaaatgacaggttttttttgacttaaatcttaaaagttttgtcacagttgcccttactagagaagtaagaggcctgccaggagtgggtcaccaggtggcagcccatggctcaagagtgggggctcctgagggctcttgtggtgaactgatgcccctttttggagagcgtttctggcttatcttttctccttcaaaaaataacccagtctcccctgacacccgcatgtttctagaaccttccaagtctctgtttctttgccagattcagcctctttgcagagtcttccttctgcagcatgggtctggggtacagagccctgttcccctgtaaatgctgcctatgagctggggggctgtgtcgaggggaattatgaactgcttggttaataaatacaaatgtgctggacttgcggtgtcagggggatatgctcaggcacacaggcgt

SEQ ID NO: 17337 - DNA, 850 bp, Artificial sequence
  DNA replication origin
tcccatcggccctctcttccctgcctgcatggcaggcagagggctgtcggatacctgggtttggtcatacccaccttggtcctcttgcaaattgaccctttcctcatctcttctagctctgctggtggcaggtgcagaccacgtgtcctgtgggggggcctgggggagagggggtgggcctggaggggtggggcctagctgctgctgctatttatctgaacccaagtgaatccctgtgctggagaggcgctctgaggctcctggggagtcggtgggaacgacaccagaagctcaggtggagatcttatcttcctgaggctgctggatttggtgggcgataggaatcaggccccctttttttggctgtgggagaaagaggggtgactgcgggtaggtgggcaaggaatgttatattttcctagcaggccttgagggccaaaggggaaccttgtctctggcacttgcatgtgcctgtttgtatgtttgcccctcaggcagatgctatagcttggtccccaagtgtctgcgcgtgcattgtgtgcgtgtgcgtttgtgtgtgtgtgtgtgtgcatgcatgggtgtgactttgctgcaggggaggagggatgagctcccagccagaacctgtctcttcagcttgtggcttctctttttcagatgaagactggcccatttgcagagcactccaaccagctgtggaacatcagcgccgtcccttcctggtccaaagtgaaccagggtctcatccgcatgtataaggccgaggtgagtgggggctggccagtgtgcccgtccctgctgccgcacttggtcctgggctggggacaaagcaaaagatgtggaacctggg

SEQ ID NO: 17338 - DNA, 1543 bp, Artificial sequence
  DNA replication origin
aagggtccttgacctttctcttggccttagaggccttgcatggactggaaagcctcagcccctcatcaccttgcgctgcctcaggcacacccgagttcaaactgagcagctgctgcttactcaccaggaagtagagggccctcatggttgacttctctctgagcctcagcttcctgatctgaaaaatgggcataatgacgttcctatcattggtcttgaggattccttcatttcacaaatagtggctgcatgttcctcatgactgcagtgcacccagatatgacagtgttaggtagccggtggattatggagaaaataacgtcaattagagaaggcgttgatgggggcagggcagggggttacttgctctaaaaggtcctgtgagctgagaccctgaggacaagaaagagccgctgtggagagctcaggcctgggcctggagggctagggttgggtataggggccagacttttaggccggggccttgcgggctctgctgagtttggacagtgttctatgggaaggtgctggaaggttttgttggggagaaggggagataggaccatttgggaggttgtagttgtgattgggcacagggatagtggcctgggtgagggttcagagtgggatggtgggaagtggtccaatttaggctgcatttggtgtcgctaacaggaagggagttatgacagggagccgagcagccaagaaccccaattcttggcttgtgtggcttggtgccatttcctggggtggggggccctgagggagaggaattgctgtgggggcgcggaactgcctgttagcttctaagaggaggtgctgaggatgagggcgctggggtgggctgaagaggatggaggtggcgggcatggtgacgaggcgtagtgccaaatgggtggaacatgcagatgagggagaggagagggccggcttctgcacagaggagggtggagtgtgggcaggggacccaaagctgcaaatacaaggagcattggccctgggtgggctttcgtggggtgggggaggggggagcagggatgagaacgcagaccgcaccctgtgaggtctgcttgtcatggcacaggcccccaccctaggaggaagatgtggagggatggtctgctgcttgaggtggatactgaccagacatcactcgcttctcttctgagtttcactgtggtgggagtggggacgggagagtgggcagggtggtggccaagggactgccttgaaggtgggctctggtcagactggcaaggggctgcctcctgctgcatgctgggaaggtccaggagagcgggaggttgaagggagcgaggtcctgagaaggtaccggtggccttcacggggcaggtggctgaggcaggatgctcgtttctccctgtgggaggaaggcagaccctgcgccggtttggcggcgggttgggctgggtttatttttacagggaaatgtaaggcatgaggggcagtgagagctccgaggacgtgggcgtgggcttctgggcaggatgggagcccactcaggccctgggagatgggc

SEQ ID NO: 17339 - DNA, 745 bp, Artificial sequence
  DNA replication origin
aaggtaagaatctgccttcaagaaacttccagcttactggggaaacagagagatggagaactagttgcaaaggagggcggaaggtgatgcggccgggtggactttaggtaagctctggaatactctgtggaggaggtggcgtgtgggcatcctctcacctgggtgatgggcgcagaccaaggacgtgctcgcggggccattgtgcacagagatgtggaggggtggctggcaggggacacagttgcaacagcaggtcggggctggcctgcagagggctttaacaccagctcgggatccaagacccccgccatggatgcccgtagcactccacacgtggccttgacacttgcctagcggcatttaattctctacaaaatgcattgcttaaggttcgtcttccctgctagaagatgagccgcaggaggccagggactgtctgtcttgcccactgctgtatcccagtgcccagcagagactggcacacagcaggcacccggaagcaggaatcagtggttcggtggggagttggtggggagctggggaagtatgtaactggtgcctctgtggtgtgtgtgagagatgaggattgggatttaggaaactcatgggcagctggctggatgctggtgatgggactgtggatgctggtgatgggactggggccttggcccagataagggatgttgaaggccccaagcagcacagagagaggccctgggctgggaagcggagggtggaggtggga

SEQ ID NO: 17340 - DNA, 1418 bp, Artificial sequence
  DNA replication origin
ggaggactccggcaaaggtagctcagccaggggtgcagagtttgaggagctctggtagacatgttgcatgggctgaatgggaggctggcagggctgccaggacccaacccctggtagagtggggaatctggggccaaagagattcccagaatcctctgctgtgccctgcttgttctccagcctcaggcccttgcccacacccttgctgtgtcaaggtccagccaccctggctgcctctcttcctcacactcctggagccgctgatcagtttggccctgttcgaagaaccctttaccccactgggcaacccctggtgtttctttggggctcagctgaggcttcgctccctctgagaggcctcgcctggccccctagatcggggctggtctcctgggcctgcttgcctgggtgtccccaccccacccagcactcagccacacccctgccgtagggacaccggggtctttgttggggaggggcagccagctggttagaatttggggtggtagggggctgtctgcagacacagcttctctttacttggggttccttggtgggggctgatggagattcacatgaggcaggctaaggcccaccaccttgcactcagcacctagctttgctgctcctgtgaggccagacacctcatctgtcctatttcctgctagccctaggaaggtcctgcagacactcggtacatatctgtgaaatggctgtgacagtggcaggggccctcgtgcagagcatgatacagacacaggagggggcaggtcagccctggagaatccgtggagaaaggaagctggtgccccgcctggggcaggtgagtggaatgggcagggagactgagtggccactgttgccctggtgccaggcagccagcaccggaggtgggtatggggcctgtgagagggcagttctgagtgctgtggagccaagcagaggagcagtgggctggagagaaaggagggtgaggttggcacagtggggaggaagaaggaggcaggtgggcatggggggcccctggggtacctgagtgccactgcaggcggagggcggagggagggagctgaggagaggaccagagaggcccaggtcagggttgagccgggaggatggcttgctttcattcactcagcaaacactgtcagagccctctctgttccagtctggggacaagtgctggggcgctgcggtgaacaagacaggcagcaccgtccctcctggaggattttccctcttggacttattccagcagaacctgggaaacactctatatgttcagcagttggggattgttagggggctggagggagcagtcatcctatgggctgtcagatgacgcgattatccatttatttgtccagaaagatgcggataatctgttattcgtggggaaggcagctgcaaagactgca

SEQ ID NO: 17341 - DNA, 1181 bp, Artificial sequence
  DNA replication origin
tagtgcctcacacaggccaagcaccaaatgggagcttcataaatactgtccactgattggagggagagctcctggtgtgcatcccctgtgccagagggacacacagtcacacacactgtatttcttgctgcacacacacacacacacacagcacccagcacccagatctcagtgccctgcacagtgactttcctgggagcctgaggcatccccacccctggcttctctggagggcagcctgcagctctgaggctctgggctgtcatcccagcagctccatgttgctgggagcgcagcttggagcctggctcagccctacaccacgtatcaagggcagccagacccgtggtgtcctaggagcctgggggagtgtgttggggggagctgcttaacctaggaggaccacggacttgctggagctcttgcttctagagctgctgctctctggaagctcccccttgtcatcccccgggcacccagtctcttctaattcccctacctccctaagcagcacccctaagtcctgtctgggggctccactggtctttttactggagggagagaggcttgtctgtggagctgaaatggactcctggtttgcctgcccgcctgaccccatccccctttcagacgacccccatggccaggcaaccccatccacccgcctcccggacccagcctctcacttgtgctatgcacgggaacatcggtctctctggatgttctaggctggtatgtttcctgctgcgccagtggccccagggattgtgagtggggtgaagatgcagcttaggagcaagtgttggagacagtgtgtggctgggtgtggccctcagtgtggggtgtagtgtagaatcaaggctgtgcagcctgttacagttttgtgtggaatgtcttggtgagacgggtagattgccagtgggttgcgttttgggtcaaggggaattatactcagggcactaaccctttgtggggctgcccaggtccttgggccccgagaagataagggaaggggaagggcacctctctttagggtgctcccagagcgccccatcccatcccttggcattgctagattccagtgtgcggcttaggctcagatcacccggcagaggggaggggagccctcgtctggggtcctgctgagttcagagatcttatttcgcaccccaccatccact

SEQ ID NO: 17342 - DNA, 1198 bp, Artificial sequence
  DNA replication origin
tttttttctttttattgtagtgattgcagtggtgtttagcgaggagcctaccacgtgagggagggctgctgcccggaggaggtgccgggcagccgggggcgaggcagggcgccctggccgccggggcgcgccgggggcgcagctcaggagggcgccggacctgggaagccgattccaatcagttgtcagacccgggaagcccgacgttccgctctcccgagtccctctgtggggtgaggaatgggtcttgtgaaattctgagcaaaaacaaaggcaaactctatctccgaaagggacgtttgggtcacatttcctctctgggggcggactccaaagttctcaaaatgagaaggcagaaatgaaaacacttcaactttttttttcttttcttcccggggcgggtgtcttgaacccctcttctccccgcccctctggctccgttctcctcccctcctccacccgtctcccggactcgggggtggcgcctgacaccccgacactctcggacactgggtaaggggtggggggcgggcacggcggactacatttcccatcatgcctagcactgcggtcctcactaaacaaaaaaggaagtcaattccttcacctggatccccggcggccccgggggagggaggggccgggaccgccgactgcgttggagactttgcactaagttcctggtcagctgtggtgtttgtgtgtgtgcttctaagttgcactgccttggttcagccttcggttgcatttcatgaaaccagcattgttcgagcctgtgagaaccccgtcctgtgtcttcagctcgatagatttgtttaatttaaaagccttttgttgtaaaaaggtggggttcgtctgcagcccctctggttctctgccatcagcaccgtgtggactccaaaacgagttgccaatccttcctttctcggcccttttccctcattaccctgtatttttgtgcatactgaattgtatatcaccgggtaaaactgttcagattgtttaaatttataatcttaataaaaagtcgattacagaagatggtggtgccttgttttcagatgtctgggggcgtcagagaggatagagaggtgtggggagagaccccgcccacccccatgtaaaccccagttctcttcggcctgggcgggcgggatctacccacatccgcaaggtcggcggtgggagaatggggggt

SEQ ID NO: 17343 - DNA, 1983 bp, Artificial sequence
  DNA replication origin
ggccccggccccagctatttagccgggtgcccgggccccgccccacatgagaagagccaataggagctctgagagtctcctgagtgacaggcgcagcccgccccggggctactcggctggccaatcagaccaaggcggttcctttgtgctattcaaataccgaacggaccccgggcctccaacgccgctgctgcctcgaatgttctcctggggctgccgcgccgcgcgggactcggagccgccggggccgcagtctgcagcataggtcgcctggcagcggccacgttgaagcccgcggctgccctcgccttaggtcccgggagccgggggtcggctcacctgagtgctgcggcgacggctcctcccctttccgcacggctgggcctcacctgcggcaggtgcgcgccgctcatcgctcccccagcggcgcggcgcctccacctgcgcacctgtcgcccccccgagtgacccgcgggagtcaaggcctctctacaggaggctggtggagccgccggcttgacactggggaacatcaaaggagcgaggttttgggggtaccctctaccgcagagaatgtagggcctgactccttgactttttggtcgaggggcctctgggaatgcttgcggaagggaagtcctccccatttgtctgacaggaaaaaccaaaacatcgtgaattttgaccttctctgatggagagagttccgaggccaggcatgacccagggagtgtgtggacctcgcgaccagctgaggctcaaaagcgtcctgggagccgaaacgctgagtgccctaatcaccagctctgtaacctttcctttcgtgcctaactaataataatgacaatagggactattattatgggcctaatatggggcaggcccttcccagcaactccccaatgcctcactctaacgtttgtagaggaggggcctgaggctcggaggagtggagtgacttggggaaccacacagttcccagggggcggagctaggagctgggacaggaccctgcgctcgagacgggaggtgaataccaaaggcccggggactcaccgacttaacttctgttgacacagctttccttcttatcctgaacccttcaggtcccagctggggactgagacagtgggagaagagagggacaggattgctgattcctgggggcgctctatctggaccaagaggcctgaagggggctggttgctgctcccaggggtttcaaaggtgcctggggtgggggctgcccagacagctctggaggctcttggaaatggtctggaggtttgcctgaggagggtccatgagtggatccctgaaggatgaacgaggtctgcagagtctcccagagataggtggaccttgtggggctggactcaggggggaggcccatgaccagacgtcctgctgcttcaccgcctcctcaggggatcttctgagtctctgctttttggggcttccttctgagttctcagcacctacttcatcccttggtgggagtggagagacccagtagcccaccctgtggtctctgggtctttctttagtcttaagaatttccaagatttctgcaaaagtttcttagcatctactccatgccaggcgttgagagtgaagacagagttagcgggtgtttacttcatttttccgatgaggaaactcggacactgacagcgtgagacttgcccaagatcacatggccccagggctggtgctgtgtccttcccttggccccctcgaacaatctcaaacgctttgggcccctgtgaccaatagcacctctccaggcctcctcccagagaagccaggattgaaatttcaggggacttcagataaaggatgtcctacctacattttattggtgatacagacctacaggctgtggaacttgctcaggtgataacacgtagaagtaaaaatacactgcccttcacttccctggtgcctgtcttaaaggcacacaaagactttatttatggccgg

SEQ ID NO: 17344 - DNA, 986 bp, Artificial sequence
  DNA replication origin
agtgcctgccccccgcccctcccctgccaggtgtcagggttaagcaagctggctgtggagacaagccagtctaaggtgcagtcgcttaccctctctgagcctcagcctcccggcctgtgaaatgggcgtggtaatgaaagtacctctgctgcagattctatcaggaggattcacagagatgattcatcaagcaaaaaacttagtggcgaggacacggcaagtactcaggaaataaactaaggagagggtactgggggccatcacccgggacacaagacagagagacccactgtgccacattctggggtcagttctgggagaaggccctgccccctcctcaaaccacgaggttccactctccccaatgcacatctctctccctcctcttctctgcccctttgaagccacaggccaggcgccctccctcgtttctaccctcctgaggccggcattgtgactgtgggcagctcacttagccccaagtgtgtgtgtgagtgcatgtgcgtgtgtgtgctgtgtgtgtacgatgtgtgtgtgccgtgtgtgtgtgtgcagggtgtgtgcgtgtgcatgtgtttgcatgtttgtgtgtctgtgtgtgtgcatgcatttgtgtatgtgcagggtgtgtgtgtgcatgtgtgtgggcatttgtatatgtgagtgcattgtgtgcacatcatgtttgtgtgtgcatgtgtgtgcatatgtggtgtgtgcagggtgtgtgtgcgtgtgagcatgtgtatatgtgggtgtgggtgtgcgcatcatgtttgtgtgtgcacatgtgtgtgcatgtttgtgtgtctgtgtgtgcatgtgtggtgtgtgcatgtgtttgtgtatgtttctgtgagcatgtgtacatttgggtgcgtgtgtgtgcatgcatgtttgtgtatgtgtaggatgtgtgcgtgtgcatgtgtgtgtgtctgtgtgtgtgtgtgtgatgggctagccagtgtggagtacggaaagag

SEQ ID NO: 17345 - DNA, 1091 bp, Artificial sequence
  DNA replication origin
gaatgtcggtgatcccctcccccgcccaccccgactttaagcgctgtccccaaagggccagacacacactcgacaatcaaggtgtggctaacggagaccgaaaaggttccagcgagatcaagcgttttaaagcgcccggggtgatgtttgagagaggagggtgggggagtcaagggtggggcaggatcccagccccgccccttaaagggtcccgggagtacgcgacagaactgtcctggggtccccggcgcagtaggattaattcaaaaggcctgcggagggtggaggtcccccaggggaggggtcctagggccccgtgagccgcgcgggcgccgggctgctccgcgaacgtccgcgccagcggctgcccgggggacagggcctgaactacaactcccatgatgctgtgcggcatggcgggcccgggcggggcgggcgctggtggctccgcccctcgcggccttctggggactgtagttctacccggaggggcgcggcctgggttttggggcgtctgggcattcttatcgtctcggggaaaggggagcctctgcggcccgcgaggaggaagggactgagggcgctgactgcctgcagggcggtcggtggctcccttctctccagcagcagcctctcccagcatcatttcccaacaataccagctgctacagtatttagtgagcacctactatgcgctaggccctgtgctgatctcttaaaggacaaagacagagacaggcatggttctttgctgagcacacagcccaggcagggagacaggccagggatgtttaatcacacaaatacataattacctgtgatgggtccaaaacaacaggggccacaaggacggggacttttggaaccaaggacagacacacagagttagaccacggaatggaatctttagaatttgaagggtgaattttatgggtgggttgggaaaattcagaactagccctgccaaccccttcattataccgatgaggaaattggcccagaggccaggcgtggtggctcgtgcctataatcccagcagtttgggaagtcgaggtgggtggatcacttgaggccaggagttcgagaccagc

SEQ ID NO: 17346 - DNA, 1544 bp, Artificial sequence
  DNA replication origin
tccgggtagaactacagtccccagaaggccgcgaggggcggagccaccagcgcccgccccgcccgggcccgccatgccgcacagcatcatgggagttgtagttcaggccctgtcccccgggcagccgctggcgcggacgttcgcggagcagcccggcgcccgcgcggctcacggggccctaggacccctcccctgggggacctccaccctccgcaggccttttgaattaatcctactgcgccggggaccccaggacagttctgtcgcgtactcccgggaccctttaaggggcggggctgggatcctgccccacccttgactcccccaccctcctctctcaaacatcaccccgggcgctttaaaacgcttgatctcgctggaaccttttcggtctccgttagccacaccttgattgtcgagtgtgtgtctggccctttggggacagcgcttaaagtcggggtgggcgggggaggggatcaccgacattcagtcttgagtgacacaccagatgaccccaccggagaggaggagggtggcacaggggcctgacggacctggggtatgggcaaggcttccaggggccggtgacattcagactaggcctgggttggccagggcaggagcagggaagggtgttccagtcagagggaacagcatgaaggagggcttcgaggctttaggggaagcaaaagaaggcctgggaggctggcaggcagagaacggctggggaggggccgctgggaggggtggagaggtgagtagggcccgtgggaagcacctggcgaagagtgtttctgatccccaaatccagtatgcgtgccgggttctcgggcagagtggccaggcggaacgtgaccagggttcagtggcagagcctggaaccagcctgggggtcctgcttctcaggccccggcgtgtccttaggggaaggggaaggagacttcccagggcagggctgcagcaagagctggcacaatgccatcctcagggggcacaatgccccctcaaatcccagaagcaaggggtttgaggagggagtatgggatatatggggaggagcaacatccctgctgcttggagggggaaactgagaccctcacagatttttgctgagtgagcttctgtgaggtccaagaaaaatcttttcctccccggcctctagctgtcaggagcccgccatgaaaaataggggagggtcattttcacaccctcccccattccagatgtggcaggagcaggaaggatttgtgccagatgttggggtctgcgggcccagcaagttgcctggggctctgctattgaaaagtgaaccttaactgggttggctgcgctagcggtgatggccgtgagatcctgggggatgtgctccgtggccctggtcatgtctgaagggagaggcagggagcccaggcctcactgtcagcagcacctgacttttgcttccacggtcaccctggcagatccttctcagcctgcttgactcagggcatgacttccctgcctggatcccaggcttcctaccctgcccctcgggcccctggact

SEQ ID NO: 17347 - DNA, 831 bp, Artificial sequence
  DNA replication origin
atacccagcttccagtccaggactcagcacaagacagggctcaacaagtcttagttgaagaaaaagagatgagtgaatagatagatgaatggatggatgggtgcatggatagatggatgagtgacaaaatggatggatggatggatggatggatggatgggaggacagatggacgaatggatgaatggatgggtgggtaggtggatggatgggaggatggatggatggatggatggatggatggatggacagatggatggatggatgagaggatgaatgagaggatagatgaatgaatgaatggatggatgggtgggtaggtggatggataagaggattgatggatggatggatggatggatggatgaatgagaggatagatgaatgaatgaatgagtaggtggatggataagaggatggatggatggatggatggatggatggatggacagatggaaggattagaggataaatgagaggacagatggatgaatgaatgaatggatgggtgggtaggtggatggatgggaggatggatggatggatggatggatggatggatggatggatggatggatagatgtgtgagtggatatatggatgaatgggtgagagattgtatggaaggatggataggtgagtggatggatgaataggtgtgtgggaaggaatggacggatgggtgaaaagaaggaagtattagtggattgatggatgggtggatatttgggtggatggatggatgacagatgggtggatggatgtggaggtagtgggatggaaagtgtcgatcaccctacacagagttctgctggagggaaaaccagggat

SEQ ID NO: 17348 - DNA, 1129 bp, Artificial sequence
  DNA replication origin
tatactttacttccccaagcagcccagctggtcttctcaccaccaccaccccccgaccaagtccttgagtttagttcaatctgagttcattgagcacctactatgtgaccaatctcatgctgggcactatgaccaaagaggcaagcaaggcacagtgcccaccccagagggctctcagtgacatgaggaggcagcctcaagttcagatctctttgggccaatccagtcagtgaaaagcacatttctgttccaagggagggcaatgaaagggtctggggggtcagggaggcttcctgggggaggcgaataaaggtgggcaggacagttcagagaatgggagccacacaggccaaggccaggaagaaccaaatgccccaggatcttaagagaaccagaagtgatttactattaagggagcacaggggtgtgaggcggagggtgggaggggtcatggatccggaggaaccaatggggtagggcaggttgagggcctgtgtgtgcccaaggagagttaggatgctcccttgcagatgacagtgccatggaagtagcgacatctgcatctttgtcttggagtgggggcccaggggactgtggacagagggaggttagagagatgacaacagtggataggtgctactgaaggcatcttgggaaaatagcgggtaaccagaaagggagtggtgcaggaatggcgaggcggaggtggactgcagagattccagaggtaaaactgtcaggatggcgtggtcggcagaacaatgcctccaaaatgtctgcatcccaatccccggaacatatggatctccttcttatatttcatgacaggggagaattaaggttgcaggtggaattgaggttgctaatcagctgattttgcgatggggagattattctggattatctgggaggaccaatgtaatcacaaggttcttaaatgtggaagagggaggcaggagagtcagcgtcacagcgatgctagggaggaaagactcggagctattgctggctttgaagacggaagggggccaatgtgggcggcctctatacttggaaaaggcaaggaaaccgattctccctcaagagcctccagcaggaacactgtcctgcagacaccttgaatttagcc

SEQ ID NO: 17349 - DNA, 876 bp, Artificial sequence
  DNA replication origin
gctcccccgcaggctgtgtgcccagagtggcagctcagatccaattctgcactcatagtgatacccacttttaattatatgcaaattaagggacagttcatgtagaaatttctaggaaaagggtggtaacttccagatcattgggctgttgccatggaaagggcagtcacttctgggtgttgccatgccaatggtaaactggcatggcacactggtgggcagccttatgaagaggtgcttccaccccaggcttgctttagctagtccagtgtccaaggtcaatttggtccagtgtccaaggtctgcctccagagtccagtcccaccctacctcactacaagtgccagtagtaggaacagcagaggtgaaggaaatgacatggcccctcccctcatggagcttgtggtccgctgagggtcacaaatataaaacacgcagcccatggtgggggtcatgtgtctggggcatggggggcaacttctccgatgaagtattgtacaagctgggacccaaagcatgaggaggagttgcccagggaagggggtaggggaagagtgttccagaaaatgagaacgtgtgccaaggggccagaagaggccaggagcagtgggagactgactgggaagcatggctgggctggctgagcgggtaactgggctgggggaggaaataaggccagggtttgccttgtttagcctttcaaatgtcaaggcaaggtcaggcgcagtggctcacccctgtaatcccagcactttgggaggccaagatgggcggatcactgaagtcaggagttcaagaacagcctggccaacatggtgaaacccagtctctactaaaaatacaaacattagcatgacgtggcggtgcatgcctgta

SEQ ID NO: 17350 - DNA, 856 bp, Artificial sequence
  DNA replication origin
ccagcctgtgcaacatagtgagaccctgtctctacaaaaaagaaaaagaaaaaaaagctagccaggcgtggtgatgtgtacctgtagccccagctactcaagaaggatgaggagggaggatcactttagcccagaagtttgaggctgcagtgaatcgtgatcacaccactgtactccagcctcagcaacatagcaagatcctgcctcaaaaaaaaaaaaaagcaacctatcatccgacagtgagaatgagggctgagggagggtggggtattggaggtttggggagagagagaagttgtggtctgggagacgggggctgcaagctgaccgaggaacacagaggattgctggacagcacaaatgtttgttggaggtcaaggtcatgagatataaagctgtttgtgccatcaggtggctttgtccagggctccgctgcttggatgtcagagcacactgagcagcacccagaactcaaccgggacaggggttctgccaggtggatggaggagggggagggcagggtgactgagggcgtctgcagcagacaatgagcctggaacccaaggaagcagaggacacgggaggtgaaggaaaaggaatgtgccctgggggcagatggcaagaggcaaagaaagatcagagttaaggttgcagagggaatgtgtggaaagacaagaggcagtgctccaagatgggatgcttcaggcggaaatggcagatgggagggtgttactgaccaagtcaggacccagggtgtatcatggacgtggctgttgacgtaggggctgacaagggggtggggggaagggcgaagaagatttcagaacagatgtaggggctcccacctgtaatctca

SEQ ID NO: 17351 - DNA, 1480 bp, Artificial sequence
  DNA replication origin
caggatggtgtcaatctcctgacctcataatctgcccgcctcggcctcccaaagtgctgggattacaggcatgagccaccgcgcctggcctagtagagacagagtttcaccatactggccagactggtctcgaactgacctcagatgatccaccttccttggcctcccaaggggttaggattacaggcttgagccaccataccgggcctcaagtgtgttttaaagtgagagctcagacgatcgctggtctagctatgattgtgccactgtaccccagcctgggtgacagagtgaaaccctgtctcaaaaaaaaaaaaaaaaggcaacccatcacgtggatgtaatggagaggtgggggtcaagggctgctccaagagctttgacctgaggaagcagagcacgcaatttccatttgctgtgggaggagcaggtttcaagcttatcagtggaggagatggggtttgggaaacattaagtttgaggatcgaggaacccgtcctttgggagtgcaggcctagaggtcaggggaggggccggacttcggggaggaacctgggacccagcgcctgggatggaagagctctcccagtaagagggcgggcaggcagtttacacaggacaggaggagcaaatgagaggcagggaggcaaagtgggaggcaaagccatgtcctggggccaggagaagggtgtgttgacagacagaaggagtgagcggccatgtctgaggctgctggcaggtggaggactgtgatggtcaatgctgaccttggcaagagctgtttgggtggaatggcagggctgggagcccaactttggtgggcctgggggatgatgggggccgggggaggagcggagagacagcacagagaccacccttccaagggaatatgctggaaggggatcggataagcacggcggaagctaaaggggattgtggggtcagagggtggcttcttacaatctgggggcattcctgcatgtttgtggcatgctgatggggctgacccaggagaggaaacagctggtgacgcaggagagatggggccatgtgaagggaagccaggggaaggtggagaggaagcgaggtgcacggggcccgggcagggaaggacctgacgggcatgagaggagggacagctgatgggcatgaaaggaggggcagctgcccagggggacacccagggaggctggtgagtgcagggccaggaatgcctctgattgcctctgcgttttcaatgaagctcatgcctgtaatcccaacattctgggaggccaaggcaggaggatgtcttgagctcaggagtttgaggccagcctgtgcaacatagtgagaccctgtctctacaaaaaagaaaaagaaaaaaaagctagccaggcgtggtgatgtgtacctgtagccccagctactcaagaaggatgaggagggaggatcactttagcccagaagtttgaggctgcagtgaatcgtgatcacacca

SEQ ID NO: 17352 - DNA, 1252 bp, Artificial sequence
  DNA replication origin
ctgccataactataagaaatacattccttttctttatacattacccagtttcaggtattctgttataagcaacagaaaacagacgaagacaaggcccatcccttggccaggcaggacaggggcatctaggctgacagcacactccccaggctacacacactgggagaggtccccatgaggcaactggggggctcttgccagaaaaggggggcttgggtgctgggctggccaaaacagcagatgtccaccctggcctcctgcaccggggttgtgcaatcaaaacaaaacaagcacggggctggtttcctgcagccaagagctatgggctgaccagggagtccggcccagagcacagccgagaatcagggaaaacagaggctctctgcaagctcgctctgcaaacctgggacccggattccaggctctgcggctccctcaggagactggcagctccctgaaggcagtaagggaggctcctggccccactccaagctgggcttatgtggggctcgctcaggccagtctgtggagatgtcacaagccagggattcacactgaaggaggagctgaggccgagggctgggggtccaggtggaatttatcccagggggctgggaggtggagcggggagaaagtccgggaagtccagaagggcctgactcaggagctcagcgctggtttcactccccacctccccaccccacccccaccctggctccggggggaggccagtggcgatactcagtgttcatgctggcaggagcgagaaaccagagagagaggagggatggtgggacggtcagtttcctgtgtccactcaggggaggctgcagtccccacctcttgaatcaaacatgaatctctgtgttgccaggaaggtattttgcggatgcgattaaagtccatgattgccagccgggggcggtggctcatgcctgtaatgccagcactttgggaggctgaggcgggtgaatcacttgaggtcaggagttcgagacaagtctggccaacatggtgaaaccccgtctctactaaaaatacaaaaattcgccagacatagtggcctatgcctgtaatcccagctactcgggaggctgaggcacgagaatcatttgaatccgggaggcagaggttccagtgagctggtgccattgcactccagcctgggtgacagagcaagaccctgtctcaaaataaataaatagtccatgattggttgactttaagaaagggagattgtcggccgggtgtg

SEQ ID NO: 17353 - DNA, 1198 bp, Artificial sequence
  DNA replication origin
gggaaggtgggcccccaccccaccctgcacccccacagggtggctcagggccagaagtcactccgtctgggtgctcctcccggccccggcctccacgggcccggcacacttgtgagcaggtattattagcttctccgttttgcggatggggaaactgaggttcatgtgactcgtaattggcagaactgggactagaaacacccccccacttttggcttccttttctctgacaccacagatggcgcgctgagaaaaaagagaagagcgggagaagggaattaggagcccgagagagatggagggaggcagaagcgccgtgatcaattacttgggctataaatttctgctgttttgcaaagtgagcacacagcctccgagaggcagagctccctgggcaggctctggagaaaccaaacagagccaagccctgcagcaggcgcttttgatggtgggaaccggggagggagaggggtcgagctcaagggtgggtgggacaagctgggggtgcagcagagggggccaggggagggccagaggagaggaaggaaacccaagtgtcagtgagcttgggagctgtgggagccccctggggagggatcggcttcgtgcctccccggcattctctcccgctgctgggggtaggagaaccaggcctgggcacaagatcgtggccccctgccactgcattcgaagctggtacagggccagggcgggggcgacggggggcaggaggccctttgaacctcaccttccttatctgtcaaatggggatactgatgacatccatccccagggattggtatctagggtataagtggcttagcctggggcctggcacacagcaaggagagttgttgttgtaaattttttggaagattaccaagggcagaagggtttggtaactggtggtttggagaccaacttaattatttaaaaggtggaaagtggtccccgctgggaggaagggtgatggaaagagtttcccacagtggggataggttgggcacggcattagacctgtctcttggtctcccagacatggaggggctgtggacaggggccaggatgctgtgtgtagctgggaaaagaggccagagccagctgcctggactccacctttctggagccctgcagtggctcacttaggaaatgagccggaaacagaggccggcttctctctttggaatccgagtgcccc

SEQ ID NO: 17354 - DNA, 999 bp, Artificial sequence
  DNA replication origin
cctctgcagctgagtgcaggccgcccccactgcccggcaggcagcccagccggggtggaggaagccggcagggcgggaaaaggcgggaggggtccgagttacaggaaccagcagggccattgctcaactagggagcctggccgcgggcctgcctcggcccccacctctagcagcccgccctcctcctagctctgcattgcaaacattcctcgccaacctcgggttgctgcagccccggaagggggaactgcagcagacacagcaccaggccgccagaaacacttaaccccttcgctccttccaggcagagccttcagggggaggaaggagggatctgggcggcagccgcggcagtccttcccagcctctgggtgaccgggtcaggtgatttgctggcaggcccggccactgattaccaacctggatcaacaggttgcgcgttcatgactcacccagcagacatttccggagctccccctgggtgctggcagcaggcatgaaaatccaagagcggccccagcatcgggggtgggatgcgggtctcatgagcagacgtgtgttttagatcattacagtgatgagagcaaccaagacgtgcagggtgagcctgagcacaaactaaagtggctcaactcatcagggagggcttcttggaggaagcgacacttagggaaccctgtgagagcagagggagagagttccaggcagaggaggcagcaagtgtgaggctctagagggaagagagacgttctcatgtttcaatctgtgtttctggaggagagagaggaaggggaggaaagccccaggtgggagagcttggcccatgccaggtcccagaaggccttgaggccactcccagcatgaaccgtcatctgaggtcagtgaggagccagggaagggcttatgtgtggaatgacatggtcaagtttagctctaagccctaagacgccttgaataaaaaacagaaccttgggctgagcgcggtggctcacgcctgta

SEQ ID NO: 17355 - DNA, 1591 bp, Artificial sequence
  DNA replication origin
cggaaatgtctgctgggtgagtcatgaacgcgcaacctgttgatccaggttggtaatcagtggccgggcctgccagcaaatcacctgacccggtcacccagaggctgggaaggactgccgcggctgccgcccagatccctccttcctccccctgaaggctctgcctggaaggagcgaaggggttaagtgtttctggcggcctggtgctgtgtctgctgcagttcccccttccggggctgcagcaacccgaggttggcgaggaatgtttgcaatgcagagctaggaggagggcgggctgctagaggtgggggccgaggcaggcccgcggccaggctccctagttgagcaatggccctgctggttcctgtaactcggacccctcccgccttttcccgccctgccggcttcctccaccccggctgggctgcctgccgggcagtgggggcggcctgcactcagctgcagagggaggtggagggacagaggcccagatagcctgaaggtcaagagtgaaagagaggggttccctgagagacagagcaggggtgcagttggctcagccaccccagcccagagaagcggggccttttccaaagtcacacagcaagacaccagtgaattgggccacagctctgggtctggcctctttagttcccataactctaggctgcaactcccacacacagcagggaggtcacattgccactcagctgggaagctttgaaccacaggggaccctctcccaacagaaggcaaagcccccccaccccaatgcactggcttggcctcttcacctaatccccagggtctcagagaggacagtgcacccactggtctaggtgcacccctccatcctgccattaactccccaccacttcccactgcccactgcccggccaggtcttggggaccttggtcacctctgttcctcgcttccgggagtatgaagtaaatgaatgaaggccaaacttgagctggttcttgaaaaccctctctcccctcttcctctgggtcttttcaaggaaggaccaaactggcacggtggctcatgcctgtaatcccagcactttgggaggctgaggtgggtggatcgcccgaggtcaggagttcgagaccaccttggctaacatagtgaaaccctgtttctactaaaaatacaaaaaattagctgggcgtgttgatgggcacctgtaatcccagctactctggaggctgaggcaggagaatcgcttgaacccaggagttggaggttgcagtgagctgaaatcacaccattgcactccagcgtgggcaacaagagcaaaactccatctcaaaaaaaaaaaaaaaaaaaaaaaggaaggaccttcatgagtaccaaatattcacttgggctcagacgcaaaactcagctctttctccacaagcacccccctcctttggggggaagctgtgttccctgacactgtgggatgagctcctccctctgccggcagtatttcctctctgggggacctctggggaggtggccttgcagttgggcacacctggcttgcatcccagaggcaccaccttcaagcttcctggctttgccacacctctctgagcctcg

SEQ ID NO: 17356 - DNA, 1288 bp, Artificial sequence
  DNA replication origin
ctccagcccgactcccaccaggaacacaccagctcctccccccgccgcccctttcaggtttccgccccacccccagcccgcaaacaattttgcatatatttaaatctcctctgcgagttccccctcccccggaaaaagagagaaaagaaattacaaaggccgtcatttgtctccgtccccgcaccccatctatcagggcccggagcccgtcgcctcgaatgaggcgcgcgcccgggacggccgctttaatggggcgccgcgtgtgactgtgcagccgcgcggcgggcgcagccggccggcatttgcatacatattaaacggagcagtaaaaaatgcagacatgcaaaccatttggacgggctcctcggcgtagagcctgccaggaaatcaatcttctggtttcttaaaggcagcctgctcgggaggaggtggcgatgccacacagcccgcaggccgtgggagggggccatcgtctgtccatctgcctgcgggagcagccgtgggggtccttcccggccatggaggagccacctcctgggagccaggggccggggagttgagtgtggtgggtcctggctcagccggctgtgtgccctgtagtaaaaggggtcccctctctgagctccccctcactgggtgctgaagatatttcctttcccttttgctaggctggggcttaagggactaacccaagatcactgggcccctctatgcagagcctgggtctctaagccaggtgcgaagaaggatggccaagaacacaggctctgggggcgggcggcctaaattcaaagtcaggctccactccccaagagctgtgtgatcttgggcaaatgcatcaacctcactgtttcccgtaaaagggggatcaatatgcctccctcttcggtatgctgttggattgaaataggtcagccttgtaaagcacttggctcattgcctggcatgtagtaagtgctcaataaatagtggtagaacaatgtgtaggagggcccttggtgttattggtatgtttttcttggtgaatatccctctttatatctgcatagtgtggcaagccactcctcccagagcctccttacctgtaaaatggggtgttttgattttcacgggaactgctagctgtgttctagaaggcactgggtccctgctgtgtgctcccacccacccgctgattccagccaggtgtggccaaactggcgcctctgagggctgcccacagcctgtcttaggcaaagcccagagcagggatgggggcatacccccaaactgaccatacatctgtggg

SEQ ID NO: 17357 - DNA, 1571 bp, Artificial sequence
  DNA replication origin
tggctcccaggaggtggctcctccatggccgggaaggacccccacggctgctcccgcaggcagatggacagacgatggccccctcccacggcctgcgggctgtgtggcatcgccacctcctcccgagcaggctgcctttaagaaaccagaagattgatttcctggcaggctctacgccgaggagcccgtccaaatggtttgcatgtctgcattttttactgctccgtttaatatgtatgcaaatgccggccggctgcgcccgccgcgcggctgcacagtcacacgcggcgccccattaaagcggccgtcccgggcgcgcgcctcattcgaggcgacgggctccgggccctgatagatggggtgcggggacggagacaaatgacggcctttgtaatttcttttctctctttttccgggggagggggaactcgcagaggagatttaaatatatgcaaaattgtttgcgggctgggggtggggcggaaacctgaaaggggcggcggggggaggagctggtgtgttcctggtgggagtcgggctggaggcaggaggggagccgggcccccacagtcaccttctggcggagacagccgagcgagccgctctgctcctgataagcaggcccggtcctctgggaagcgtgggcttcagccgcagagaaaaggaaaatgctggttattttcggccccgttacacgcgggaagccggggatggtggtttttcccccatcgcaccaccgctttcttttcttgggcttccagggcttataacttaattggtacggtgtcatttaagtttcgcattagcccatgaagtgggtcccgggttcacacccattgtgcagatggggaaactgaggtttgcgggagtgaagtcccttggggagggttgcagagagagtgggtggggattgggtccctccagagccctgtctttgatccccacggccctctgctgtctctctggctctcagcggtggggtgtccgcgtgcctgcctgtgccccaaatctgcccgggctcgccccataccacgagccagccccctcctcctgcctgcccccacgcgcgccaggtgacaggcccacagcccagcgagctgggggactgagcctcacattttccaaatattgcttaagcctaaaatccgaagtgctggttttaaaggaatctttcctaatttgtcaggattttaggccacatggcagctgggggcagaaacatttctgagaggaggctccagcctcaggagagacccaccgtggagcagaccactcagacccaccggagacccagagttacacactgctgtgtccgtgtgtgcgcgcctgtgtccgtgtgtgcttgggtgtgtcgtgtcattgtgagtgtgctggtgtgtgtgcaccagtgggagtaggggagtgtatattagtgcatgtgtgagtttcagtgtgtatgtgttagtgtgttacgggaaaggggtcctgatccagaccccaagagagggttcttggatctcgcgcaagaaataattcaggatgagtccacagtgaaaagcaaaagcaagtttattaagaaagtacaagggatt

SEQ ID NO: 17358 - DNA, 1142 bp, Artificial sequence
  DNA replication origin
gggaaccaatcccggccccatcccacagagggggaaaccgagactcagccagctgaggggctagtccaggccccctaggaagccgaggtggcctcagcctccaggccagggcttcctaggactgcagtcctctcctgcccctcttcagccccgccttccccgcaaccccagcatcccctgtcctctggaggaagatttccgtggtcccggttgggggtgccaaactgccagcgacaacagcgttttttaaatcctagagtcgctgactcgtgtgattattcttatttaaggcagggaaggtactgggagtggggagccggtcacctctgggtggggggcacctccgggtgagggcggcccctcctgtctgccttgtgcccagctccaacctggggagggggaggagaggggaagcaggaggaggaaagggggggagggggatgggagaggatgaattaggaggatggagaagggggaggaaaaggaagggggaagagggggcagaagagggcggaagaggaagggaagagggggctggggtaaggggagaagagggtaggaggggagaaggggcaggaggagaggattagggagggagatgagaggggaagaggaggctagggagggcgtggggtggagggggtgaggaaagggctaggggaggaggatggggaggaagatgaggggagcacagaaaagaacccccccgcccccgccttggtggctccctaagcagataggagatacataatttactacggaaatgcaaaaagaattgggaaactctcaatttataaatatttatttttacaagttcgcccctcccggctcccccttgctggccctggtcttttctctctggggccctcggggcgcaggtccctcctctccggctcccactctggcccctcttcccctccccgccttccttctgcagtcccttccccctcgggcggtctctgtctcccccaggtcctctccttcctctctcccgcctgtgtctctccccctagtgcgtctctgtctctgtctctctttgtggcgggacgggggcgatttttgagtctcccccgccgtgggtttctgtctctctggctgtctcccccatctctccatctgcgtcctcccacttgccccgcgcc

SEQ ID NO: 17359 - DNA, 1036 bp, Artificial sequence
  DNA replication origin
tgggaggccaaggcagtaggatggcttgaggccaggagtttgagaccagcctgggcaacatagtgagacccctgtctctacaaaaaaataaaaaaggatgaatttgttgtttgtagcacagggaaatgtgtgtgtgtgtgtgtgtgtgtgtgtgtgtgtgtgtgtgtgtgtgtgatgtgcttgcccagcataggaggctggggacagtgagggagtagccctgcagctgtccccagccttgggagagctccgcaggccgggcttgttccctgcatgggaggcagccaaaggatctggatttgagagcaggactgcagcaggattagagctgggagcttcaaacagaaccggcctggcagcaggcctggagcccgggcttaaaggggctgctgaaattataaatagccaccttccctgtgactccccagtccctcctggagagggccctcccaccagccccttcatcagcctccactccagcccccagcccgcttgggagggagggagggacagggctgggagaggtgctggttagaaggctgagcagacctgcgtgttggttacaaacaactggctttgagttgcaggaagcatctagagacccttccagctgctgaccctgcagacgctgcctgaggcctcctccttcactaacaaacaaccgccccaccccagctcatgtgtcaggcctagggatggcttaagaggaggggccggcacgggtctagccaagcaaccctgcatccatctggcctctcccggactcagttccccaccccaggaggggagagggaccgggaggagcgatcaaaagggcatttcgggttctcccacctgaagccaggacctgtgcaggtcgggcactgagctaggtgctgccaaggatggggacagcgcaggccccgctcacaaaaaaaaaacggcctgggccagcagatgcagccgagcttgtgaaatggctggtgcccctccccgctccatcccttctgtgcccaccggccacttcccctctcagcagctcccgtttcccatccgt

SEQ ID NO: 17360 - DNA, 1106 bp, Artificial sequence
  DNA replication origin
ctgtaccagccacaaggaaacccctttctctttgagggacttttgtttggccaccagtcaaagtggcctctccagaaaatccagaaagacaggtgatgaagagctttgaaaattagctggagtggctgggcacagtggctcacgcctgtaatcctagcactttgggaggccatggcgggtggatcacgaggtcaggagtttgagaccagcctggccaacatggtgaaaccccatgtctactaaaaatacaaagaattagctgggtgtggtggcggacgcctgtaatcccagctactcgggaggctgaggcaggagaatcgcttgaacccaagaggtggaggttgcagtgagccaagatcatgccattgcactccagcctcagtgacagagcaagtccccgtcttgaaaaaaaaaaagaaaaaaaaaaaaagaaaattagttggagtgtttatgtcctggggaagacaatggggagccatggagtgttctgtgacagtgaaatgattccagctgtggaattgctgcttggagctgtgagctcccagacacaggtcaggaggtgattacaacgggccagactgggctggataatacaaagtgacaacgatagctaacatttattgaactcctgcgatgcccaaagatgcgacaaaggtttttcactcggtcctcaccccagcctcaggacgctgctgctgttgttctccccattttgcagatgtgagaactgaggctcagctgggacgtggatgcaggtctgtgtgatgtcagggcgggtgttcttaccacgatgctacgctgcagagaaaggcgggtggggaggtgaaggcacctggggaggcatggccgaggcacaggtgcgggatgaggggactgggccatccttccacactggagacccacctcccaaccaggccttgggccaagctagaggattagagacaaactagacacggacccctcctggacagtctcatgggggtgacagacacgtatcaagagcctggtgacagagccttgggacttatgggagaatttgggaggggtcgggagctctctggaggaggggaagcccaggctgagtcctaaagaatgaacagctgatc

SEQ ID NO: 17361 - DNA, 797 bp, Artificial sequence
  DNA replication origin
tgcacctgtgcttctgcgggcatcgatttttccatccttcagagaagcgcctgaggaaaaggaaagagcatcttcggatcaatgaacacagccctgcagccaggggtgggggtggccgcgggccgcgcctgcttgtcactgccgggtccaggatttgaggggggctcagcgggggaaggcgagactggctgggctgcccagggcggcgagtgtgtgtgtgtgttggggggcgtggggagtggtggagggtaggtgtggtgggggtctatgtgaggtgtggagtcggggggttacatacacgtgtgtggtgggagatgggtgagcatccagggttgcatcagggagggggtgtcgtgggcttcctccgaggggctgctctttgcctagaggagcaaggagcggtgcaacctcctctgtgaaacacagtctcccactaactcagttcacagctctgtgaggaggggctggtacacacccattgcccagatggggaaaccgagggctgcgtgtgttcgtggtgggggcggggaagaggtggatggagagggcaaaacggcattgtttgtgtcaactgcagaacagaatcttgtattcaagaggcagtctcgtatttgaaaggcactcacctgttctgggcactgggagatgagtgggtggggacagagagggggcagccgaggctccctcaggagctcacagtgggtgcagggggtggaaaaggaatgctcctgggcctatcgggtcagtaaacccagactctacatttgctaggcctgtctgagcctcaccccagcctc

SEQ ID NO: 17362 - DNA, 1012 bp, Artificial sequence
  DNA replication origin
gcttcttttcccaggacactcccttttggggctgtcaccgtgcctcaagtaccctccttgttggaactgatgtccaaggctacatgtgagtggtagagcccatcaagctgcaaatttcttggaagtggccttccagccacctcccattagcacaggaggcagggacctctctgatggggttgacaagctgattcctcaagcctgaatccatgctgcaaggacgggtgtaaatgacagtggcgacatgcttctgtctgaggcttttcactgcttggaatgacatcccaccgcgctctgcttcatcctctgagggccctgagatgcaggccaggcagccttctgcctcagtttcacagagaaaaaagttcaggcacagagaggcctagcaacttgcacataatcacacagccagacagaactggccagaatttgaacccagctctccagccttcagacctggccctctttctatttccaccggatggtcctcacagcagggattggggcagggaatcgtaccaagtgaaagtcagccattgaggactgcgggtgggtggaaggtgaagaggctccctggagagagtggagggaccccaggcgagggaagcgtctgtataatccccacaactgccctggcccaacgcatgtcctttgctctgccctaagtgcctggtcctgtgctctgtattggtcatcaccttgaaccctcaaacatcttattctgagcccatcttacagccaagaaaatggatgctcagagaggttaaggaatttgcctaaggtcaattagtgaggaatagaggtctctggcctgttggagcccagagctcgtgcaaaggccctgaggtagggcccaggaacagggtgtgtaaaagaactgtaaggagtgggtggggaggaggggagaagctgcggaggtccctctcggtcccatccaaacctcacttgctcaagcaaaagtttcagggtgtcgcttcctgttcagtggagcaaggccccgtccatactggcc

SEQ ID NO: 17363 - DNA, 1034 bp, Artificial sequence
  DNA replication origin
ccaagtcagagaagcagctaggacgctgctggctaaagaactcttgccaggctctcatttttattcttgtctcttcagcgttttccaccagaacgtgaactggtccacagaacgtggccacagtcccccagcctgaagggagacttgtgaaatgcagattcctgggccctacccaggaggccatgctccgataaggataaggtgctatctttaagagtttcccctggtgataattatacatgaaagtcaagagaagccccccaacccccaccctctgctgaaagtagcaggagtctgaggggtgggaggtgggggtacaaccagatttgtgttctagaaatggatccccagctattgggcaaaggtgggcggggaggagagttgggaggggcagaggcctggcagcacctaggttggagagggtggcggcctggtgacagggcaggaccgtgtggctttgggggggcggggtagagggggtggtacgcggttgcgggagcggtccggggtggaggttgtgtcagcagaggctgtgtttgaaattcacaatggacagggcctggtgctgatgaggcttgaaggtgagcagggatccagggcagctcctttgggatcataaaatctaatcaggctgcaggaggcctgggccctgggtggactccattaggcaagagcccactcccctctgctgatccgggcatccctggggccccttaagtgtcacactgagggtcaattcaaggctctgagtggcggaagaagaattaaaagcccgcctctgtccccacccaccccgatcccctacaggagcctgcagccatgctggggaggctggaggagcagctgggagcagcaggtcaccaggaaggaaaggtgggcatgcctcaggagtgggggagtggagtggccaggaggggaggcttcctactcgaggaggactttggaccctcccactttccatacacggttccagaaatcatcttgataataaaaataataaccgtgaaaaccacagcagcaactattgcccttga

SEQ ID NO: 17364 - DNA, 3609 bp, Artificial sequence
  DNA replication origin
aagcttcacacccccgcagggaccccaaactccaaggtagatccatggacagtgaattgggctgcacgccctcattcgtcagccctggtcaggctctctggagaggaggaaacacacaacacaggcccgtccccactcttctggccgcctcctcacagcagcctgggagcattccctccacagcagacagggaggcggctgagagccgtgggggtcattagctggtacaagggcacgcaactcgccaggagccagacactggctctccccctctgcccagcagacccccaaggttggttaaggttcactgaaacactgctgagcaccacatacgcaggcaagggcatcccccaggggcttgggcatctggacaaacatcaggccctgggtgccaagagtcagcatgtagagccactatcctgtggccggaggtcatgtgtttgtcccctctagcactgggcaaagacggctgggaggatggatgaaaagataaaagatagatggaggatggatgggaggatagatggaggatggatggaggatgacttagaagatgaatgaaaaaatggatggaggatggatgggagaatggatgggaggatggttgaaggatgaatgaaaagatggatggaaggatgaatgggaggacaaatggaaagatagaatggatgggaggatgggtgaaaagatggatgagaggatgaatgaagaataagatggagggagaatggatgggaggatgaatggagaatggatggaggatagacaggaggatggatgggaggatggatagagggtgggcagaggaatagatgaaagatgaatggaaagaaggatgggaggattgatgggaggatggatgggtgaatgaatggaagatggatggagatgggtgaaagatggatggagaatggctgggaggatgaatgaaaagacgagtggagaatgaatgggagggtggttgaaggatgaaaggaaagatggatgggaagatgcatgggaggacggacagaaagatggatgggagaaaggatggaagatggatggaaaaaatggatgagaggatggatggagaatggatggaggatggatgggaaggtggaaggaagatgaatggaggatgaagagaggatggatgaaaagatggatggagaatgaatgggagaatggataggagaatggttgaaggatggatggacagaggaatgaatgagaggatggatgagaaggtggaaggaggatggatggaggatgaacagaggatagatgaaggatggatggaggatggctgggaggatggatgaaaagttagatggagaatgaatgggaggatggttgaaggatggatgggaggatgcatgggaggatagacagaggaatggatgagaggatggatggaaagacagatggggatggacagaggaatggatgggaggatagatggaaagatggatggcaggacggatggagaatggattgaggatagatagaagaatgaatgggaggataaatggcagggtgaacagaggaataaatggaagatggatgaaaagatggataagagaatgggaggatggatgagaggatgaatgaaggatgggtgaaggatggatgaagtgtggatggaggacggctgggaggatgggtgaagagattaatgggggatggatgagagaatggatgagatgatggatgaaggataaagggaaagatggatagaagatgaatgaaggatggatgagaggatggatggtagatggataatggatgggggatggatggaaggatggttgagaggatgattggaggatggatgggacggtgaatgaaggatggatgggatcatggagggagaattgatagatgggaaaatggatggatgggagaatggataggatgatggagggaggatggatgggaggacagctgaaggatggatagaaagatggatgggagaatgaatgaagaatggattaaaagatggatgggaggatggatggaggatggatagaaagatggataaaaagatggatgggtggaaggatggaagatggatgaaaagatgaagggtggatggatgggagaatggaaaaagagagaattaatggaaggatgaatgggaggatggacaggtggatggatggaaaaatgaatgggaagatggataggaaaatgtatgggagaataaatgaagcatagatgggagaatggataaaggatacatgggataataaatgggagaatggatgggaagacggatggaaggatgaatgggaagatggatggaaggatggatgggatgatgaatgaaggatggatgggtgaatgcatgaaaagatggatggtaggatgggtgaagaattgatggaaagatggatggaaggatggaggatggatgggaagatgaagggaagatgaatgaaggatagacgggagaatggatgagatcatggacagaggaataaataggaggatggatggaaagatgaatgggaggatggataggaggatgtatgggaaaatgaatgaagagtggatgggaggatggatggaaagatggatgagaggataaatgaaggataagtgggaggatggatggaagggaggatggggaatgactgggaggatgaatagagaatgtatggaaagatgggtgggaggatggatggaggatggatgggaggctgaaatgggaaggtcgacggaggatagatgggaaaatagataggattgatggaaggatggatgggggatgagtggaggatggatggaggttggttgagggatgaatggaggatgaccgaggggataaatggaaagatggatggaggatgagtgggggacgaataggaggatggatggaggatgagtgggggttaaatagaaggatggatgggaggatggatgggtagatggatgatggtcgggtagttggatgatggataaggggatggttgaaggatggatggaaagatggatgggaggaagaataggagggtggatgggagcatgaatgaaggatggatgataggatgaatggacgatggatgggagggtggatggtaggatggatgaagtatggatgggagaatgggtgggtcgatgggcaggaagaatggatgagaggctgtttcagacagttatacccatgtgctacagtgacagaccagactaggattcaaatcccagctattccatatgataatagtgtcatcttgcataagtgttgtaaccccactgagcctcagttttcttgggtgggaggacagacaggaggatatgcagatggaatgattaagtgagtactctaatacctgtagaatacttaggacaggccctgacacacagtcagtgcttaataaatgttcactcaatgattgcatcccacattctgaactcagccttggggacgtgtgtgaggagtgaggtgctggggctgcccttggggactcagtgtccgctgagcaaaatgatcagtcctgattcagggccccttgggatggtcagggaaagggccccatgggtggcctgagttggaagggaggaagcggggaatgatcacgaatctgtattggccaggcccagggtcaaggtgttggcagccacaga

SEQ ID NO: 17365 - DNA, 854 bp, Artificial sequence
  DNA replication origin
ggagaggcagggaccaagagaacctcaggaacagggagagcagagctgtgaagggcagggctggggaggaggttggggagatgagggagggaaggtgggagggagaagggagagggagggagggagagaaggagggaaagagggagataaggagggggagggagaaggggggaggagaaggaagagggcaggacagggaggagggaggaagaagggagggagggagggcaggagaaaggggggcagggaggggtgaagtgtctctggggctctgaggcacagaccaccaagagactcagcacctacgctggtctcctcccatccccgtgcccctcccacccccttgccccactactggatcctggggagtgtggcaggggctgtcagggttgagcagtgggttccccttccaggcccgctccagacagaggcccccaccctccttttgttggggtcactggaagggtgggcctaggctagggcccggctccttggagaagacccaccagtgacctagcagggcccagagcaggggctgggcccggacattccaagtcaattcaggactcgagcaccccggaggagaagggacccggattgtcccctggagtcacctgcatctactggccagtctccggtctgccttggatcctgggagtagagggacagcatggcaggaagtagcccattccacctagacaggaagaaacccagagccgcctgaggaggagagagaatgccagcaggatcatcgtgggggccggggctcagggaggcctcttggaggagatggtcttaacacctgagagctgagaagaattcagcctcacaaaacccagagacacggtccccaa

SEQ ID NO: 17366 - DNA, 1023 bp, Artificial sequence
  DNA replication origin
ggaaggcggcgagaggctgcagagcccgggtgcggcgcgggcaggcgctccagcagctccgggtcttccagagacaaaggcccgaggccgaggaggaggaagaggagggggagcaggcgaaggaggcagcggcagggaggggaggccgggcagcctggacgcagagcccgggccccagacccaggcaggcgagagacctgccccaatccagccaaggcccgagctggggaagaggggagtgcgctccaaacttaagaggaaaaagtctgccagctgcccttggggttaccacgacagataaaacctcatccaggcatcagagagcaccctgcacacgaatgcacagcagcgagctaaaaatactggcttgagagggaagagggtgaaggagggaggagggggagggagggggcaggaaagaagaggaggagagtagggaggagggtggggaggagtgaggagggtggggaggagttggggagcagggaggaggtggggaggagggaggagggaggagcgtggggaggagttgaggagcagggctgcaggttcaggctcaggcagcctcagttttccagagcgcccagttttgcagaggtgcagatgcagagagatgactgttttgggaactgcaagcctctgccccccacggcccctctcttggatgggggtgaggtggggaggaaagaaatggagagagaaaaggggagaggcagggaccaagagaacctcaggaacagggagagcagagctgtgaagggcagggctggggaggaggttggggagatgagggagggaaggtgggagggagaagggagagggagggagggagagaaggagggaaagagggagataaggagggggagggagaaggggggaggagaaggaagagggcaggacagggaggagggaggaagaagggagggagggagggcaggagaaaggggggcagggaggggtgaagtgtctctggggctctgaggcacagaccaccaagagactcagcacctacgctggtctcct

SEQ ID NO: 17367 - DNA, 958 bp, Artificial sequence
  DNA replication origin
aaggaagaaaggccatgacgcaggtgagggccctggactgacctggtactttctagaacttaactgatgcaaccatggcgatgctggtggtggtggtggttgtagtgggttaaatggtgcaccccccaaccaaatatgtccacaccctaatccctggaacctgtgaatgtgacgttatttggaaaaaagggtctttgttgatgtcattaagttatggatcttgggaggaggtcaccctcgatgacctaagtggggcctaaatgtcatcacaagtgcctacggaagaggagaagctgtgtgtagacgtaggcagagggtggagtgatgcagccacgagccaaggagcacctagagctgccagaaactggaagcagcaggaagggtcctccccgagcctgctgaagacctttggccttcagaacagcaagagaatcatctgtgttgttgtaagccaccaggtttgtagtgatgtgttcctcagccgtaaggaaggaaacaaatacaggagtgttgaggttgaggatgaggatagggtgatgataatgatggtggttgtgatgttgatggtggtgatggtgatggtggctgtgatgttgatggtggtggtgatgctgatggtggtggtgatggtgatggtggtggtggtgatggtggtgatgctgatggtggtggcggtggtgatggtgatgttggtggtggtgatgctgatgacggtggtgatgctgatggtggttgtgatgttggtggtgatgctgatggtggtggtggtggtggtggtgatgctgatggtggttgtgatggtgatggtggtggtggtgttgatggtggtggtgatgctgatggtggtggtgatgttgatggtggtggtgatgttgatggtggttgtgatgctgatggtggtggttgtgatgttgatggtggtggtgatgctgatggtggttatattctcctgctagag

SEQ ID NO: 17368 - DNA, 1544 bp, Artificial sequence
  DNA replication origin
ccacgtcgccatggcaacggtgttactcaccgcggccgcttcccggctcggctggcgcgcgtgaccccggccgctcgcgccccctcgtctctcacttgctgtgttttcccctcttcccccgggcgtcctcctcctgcaccccgggtcccccaagcagcgcgccccggtgccccccacccttccccctcctccccggtgcccacggcccgggacgagggggagggagattgatgggggacgcttattaaaaaacattgtaaccgtttccgtttttattacgttgacaagggagcgttatttactgttattgtttgccgagcgggccgcgccggagctcgggcggccccccgggagctcaccttcaggccgcggcgggcgggggccggggcggggggcagggcgagagcagggggcgtcgggcggccgcgcaccccggggccctgctcctcgccccttcccccgccaccccgtccgggccccgcggcggggcgcgttggcgcggggagggactgcagaggcccggtgactcgcgttgaaggagaaaggcaacaaaaaataaaaaaggaacagatgacttcattctcgggaaggctccgtcctacacggaccaatttcctggggactgtggtggaacagccctgctgccgttggaagcacttaaaactaaaccagataaagaccagaacattctgggccctgctgaaccaagccagggcaggctgccggggcatgcaatttctggccacatggggaggtgggtggcctccctccaccctcaaagggcgcctggcttccagtgtcccaagattgcgggtcctgtggggaggtgtccaccgggatcagatgggcctgaaggacgcccccaagcccctgctgggatgttaatgtcatcctgctaattaaagtttgtgattctgttcctaactcagctccccactcttggacattatcagctcaaatgcatacagttgctgctctggacagggaagccagaggaaaaagcctctgcagtgcacaccataccatgggttcagaaaaacaaatgttggccgggcacggcccgcctgtaatcccagcacttcgggaggccgaggcaggaggatcacttgaggccaggagtttgaaaccagcctagtcaacatggcaaaacccagtctctactaaaaatacaaaaattaggcgtggtggtgcacgcctgtaatccccgctactagggaggctgaggcatgagaatcacttgaacctgggaggtagaggttgcagtgagccaagatcatgccactgcactccatcctgggcaacagagcaagactccatctcaaaaaataaaaataaaaaagtgtttacacttacaagcaactcctagtgaacaacccaggttttggaaacaactttcagagacccctttagcctgtttcatgttttctttttctttttctcttccaaggacatgcggttagcctttggtcacggagacctttgccctttcaagataaagtgatcttcagctctcttcccagcaccagccgctctcagctgcacag

SEQ ID NO: 17369 - DNA, 1599 bp, Artificial sequence
  DNA replication origin
tagcagccaccgcggcccgcgccgcccggcccctccccccagcccgttgccacggagaccgggccagagcgaggctgcgcgggcggccgcggccgcctgcgccccaacccgcgcatgcgcagcggggcctggcccacgagggcgtcgcgggtgtgtcccgtcgccgcgccggggccacctggacccccagacctgcccctgccgcccgcttaggtggtggttcgggggccgggggaaggaaaagccaaatcgttccttgtttgcctttggaaagccgccctgccattgttccgggcggattccttggtttccaggcgctgtaggccaggagaggagggggcaggaaccccggcccagcggtcccagacgttttcgaagcgacagaccctgggcccagcgcggggacgcggaggggacacgggctagcagccctgccctccggagctcaggcccagtccgggcttcccaggccccggggctgccctcccggagcccgacctcccctgggggtgggggtgctgccccggggcccccttcctgggtttcctggtccttttgttcacgtatccccctccccggattgaaccagcaaagagcacaaagcagaaaatacatccttgccgcccgcaggctccctcatcccgcagaaaactctgaaacagtccacacccgtcccaaagttgagagaaacctggacgtttcataaacaaaacccgccctccagcagcgtgtttatgtggaggcggcctcgcgtgtctgaggctggggtgtgtgtgctcgtgtgtgtgtgtacgtgcgccggggacacgcgatcatctctcaggtgtttgtggagaattttttttctctccagattttgtttggtttgtttttaataagggtcagaggtctgggcttctgtggggaaggggcaaaggtcatctcggatggccaggctgggaggtcctagggggaggggtcgcggggcctgggctgccgggcgaggcgggagccggtgggagtcagcggggacaggctccgcgagctgctcctggggtatggccccagagaggacccgagccaggactgggatctctctcccctgagcagggcagctgtcacttccccggcccctgtcctggccacactggccaagagagaaggcaagcggagtggccccggtctctggggctttctgcattggaaaggggaggcttttgttttttgtacaaggcggacttcaactttcagcgagcaggctgaccagatgggaatgtagacagggtgtgcggggaagggggaccgcatgcttcaaacctccttcctgccaccatcgcctagcagcctgagcccccactgcggccctgtgctggctgaagggagggaggggctagggctgatgtttcttcttccctccttcccccaccccccttttccagatgtgagaaaggaaccccgccctgcaggggaaacttgtctggtgtccagaagacttaggatccacggtggaggtctgggtgccatattgccgtctctccttgaaggagaagatgaacacatagggagaaggcgcctgggagctgtcgctacagtctagagaagccccaccttggcccagca

SEQ ID NO: 17370 - DNA, 1329 bp, Artificial sequence
  DNA replication origin
agtcactttccctctctgagcctcacttttttctcacctgtaaagtgggtgtggtcacagtgaggactcctcgaggcctgcatgtccagagcagaaccgagccaggcaaacagaaccagcgtcatcgttatccctgtgactttctgcaaactccagcctgccctgcctgtctcctgcaggcggctacctctgggcaggtgcaggtttcagggtgcatatggaggggaagtgatggtgggggtaccccgtgtttgcagagctggcgggagaccacggcattcctatggcccatgtcccctcacccccgcccccctgccccagcgctgctgaacctcgacgtgtgtgtctgaaggtctccatccgtgcctctccagacgttgcccaccttcccctttgctgggcagtttgtgtaacgcggccagcaggcaccgcgaggccttgcttcctcacctctcgcccgctgtcggagctccatgagttgagcttgactgtccggggagtggagccacctctagcaggtacttgggtgtacctgttatcacccatctgtcagctgccgctagacagcagagggagcccagcatgggggagagaggggacactcagagggttgtctgagcagaggtggttctttcagaatcagaggaaggttgttgggtcctactccttccccccaaacccctcagagcgaggatcctgaccgtccctctttctagctgcgtgaccctggttgagtgggctcctcacaggtgaggttcaaggaggggcggggcgtcttgcctggaggtctcccagatggggaatccaagccctaaaaaggcataataactcggagctgtgtttccaccccgaccccgccccccgctccccgcagagtactgagccggaaaggaaggagggagactgaggcagctcggagtcactgtagtgggtgtgaggagtgcactgagccctgtggggaggaacgagggaggacacagctggcgggtgcctcagagccgccccccacgctaggctgccttcaggcagcccctgcaaactgtgaacccagaaaagcctctctcttcctggccccctcctctccttcctctcatccccccaactttgcagccttccctggcttcctcctttcattggagaacaggcagacgctcaccagggccgggtgttcacgtgtgtgcatatgtgccagtgtgcacacgtatgcgtgctcccataacatgcatgtttttctgagggtgtgtgcacgcgtgcgtgtgtgcatcgtgcggtgtgcgttaggtgcacacgtgcatgcgtgtgccttatgttgtgcgtgtgagtgtgtgt

SEQ ID NO: 17371 - DNA, 1409 bp, Artificial sequence
  DNA replication origin
ggcaggggatttaaagctgctttcgcggctgccggcgtgagcgctcgtgataaacagcccggagccgagccgccgcgcagccgggcgggaggctgcgtatcagagctcctggcaggctcgcaaaaagctgtccccggcccgccgccgctctatcagcccacggagggagggcggcgggggagggagggaaaaagtatttgcttcagcccttaatcacggaatttgaaatcccagcgagtcggtgccatttattttcagaggctgtcaaggctggtttcagcatttaaaagaaaggaggataaaacgcatttgcatttctcccccactctcgctgcgcgctcgccggcgctccccctcgttccctgcgcagctcgcgggtcgggcgttggcggggagggggaggccagaggcttttcaaggcgctgggggctccggccggcccggtgggggcctccccccgccagagtcaggggtgtcgggcgattccggggtgggggcccgagtctggtccagcggggctctgggtggcagaggggggaaggttaagcggggctgctggcttggggaatttggggccgtccgcggggctctcctcgggctccaagctttcaccccagaaaacagccctgaaccccaaatttgctccagccccagggggccctacctgcccttcctggcttccccagtggaaatctaaggtactggaggcttccaggggagccagggcacccctaggacaaccccctctctctgcagatggggaaactgaggcctggaaacagagaacggtgggaccaaggtcacatgatggcggaaggaggacaaggaaggaggctgactgcgtatccagcacgtgttccgtgccaagcctgtgcaggggccaaggaccggggtctctggacagcgccggttgctgggtcccacgctgggcgacagggcctttgcaatcaggccgacagggtttgaacccttgccgcggcactttccagatggccttggccactgtcccctctctgaccttcagatggagcccatggcacctccggagggggtgtgtgcttccaggaccaaatccacttgtgcgtggttaggcacgaggtggggggaggcggctcagccaccgggacctgtcctgcctccaccctctgtgcaacccctttccttgccttttgtctctgttgcttttggggggtgattagccgctagctcagcggctagaggattctctcccggaaaaggctccggagttgaggcccagacccccagggcaagacggaatctgctccccagggcactaactgagactcggttccctcactggtaaaatgagaaaactcacttatggtcaggggtccccgagttaatgccagtgaattccttggcagagcatcaagcacttggagaagccc

SEQ ID NO: 17372 - DNA, 2008 bp, Artificial sequence
  DNA replication origin
aggcagcacagcccacggacctgcagggccacagcagagaggcgctgcttcacgtccccctgggcctccgtggccctggccctgcacacagcacggctgcctcctccctccgacttatttccggtcacctggctggtgggtccctcggggcagagcgcagggtccccagctttgctcctcgctctcctcccagctcctgcctctcctctttctggctgcctcagtggctgctcaaggtcaaggaacaaacagataaaccctttctctggagccggcttggagaggacgcctccagctacaatccaattctgagtcagggccagggctctctctttcctgtgaatgtgaagacaggaaggaaattttcgcagccataaaatcggtaaaaatgttttgtaggcagagaagaggccaagcagttggctttggtttaaggcacaaacagcaaacgggaacggtcagacccagggagggagggcctggggggtaaactctaatattcaggcagccagtgcaagattttttgttgccccagggccagtcaggtgttggacgtggtgtggaggacacggacttggttcccagctcacggggacgggatgatgtgggggtctgaccaggcagttgaagactcgggactcttctaggctgttagccaagatggcccaggggcaggagccaggactgtggattcagagacgcagtgtggacggcaatgaactggatggctctcatgtcttagagggatgaacctggagcccagaggagtggacatgggccagcctgggaagggtcattcaggctgtggcggggatttaggactttatccagagggcagcgggaggcatgacaatggagagggggacgtggcccagcttatgtgttagaaagactcctctgactgcactgtgtgtgtggcctggaggcaggaagggcagagagaaggcggctgccattcccgccgatgtaggtgaccaggcagggcgaggatggtggagagtccaggtgtgctgcgggcagaatcattagatgctggtgactggatatggcggggtgctggggagagaggaaggggataaggccaatactcaggagccccaagaggaagaagaggaggaggaggctttagggggaggtttcatattttttgtgtttttgtttgttgatttgtttttatagagagacaggttctcactttgttgcccaggctggtctcaaactcctggcctcaagcaatcctcccaccttagcctcccaaagtgctgagattacaggcatgagttaccgtgcctggccacctgtattttttatctcttgaatatttggggggctctggccaagtacatggggcaggacaccaagaaggataaggcacagccctgcccaaagaagctggaatgcacacacggcaacagaaagcttgcaggggtggaactgcaggttttaactatgagcatattgggagttcaaaggattgggaagcctggagggacgtgggggacaggcctgtttggaagggccggtggtaaacagccagaggacgaggacctggccttctgtaccttccacgttcccttctcgcttggccctgctccatgccgggcaggtggtcccagctccacggcctggccctgctgcccactccagcctaagtagcgtctcctgtgctctggtgggccacccgctctgaagtgactgccagaatgcaactggatggccctcaagaggcctcttgcctcctgtcctctgttgggaataccttctcttcctctctagcctaggagcctccgactcattctcctgtctcagcgtaggtttcttcctcctaaaagcctttcctagccccgaaactgggctgagtgcacctctcctgtgctgaagaaatgttctttggatggaaggatggaaggatgaagggacagagggatgcggagatggagggatggagtatggagggatgggggatgaggagatgggggatggggatgaagggatggagggatgggga

SEQ ID NO: 17373 - DNA, 1267 bp, Artificial sequence
  DNA replication origin
tggtcccagctccacggcctggccctgctgcccactccagcctaagtagcgtctcctgtgctctggtgggccacccgctctgaagtgactgccagaatgcaactggatggccctcaagaggcctcttgcctcctgtcctctgttgggaataccttctcttcctctctagcctaggagcctccgactcattctcctgtctcagcgtaggtttcttcctcctaaaagcctttcctagccccgaaactgggctgagtgcacctctcctgtgctgaagaaatgttctttggatggaaggatggaaggatgaagggacagagggatgcggagatggagggatggagtatggagggatgggggatgaggagatgggggatggggatgaagggatggagggatggggatgagagatggagggatgggaggatgggggatggagggatgggagaatgggggatggagggatggagggatgggggatggagggatggaggggtggaagaggggggatgggggatagagggatggagggatggagtagagggatggggatggagtgtggagggatgggggatgaggagatggggatgggggatggaagggtgagagggtagagggatggggaatggaaatatgagggatagggatggagggtgggggatggagggatagggggatgggagatggagggatggtggatggaggatgggggactggaagatgaagggatgggggatgggggattggaggatgggatggagggattgggggatggcagatggagggatgggggatgggaagatagggaatggagggatgagggatgaagggatcaggggatggagagatggggaatggagggatgggggatgggaagatggagagatggggaatggagggatgggggatgggaagatggagggatgggggatggggattggaggatggaagatagagggatggagggatcagggtatggaaggatgggggatgggggatggagggatggaggatgggaaatggagggatggggatgtatggtgaatggatgaattaatggatggatggatagggggatgactggagatctagacagacaggcagttgatggatggaagggcagacaggcaagttgggcaggtggaagggcaggggaggagtggactggacagaggaaagggcaggtggttggtggtggaggtggaggtggtgggtggaggtggtggaggtggtgggtggaggtggtggaggtggtggaggtggtgggtgg

SEQ ID NO: 17374 - DNA, 1203 bp, Artificial sequence
  DNA replication origin
ggatggaagggcagacaggcaagttgggcaggtggaagggcaggggaggagtggactggacagaggaaagggcaggtggttggtggtggaggtggaggtggtgggtggaggtggtggaggtggtgggtggaggtggtggaggtggtggaggtggtgggtggtgggtggtggaggtggtgggtggaggtggtggaggtggtgggtggtgggtggtgggtggtggaggtggtggaggtggtgggtggaggtggtggaggtggtggaggtggtgggtggtggaggtggtgggtggtgggtggtggaggtggtgggtggtggaggtggtgggtggtggagatggtgggtggaggtggtggaggtggtggtgggtggtggaggtggtgggtgaaggtggtgggtggtggaggtggtggatggtgggggtggtgggtggtggaggtggtgggtggtggaggtggtggatggtgggggtggtgggtggtggaggtggtggaggtggtgggtggtggaggtggtgggtggtggaggtggtggaggtggaggtggtggaggtggaggtggtggagacggtgggtggaggtggtgggtggaggaggtggtgggtggtggaggtgggtggaggaggtggtgtgtggcagtggtgggtggtggaggcggtgggtggcggaggtggaggtggtggatggcagtggtgggtggaggtggtgggtggcagaggtggcagtggtgggtggtggaggtagtgggtggcagggtggatgaatggaaaggagacaaggttggctcaggcaggctgaggtttgccctatctctccatccccccaccatggattggcagaatgagtaggaatctttctctcctgactcctcctcagacccctcagcttcctcagggcacaccctacactggatgggacccactgggcactgcagccggagatgtaactggcaccaggaacctccctccatcttatccgtgtcccacaactcttcacccgtgggtgtctttttgccgactggtctgattactggcgagaacctggtgtttggggatgaaagaagttcaggtctcctctacacatccattttcttccttcgtcctttctcaccttctgcctcctcctcctcctcccatgtctttccagcaaagcacaggatacccagatggcttgggccaggttgaaggcacagccatagccagca

SEQ ID NO: 17375 - DNA, 1843 bp, Artificial sequence
  DNA replication origin
ctgaagcgctctcactgtttaaagcctccatgttttcccttccaaccctcagaaggacaggagcgattattcttattctgttgtcaagggccacacagcaggttggaagcagatgtggaggctgcccagttccagaccagcttgtcctgctagtgcctggtcccaggactggctcaggtgcccatggcatgctcccctgtgccctgataatcgatgtccttttgcagggtggtgaggctctgagagtgagctagtggcttgttctttttccacatttttgaggcctctatcttggggctgaaatacccaggtggagaagtgagtgactccggaaaggaaggaaagaaaagaacccagagtctaattcccacccaagtggaggtgaggcgggaagaaggggggcttgaccctcttacgtgggagttgcagccttggtgggacctgtcagaactggtgtgctaagccaggggtgggagtcagtgacttccacagggacagtatcagcagtcagctcacagaagcatatgtttcagaaccaaaaggtgtaggagcaaggctcagaataaaaataaaatgaatggatggtgggcagtggtaggtggatggatggaaacatgcgtggattgagaatgggtgaatgggtgatggttggctggatggatggatgatggatgggtgggtgaatggagggtggatggctgtatgagtgggtggtgagtggatgagtgtgtggaagggtgagtgcatagataggtggatggatgggtagatggatggatggatgagtagatgggtggatggatggatggacggatggatggatgagtggagggatatgggtgggtggtgagtagatgaatgtgtggatgggtgggtacatagacagatggttgaatggatggatggtggatgaatgatggatgggtgggtggtgtgagtggatgcatgtctggatggatgggtgcatagataggtgaatggatgggtggatatgtggatggatgagtggatggatggatggatggatagatgggtgagtggagggtggatgactatatgggtgggtggtgagtggatgaatgtgtggatgggtaggtatatgaatggatggatggatggatgagtagatgggtggatggatggatggatgggtgagtggatggatgggtggatgaatggatgagtagatggatggatggatgagtgggagggtatatggatggacggatggatggatggatggatgagtggagggtggatgactatatgggtgggtggtgagtggatgaatgtatggatgagtgggtatatggatgggtggatggatggatgagtagatgggtgcgtggatggatggatgagtggacggaggggtggatgaatggatgagtagatgggtggatggttggatggatagatggatggatggatggatgatggatgagtggatggatgtgtagatgggaagatggattggtgagtgaggtcttggatagttgggtggtgagtggataagtgaacggacgggtggatagaagggtgggtggatggatggatcagcagatggatcagcagatgagtgggtggaggggcagatacatggatgggaggatgggcggataaataagtaggcaggtggaggtagcactggcatacagcaaagagcacactgtttgagactcagaattctattcatagcaaaatccgacatggaaaacatccacactcctgaatctggaaaaatctggctgatacaagtcgggttgagaccatctctaaggtcaaggaaaagtggattctgatcctagttctcatgcttggttctgtgagatctgaggcaagt

SEQ ID NO: 17376 - DNA, 1098 bp, Artificial sequence
  DNA replication origin
ccaggtggaggaaagttctggtccacgcccagccttcccacctccctgatctctggcctcagtttccctggttgtaaagcaaggatccccacggcatggtgtacgctgcagtggcgggggagttagggggctccatggagcttctcacaccccagtgttgatttaagattctctaagcgcagcagaagcgcggtgaggcgaatgtgagagggccgggactggagatgctggggatggggtgggcatacttaggagaaggggccccacaggtcccggagcggccaggtagctggggcaccacccaggccccctcaggcgcggaaaccttcctgctacctggtatcctgcctaccccccccagctcggccgccctggggcctctccggctccagctcttggctgggcctcggtgccagcacaagccctatcacccgccggccctggggacccgccagccgcctgtttacgaggccagccagccccccgtcacagccgtgcccacggggtgggggagggacgacagatggcggaggtgccattttaaccagagtctgcagccgttggggaaggagaggaagtagcccagggctggagggagctgggaccttctgttgttgctgcccctggggcacctccatcctaccccctctgcacgggcacctctcccgagctcaggtctgagtggcacagatccaacaacctcgtcactggggctgcctaatcttccatggactctgtgggtgccccttggatcagcgaagcatccggggtcccccgggggcaggggctataggggcaatctcttaaggctccactgtgaggagggccccatgacttctccagcccacagcaaggatcccccacccccactactgactatgaaatgcaggctgcagggagtcacagcaggagggaccgtgggcagacagggctgcaaagttcggcctgcctcgaggctccagcaggggagctcaggacgggttgggagcaaagtctgggagagggagaggggctccccccaggcgttctgtgctttcatcccagctcagcacccatgtcagccccagaacctcccccaggcttccacattcaaagctc

SEQ ID NO: 17377 - DNA, 1326 bp, Artificial sequence
  DNA replication origin
gggatccttgctgtgggctggagaagtcatggggccctcctcacagtggagccttaagagattgcccctatagcccctgcccccgggggaccccggatgcttcgctgatccaaggggcacccacagagtccatggaagattaggcagccccagtgacgaggttgttggatctgtgccactcagacctgagctcgggagaggtgcccgtgcagagggggtaggatggaggtgccccaggggcagcaacaacagaaggtcccagctccctccagccctgggctacttcctctccttccccaacggctgcagactctggttaaaatggcacctccgccatctgtcgtccctcccccaccccgtgggcacggctgtgacggggggctggctggcctcgtaaacaggcggctggcgggtccccagggccggcgggtgatagggcttgtgctggcaccgaggcccagccaagagctggagccggagaggccccagggcggccgagctggggggggtaggcaggataccaggtagcaggaaggtttccgcgcctgagggggcctgggtggtgccccagctacctggccgctccgggacctgtggggccccttctcctaagtatgcccaccccatccccagcatctccagtcccggccctctcacattcgcctcaccgcgcttctgctgcgcttagagaatcttaaatcaacactggggtgtgagaagctccatggagccccctaactcccccgccactgcagcgtacaccatgccgtggggatccttgctttacaaccagggaaactgaggccagagatcagggaggtgggaaggctgggcgtggaccagaactttcctccacctggttgccagctagtggcggttgtggggtgaggggctgtcccaggggccaagctcggggccctgacactgtaaacaagcctcccagcctcagtttttccatctggggaatggtggaatcaaggcggctgcggaggcgggagggctgtcctgtgagccagagagcactggggacctgccgttctctcacagtcccctcacctctccacgagggaggactcgggggagcatcccgggaggggctaggggtgggcgccaggggtgcctgggagggaatctgtccgggtcagttccctggctacccctccctccccctaccacggtgctgccggccgccccctcctctctcccgccttctgactgccagctcctccccgcaaagccctcagaccccagctgcagggatttacagctttgaccagcagctcagcctccccctgctcctcctccctcctcccccgcctgcatctc

SEQ ID NO: 17378 - DNA, 2526 bp, Artificial sequence
  DNA replication origin
caaagtcggggcgagtctccaaaccggggagccggccccgcccccacgccgcggcggcgccctcccttccccctccccgccgcccgcctctccccctcccccctccataactcaaaagcctgtcaagctggttccagactcctggcgccgggctccgctccaggaaagaaaaaaaggaaagagaaaaagggaaaaagccggcgcgagggagcgagagaggcccgcggagcaaaaccgtgcgccccggcacgcacagccccgcggcccccgaccccccacgcccctaaccctaacggggatcccagtcctagggacaccgggcgcgtgcgcgaccccaatcagttatttatgggcgaattaattatgtagctgccatgggcgggggggccggcaggggccatgcgacgcggagaccacccggccgcggtggcggctctcctgccgggcctcggggtcgggaggcgtccccacgccgcccggggaggatcccgttgtgagaaagctgcctcggggtggggtccgggaggagcgcgggggaacctgaggaagcgggagagacggctcggagacctcccaattagactgggaggggagaggggggcgggcgacggagctggaaagagcgggccgcggagaccggggcgtgggaagagcctggcctaggcatttcttcccttccttccttccttcatccccatccttactgcgagcccactacgtgccactgcgcccacagcagagggcggtattagggaggggttaggagcaggaaggaatttcgaggtacagctgggtccaaatccggatttgtatcctatactcccctgctgtgtggccttaggcaacggcttgccctctcggagcctccacttcctcatctgccagtggtcttcaggacttgggagatggggcgcttgggcagagagtttgtgggggcgcggtcgaagggaggtcctgtccttgggaaactttacatagaggggaacatgcccagtcccccagtattccccatctcgaagccccgactttgggtctcatataatctgcctctccccggggcccacacatttgaaggtcgttattaaaaccacaccacccccaaggccactgctcaggacgctcacccctagctggcttctcaccagcctggccctgcagaaggtcgtgcatatggcagccagaggggctcaatctagtccttttactccccacctccgctgcctcccccgactctgcccttcacatccccacctgggttctccttccaacctgcttctagtctgggctagggagattggagccctgaggccatgggggctacggggcagtgagaacaggggtgggggctcagctggccctccctggacaagtgtcccccttatctggagtgtcaaggcgttctacttccaagactcagaagtgaaggaggcttccgtttgcgacccaggattgcctaggggtttgcctgtcttctttcaccaaaacttgcaataactctgttaggtgaatggggcagatccaggttttatggggcctgaaggttttacaatcctggggacccacttgaagaagaatagtgcaaagttatgaataggcggttaagctcagggccttggtaaatgacagtcccaggagctaaagcttcattagcccctcggtaactcacctctgtagatggacaacacaactgtcatccctttgcagaggtggaaacaaagcttaggctggcccaaggtcacaacaggtagaaaggacaagctgggatcaaacccaggtcccaccccacaggcagcaccctgaactaactgcctcagtaggaatgccaccttccatatcatctaccccatgccacatctcacctgtccccaccagtgcccagcccaggcagggtcagtcagaacagcctttgcttccagaacagtctgtgtccctccctccagaggcctccatgtcccaaggctcaagcctcagagatactgtcttgtgacaacactcacagatctagtaagtaggtctcttctaaacttttgattccagcaatggtaacctgctcactccagaactccagctcccccgtccacctggagggagcgcacccctgttccccggtgggctccctggtgttcggggctggatctgttttatttggctcagtattccccgctcttgacgcagtacagacatacagccgacagagtgactgtagcagtaacatctattcccaacctcgtggaacaggatgttgttaaactgcggattcccgggcccccctcagattctactgaatcagactctctgtgcacagggccggggacttggcattttacaagctcttttgggtgcatcttaaccatagtaaagttcgagaccacggacctacggccagaaaggaccaaatggttgtgtctagaccaaggccttctcaccagggggagttatctcccctaaatccgaccgatttcaccagttccccaggctcttctggctgagatcaaattatttcacttatcaggccaggcacagtgg

SEQ ID NO: 17379 - DNA, 2000 bp, Artificial sequence
  DNA replication origin
acggcctcggggccacggcctcccccgccgagcaaggcattcctttccgctgaactgggcgcccgggcccgcgccgcgccctgcacgcctcgcgcccggcgatcgggcccagggcgggggagcagggaggcggccccagccggtcgccggcgcccccaggcgctgcttcccaggagctcggctccccgggatggaagggactgatacccagttaatgggcgtggagcctgagcccctgagggtcgtcgctaacgggggtcgctcagcagggccggcctccgctgcctgcccggggtgtctaatcacctctccgatcctttgcccggatctgagcttcgtcattcacgcccctcctccctggcgactttgggcctggtgacagtcccccgaccctcgcagagccaggggcacagtaggcgccttagccactggcagaatttcaccggcgctctgcccgacgcccccagccccagggccgggcgtgggtggaagtgtctggaagggtgggttcaccagggctgggcacgtcagcggccccgtacagagaatccggtgcctggggtctctggagggggtactcagagtatccgaggaggagactcctggatgctaacagagcccccagttaggagcagtccgcgagacagttggtaacagtgctggccttgcccgggcgccggaaggttccgtgaggcccagcaagtcctgacttggcacagggcccagcacacggtaagcgctcggtacttggtcactgttgcttgattttaccatttcggaggggctcatctacgcctagcaaagcccccctcccggtgacccaaggggagctccagaatgttgagcggctgagcggcctggctcctcctctcgaccccatcgagccaagtgtcgaaatcatcccagacgaagctgctgagcagaaatttccagtctccctggcaaagctgggaagattttgggtgcggctcagagacgcagctgggtcggctctgtggggccagggctggggagggaccccaagatgttctatgagacccaagcagcacccccaacttgggttgggggcgttggggggtggagcctggcctcctgctgagccccagagctgatacagcacaggtaaaagcccattgttctcagtggtccacagaggctcagggcaggagcaagatcagggttcgggtgctggcgccacccctcgtttagcccctacctgggatctgagggagcacccatccttggaatgcaggataatagggttgctgtgaggatggaaggagactgtgcccatgaacacttgacacagctccctgccctggggaaagcacccaggaaatgcgggctgtttgtcttagtgatgttccacttaatagcacttgcggtggctccctggcccccgaggagcccaccttgccagttcttggccacaagagtacgagcccctctgtcaggacggtgggtctcattgaggccatccttatcctgagcaacctaaagaactcacatggaacttagcaaacaggcagacccttgccttgttctcagggctgtgtgatcccgggtgagcaactcggcctctctgaacctggttctcctctgcaaaacagagatgatggcctgggaccctctcccactacagggaagtagcattggagggggaagagacagggggagcgtcccagcactgcccaaaattggacaggtgactttggacaagtctgaatgagactgaataagacaaaacggagtaacattagagcttgctggctactctctgccctgggccggtgctagatgttttacatgcactgttaatcactgttactcgtggagggagattttattattaactttcttttccagatgaggtaactgaggctcagagaggttgattcactttctcaaggacacacagctaggaaatgatagagtcacgattcaaaccatcatttgttggcttagagcctgaatccctaaagaaaaagcaggcagggtgt

SEQ ID NO: 17380 - DNA, 983 bp, Artificial sequence
  DNA replication origin
gccgggggcggcgatgactcagggccccgagacgggccgggaagcggaaagttgtgtgcagatgacatcagccggccgcgagggcgggagggggccggctccgggaaacggcggcctggcgggcggcccggggcagggcgtggagaggcggccgcggggcgggggcggggacgccgggacgggacgctcgggaccacgaaaaatgtccccactcccgcccgccccggacccaggccccggagcccggccccgcttttcgccggcgaggagcgggcttcacccgcctgcaaagactccgcgctcccccgcgctccggaggcagccgcatccatcctgctgcgtccctgcattttaattaccgccgtattaatattcatgagccgggactcgagggggaccgcgggctgtcatttccctcgcccgcccttcccccaccgcacccctcttcccgggctgagtcgtgggcttttttcctcccgttctcaaccccgctcgcaccaaccgttggtgcgcagcagatttgggggaggggggttggtgtgagtgtgagcatgagtgtgagcgagtgtgagtggggaggggccgagtgtgagtctgtgcctgtgtctgtatgcctgtgtgtacgtgcctatgtgtgcctgtgtgtctgtcggcaatcccagggccgtgtgtgcacatgtctctgatgtctctgtggggcttggagaagggccaaagtctgtccaagttagcagggcctgactgtacaaatggggaaactaaggcctggagaaaggctgggccttgtccaaagccaccccataggtcagtagcacagggaagccagagcccagggtcttgcgtttggccgactctgctccccgactctcccgtgctgttgtttgtaacaatggcagacaggatgtgctgagccggcacctctcatatggccttcccagcaaacctgtgcagcacgtggtcctatccgtcccccgtgcacatag

SEQ ID NO: 17381 - DNA, 1167 bp, Artificial sequence
  DNA replication origin
gccaccactgaccaggtggaggggtagggggtgagcctggaccggggcaggtgctgggtggaggtgggggagtgagagccagagctctcaaccaagcctctgggaggccgcagggcctgggatcgcagacccgagcctaatccctgctcagcccaagagctgtagccagaaggttcttagtttcccctcagtaaactgaggttcaggacatttctggggcacttgctctgtgtgactgggcaagggctgggcaggcatttccagcatgaacacgctttcccaggcccactggttggagggcaccgaggggagaagggggacagaggaaaggagccggaagcaggatccagaatttgaacctaggtggtctgactccaagagggccctctctctcacttgacttcaatagtgacattagccaacttcaatagtgaccccaggcgcggtggctcacgcctgtaatcccagcactttgggaggccgagacgggtggatcatgaggtcaggagatgagaccattctggctaacacggtgaaaccccgtccctactaaaaatacaaataattagccgggtgtggctgcgggtgcctgtagtcccagctactcgggaggctgaggcaggagaatggcgtgaacccggtaggcggagcttgcagtgagccgagatcgcgccactgcactccagcctggggaaagagcgagactccgtctcaaaaagaaaaaaaaaaaaattgaccccagtagtgacaacagtgactcacctgccccatgggcttccaactgcgatggttgtgctctcctttgaccctgtatcctgggggactgcatacggtaattatattgttactgcgcctttttagagatgagaaaactgtggtcagtagcagagtggcctgaccagggctccaactcccccgtcctactgcagatgatgtggggcagttttcttagcacaggctggaaagctctcttaggtaacacgtggatgacagcgtgtgacccggcagaaaagaattgtaattccgggtggctgtacgaccttggacggtccttttgccatctctgggcctcgatttacccaactgtacaattcgccccgtgagtctaggaagatttgctgagcgtctgccaactggcagatgaggaaccgaagttcagagagttga

SEQ ID NO: 17382 - DNA, 1035 bp, Artificial sequence
  DNA replication origin
cacctgagggaggaactgtacctgccgaggcttggattacccacaaactcagcccagcaggagcccgctggctgtgctaacaatgtcctctgtgacgttgctgagattctgcaaggttctttcagtgttagcccattttacagaggagaaagttgaggctccagacagatgtgagcttaagcctctggcccagttcaagtttccaaatattccagaggccagggcctggggcggggtgtggggcaccccaaagtccaggtgagggtgacctgagggtgaagtctgggtctggagaggcaatagagggagtgaggacggctcctgccagaaacaggggaggggtgtttgagaccttgaaggaggtgggactgtgacagtggtgactgtgggaggagtccgggtccaagcaacaactgggagagacttggtgcagggccctgagctgaaatggaggaaaacggagctgggtgggtccctgccctcaatggggggtaaatgctgaggctgggggcacgagcccagaggagggcaccagggcagcccagacatgagctctgtggtctgtgtgtgtttactgtgtggccagagcgtgtgaggagtgtgtggaaccgtctgtgtgatgtgggagtagggggataagtgtattggcatatggagtgggagtgtgtatgtgtgcacgcatgcacctttgtgcctgtgatctgcgtcatgcagtgtgtctgtgcctgtgtgggatgtggtccctgtgatgtggggcgtgtatgtcggtgtgtgtgtgtgttgtggggtagtgctaaccgggacactctccaggggaagatcctagctcggatggaggtggaggagttaaccaggagaatgggagagggaccagcacgtgcaaaggcctggaggcatgaagatggagcctggagcactggaggacttgaaagtggtccagtgaggctgggagtagggagggagaggcaggggctgggagggacagggcaggccttcctccaccagtttgaattccgttagcttgagggtgtgtac

SEQ ID NO: 17383 - DNA, 800 bp, Artificial sequence
  DNA replication origin
ctcaccggcccagccacgccctccatgtgaccccgacccatcccttgggtgtcgcacctggcgcgcccaccgaggccactaagctctgctagctgcaccagcagcaggacctgccggcgtggcggtcagaagtcaacattcatcccaccgccagtaaaaatcgagggcctaccgcctgccgctcagggcctcgtcctgagccgtgtcccggggccgcccgcgcccgccacccctccccccgggcctgcagggagccggtccgcccctttcgcgcagtccgggcacgaagtggttaacgcctttccagccgagctggcaccgcgcggccgggcttattagtcagctcgcggggaggcggcgaggggaggggaggggctctagtggagaaccgcagaaagctattctcaggggctcccgagtgtggggagggcggctcagcaggagctgctgcttcccagaaagttgattatttttaacccaggaagaagaaaggaaggaggcgagggagaaggactcagagaaaagaggagaggaaaagagaggagaggagaggaaagaagtgagggcgggggaggtccgggaaggggaatggggagaggggagggaacgggaaagagagcaggagaggaggggagaaggaggggaggcagcagggtgatggagggagagggaaaggcagagcccagttggagctggagaagccagctggcagggcctggggaggaggaatggatgcggagcgggcactgccacctctcccgtacccctggggctctgtggagctccatcctggcctcctg

SEQ ID NO: 17384 - DNA, 1604 bp, Artificial sequence
  DNA replication origin
tgattatttttaacccaggaagaagaaaggaaggaggcgagggagaaggactcagagaaaagaggagaggaaaagagaggagaggagaggaaagaagtgagggcgggggaggtccgggaaggggaatggggagaggggagggaacgggaaagagagcaggagaggaggggagaaggaggggaggcagcagggtgatggagggagagggaaaggcagagcccagttggagctggagaagccagctggcagggcctggggaggaggaatggatgcggagcgggcactgccacctctcccgtacccctggggctctgtggagctccatcctggcctcctggtgccccagctgagagcagccccccagcatcatcaacctaggcccgggcgggggcggggaggggggcggtggggcggggcgctgggcttggaggagtggaaggcacaaggcagccgcagccctgttctgggggctctccagccaatatgtccttgccctttggtggccactgggacacagggcttgggagccctaggggaggggcaaggaggcctcccctgatactccagggtctctccagggagggcttcctggaggagagggtgggagggactggggctccctttttcctgcctcttggtggagccaggctgaaaaccaaacccagagagggccccaggagggtgctggggacacagtgacaaacaagacagccacagccaggcccacacagggcagtcctacagcagagacggtagctgcacaaatcatgatgaataaggcattaaagaatgacaagggggtagcgggcagggagcactggtcccctgggcctggcctccgcagaggtcgcagaagacctccctgaagagggtgcctgaggaccagggtggctgacgaggggaggagagactggtggaggcaagagggacaggggtggtctggatggggacccccagccacagacctaagagcttgagaggggatcactatggccagtggcagggagggggtcatttggcctgagaccagcccttgtcttgtggtggctggaagcttaggaaaggttttatagagaaaagagactagattgccaaagcttactcagaatggtagggacaagagtggacacagaagccggttgggagtgtggcactgagatccaggggagatggtggcagctggctgagacagtgtgggaggtacaggggacagggcatggtgtgagggtgaaggaggcgaaggaggggctggggaggctccttgggccctggcatgtgcagtgggtggacactggtgctgtccccgaggcagaggacagcatgggggagcaggttcatgggaggccaggcatttgttttgagacatggtgggggcagccaggaacggtgtgccagggggaggaacagcttgagcaaaggtgcagagaggagacaggcaaagagaaccacatgtgacatggtgggacatgccggaatcttccagagaggtgggccacatgtgacatggtgggacatgccggaatcttccagagaggtgggcctctgatgcaagcagacgggtctgccctggatctgcaggcagtggacagctatgggcatgtggg

SEQ ID NO: 17385 - DNA, 848 bp, Artificial sequence
  DNA replication origin
gtggcactgagatccaggggagatggtggcagctggctgagacagtgtgggaggtacaggggacagggcatggtgtgagggtgaaggaggcgaaggaggggctggggaggctccttgggccctggcatgtgcagtgggtggacactggtgctgtccccgaggcagaggacagcatgggggagcaggttcatgggaggccaggcatttgttttgagacatggtgggggcagccaggaacggtgtgccagggggaggaacagcttgagcaaaggtgcagagaggagacaggcaaagagaaccacatgtgacatggtgggacatgccggaatcttccagagaggtgggccacatgtgacatggtgggacatgccggaatcttccagagaggtgggcctctgatgcaagcagacgggtctgccctggatctgcaggcagtggacagctatgggcatgtgggagcgggagaggggaagggagcttccagctctagacacagtgagggtgcccagcagccagggacccaggctggtggtgggggagtgtcactggggcaggtgtcagggccttagctctgggacagcatgtgtgtgtgttagaatgagtgtaaaagtatgagagggagtgcgagagtgtgtgtgtatgagtgtgtatatgaatgtgagtgtgtgagtattcgtgtgtgtgtatatgagtgtgtgagtgtatatgtgtgagtgtgagtgtatatgtgtgtgagtgtgaatgtgtgtgagagtgtatatgtgagtgtgcgtgtgtgagtgagtgtataagtgagtgtgagtgtgtgtgagactgtcccttgcactaagtgccctgccctccacttg

SEQ ID NO: 17386 - DNA, 1280 bp, Artificial sequence
  DNA replication origin
ccctccttccctcgcggtccgccgggtccgcccagctctcgtgggattgggctggtgtcttctgcacccaatcaggtggtgtgggcaccgcactgcgtcactcccctgctcccggaccatctgcggctccctattaccacctctacattctggtttacagccttgagtagggcccagcaccgcgggtaggctcgggtgtcccactctccagcaccgggggtcctcctctctggttgggctgtgggttgaggggctctggaccagacaccggcctaccccgtgagcctcctcctatttttctttctctttctctctctcctctccctctgttcctgtgtgtctgacagcctctctgtcacgcacacacattgtattgcttctgtcagtagactgaatgcattcggtgccacctagataccagccaggtcctgggccttgcactgggccctggacggcacctgggctgagccggaaacagcccctgccctctgagaactcaggccctggcaggcagagtggaggctgcccagggaggagggtaaaagctgaactctggagtccagtcagtagctttgggtttaaattccgcccttccacttcctggctgggtgtgtccttgggcaaattatacttggaacctcagctggcccagctgtcaaatgggaatagaattgtcagtcggcgccacctcatggggctaggttgggagggtttaaggagataacaccagtagctcttggcatacacggtcccttttagtaagcttccagcatggaaggaagtacgaggacagagactggacaagaaccgagggtccatttggagtccttagaatcgatgcctttgagcagacagactccccagcagccctgcaggcatcatcagagaataaccgagttttctaaccccctcatgtcagaccactatcattcaagcacaaccatgggtgtgagccccagttgggaaagtttactattaaggctctaaaagaagcctgcaaatactggagcccagtgcataaatagagagggagcctcagctgagacgcctgagctaagtgtccaggaggcagggggatttgggccagggctggtgggtgtatcatggcactccaggaacaaacagggagccaaaggcaaaggtccaaagcatgacttccacaaggacacacacacactcagaccaaccagggtcaaggctccagttcttgtttcacgggtcctggtggagcctggccgcttgcctctggacacagcagcccgggaagtcaccaccttccg

SEQ ID NO: 17387 - DNA, 783 bp, Artificial sequence
  DNA replication origin
gcggggcaatggagacaaggacagctcaaagtggtctgtgcatggcagggatggcacaggagtgctagggagcccaggggagacccccgggcagtgtgggtgaaatcagcacagctggtggaggggagacgtcccgaggagccccgcagggtccgtgcaactggcccatatcccactggtttggtgccgtcagggtccttggcaggctcccagcccactccagcctggctcacctttggcggcacccccttttcctcagggctgttgccatcgagatgacttctatccttgcttccctttcgccggggctccctggggactgcctccagtggcctggccgccaggccaccccatccgctgcgcctggctgtcctgcagggtttgtggcctggtggctgaggaggggactgagggtccccgcagtggaggctggagcaggatggccagaggacagtccccaggggagtgagcagccaaggggagggtcccagggggcgtcggggagagggaggctccgaggacccgggctggtggtcttgtcctggcactgggacgggatagcctgggcttggggatcttgtgtgctggggccccggtatgcacgtgggaatggtggggtgggagaggagagtgaggcagagttggatggagatgagttttcagggtgtgcagggtaagaaggagacagacagggaaaaagctagactgagccccagcggacaggggtgaggcggggaccaccatggtggggatgtggggacagggtgtctctttggaaggtgt

SEQ ID NO: 17388 - DNA, 1423 bp, Artificial sequence
  DNA replication origin
tacttttaattgcaaaaaccacagttacttttgcaccaacctaatacactctggaaagacggccctggctgctgctgcgtggaaaatggcttgaatggagcaaagccgcagccctgggtagctataagggatcacccgggcagagggaatggggtctggatcagtggcaagaggtgggagaaaagttgacatattccagcattattggtgattgactttcttttacttttactttttttttttttttttttttgagacggagttttgctcttgttgcccaggctggagtgcaatggtgcaatctcggctcactgcaacctccgcctcccaggctcaagcaattctgcctcagcctcccgagtagctgggattacaggcatgcgccaccacacccagctgattttgtatttctagtagagtcggggtttctccatgttggtcagcctggtctcaaactccctgagagggaagcatgaaggagaagcaggtggggaagactggggtggagggaacctgggtggcccacagggacacctaggggaggtgttcaagggcagcagacgtgatggttctggcgttcggaaggtgattagaccggagatggaagtctaggaagccatgagtgtgatggacactgcccgggagagctgagggccagaacataccgtcagttactcgagaggtgaagcaacaagcgccacgtgggcggcctcatgagtgacctgcagagagccagcagggaaaccgaaggatacgtgtcagagattgggttagagtgacaaggccattgcttaaaggtcaagtctggtgaggctggtctgggttcccccagctggggctggcaccagggcggaactgtcacaggatattgtatggaaagtggtaggcatgaggagttctgggaggggtgggatctgtggggacagagggttctggaagaggggggtgagcttaaagtgcttctgaggacagtgagggctaggtggccaggggcagtgtggagctagggatatctgaccttcagacctcagaatggggccgaggaggcagtgatcaggtcagggtgtctgtggtacagggggcacagtggaggtccctgaggatgatggggtgcaggaagggagaggccagcgtgtcggccagggtgtctttctgggtacccagaagggacactctgagtggggagagaggactctgggtgaccccaggtctttagaggatgaggggtcacaccagaaggtgagtagctgatccccggtgcaggggtgacaggaacacagagagagggtgttcggggttggggtaaagtgttctgaattactgagatatcgcccgcaagctgattttctgcaccgggggctacatcgctgtcagccaggatgcagcccaaggacggacatgcttgtgtgtctggcttgcctgg

SEQ ID NO: 17389 - DNA, 1709 bp, Artificial sequence
  DNA replication origin
cgcgcgcgggcggggctgcgcgccgggctgggggccttgctcgcagctgccggcgcgcaattatcgggaaaaaactggggcggctgccgcggtgaaattagttatcgatccctcggtggggccgcggggccgcgcttggcgctgagggctgcagacccggccaagcccgctgggcggggcgggggcctggggggcggcgggggcgggccctccccctgctccggcctctccctcctccccctcctcctccctcctcctcccgcccgcgctcccctctcccattcatcctgccgccgtatcgacccgcggccgaccccgcgcggccaggcgcccccgcccgctgccctctcctttcccagcccggcctcccccgcgggggctgtcaccgagcgcctggcacggccgggccatgccccggggaaggagggaccagggccgggggcgggagccagcccttgtgctcgcagccctgggttcggagcccagctgcccgggaaggtttccagatctccctgagcctcagtttccccatctgtaaactgggtggtggtggcttcgtcccccgctttgagaggacagcaggagaggcgtcctgagaagtgagttcgcctggaagctgccgggctgtagtttgcgttgataccaccgatcttcccggtcactctaggagacgggccatatccccgttttacaaatgaggaaactaactcagcgaggggagacgccgtgtccagggacacacagtaagcaggtggcccaggaggaccccagaacccggctggaggtggcggtggggggcgaggggtgcctgcggaaggagaggaacaggagcagcgggaggtcagcgctggcacctgcagccctgtcagcctgcgggggtgcggaagtttgggaggtcttagcagagtggtgctgacagatcgtagagcgtgggtggaggtcagggctccccagccctcgctgagccattggctcggcagcctcctggttggagaggaagagtggggagggacagaggaaggagagggaagcaaagaggagaaggggagtgtctttgcccagagccagcctgccaccctctcctttcccagcactaggctgcatttggaagggaggcgccaggctggagagcaggggatgtgagttccaatcctgaggctccactaggtggtgtgaccttgagcaaggccctgcccctccccaggcctcctacaaagatggtatttggtcctatgtccctcaaggctccttcgggctcccctctgcctgccagccacagcctcatgcatctcagagtctcagaacattttttttttttttttttttttgagaaagagtcactctgtcacccaggctgaagtgcagtggcatgatctcagctcactgcaacctccacctcccgggttcaagggattttcccgcctcagcctcctgagtagctgagattacaggtgtgcaccaccatgcctggctaatgttttttgtattttagcagagatgggggttttaccatgttgcccaggctgatctcgaacccctgagctaaggcaatccgcccactcagcctcccaaagtgctaagattacaggcgtgagtcactgcgctcggccctcagcacatcttcatccagcatctactgtgtgccaggactgtgctgggcacagcagatacagctgaggacaagacagcccctgtcacagctctctcgg

SEQ ID NO: 17390 - DNA, 2269 bp, Artificial sequence
  DNA replication origin
ggggcgcctggccgcgcggggtcggccgcgggtcgatacggcggcaggatgaatgggagaggggagcgcgggcgggaggaggagggaggaggagggggaggagggagaggccggagcagggggagggcccgcccccgccgccccccaggcccccgccccgcccagcgggcttggccgggtctgcagccctcagcgccaagcgcggccccgcggccccaccgagggatcgataactaatttcaccgcggcagccgccccagttttttcccgataattgcgcgccggcagctgcgagcaaggcccccagcccggcgcgcagccccgcccgcgcgcgatcaattgacaccgccaccgggcggcaggaaaactcatttttctctccctccccggctccgggtgggcgcgggctgagctctgccaagggccgggggctacgcggggccggggccggggccggggccggggccaggccagggagggagggcagggcccgaggagggggcgggggcgcgggcgcgggtgtgggaaggaggcttgcaaggaatccgaggaggcggggtgcctcagtttcttcactctaccacaggggcgtggccgaaggcgtcagggacgtggggtgcgggcggggctgtcccagcccctctcagctgttggcggactggctggctggtgggaggaagggctaagtcaagcgccacggcctgaatgcgtgggttcgactctggactcccaccagggaccactgtgtgaggttgcatccgttcctctggactcccaccagggaccactgtgtgaggttgcatccgttccttcccttcgtctcttcctctctgagcctcagtttccccatcttctgaaaggggcctggcatatcctgggcaggcagatggtgcatcagaggcagtgatgcccacaaggaagtgctccccacaggtggcttggaggaaatcctccttcctcagcactcatggaggccccctgtgggccaggcactgttataggccttccgggtgaggaccaagcagtgaccacagctgacaaaacccctaccgttgtggaaggaacattctactgaggccatggacgtacaatacccaagtaagcagtgagaagatgccacttgccatggagaaaaatgaagcaaggtcagcaggacagggtgtggggtgcaaaggcaatgcagcccccaggacccatggtgggcctcaccctaggccctccttgcaaagctcagagctgctcactcccaaactgccggttgttcaaggtcatgggaaacctgcagacttggcattttccaatgaggatggccaggaggagagagaccaagaggaaggagaagccaggaggtggggtgggacagtctccctctggaagagtccataagagggccagagagagagagaggggtggggactggagggcaccagggcaaagggggtacagtcagagctccaatggacacagtgtcctggggggtcaggtcaagagagacttgggtttgctggcctggtcccagctgggccagtgaggcccagggaagggcaggggctcgcccagccacagtacttatgggggacagagatgggctcctaaatcctgccaccaggcacagagaagggcaagaggggccagagaggaaaggaggaaagagactcatggagcgggggtgccattctctgtttagaggggtcaggagccccaatttgcttcccagaggccagctaaagcttcctgggagcaccatgggtggtgctgggacttctacaggactcagcatgactcaaagggccctggggaatgtgttctgttccccagtcccccaccccccagctaccagaatgacagaggctccccgatggaggtgggtaagccgggcaggggtggcggcctaaggctgctggggaagtggggtgttccaggactgagcagacctcctcccccgcctcggtttcttcatcttaaaaatggagctggtgttgaggtgctgaggttctgtcaatctttcttccctccaaattcctggcacgcccaaccccacgtctgggttgagagtagtgactcagcagaaaatgaaggctactgctagcaaccaaatgaggttagcagggggactggcaggacgccgtgggctgggattcgaaacagcacatagctgggtctcacccgcctgaggccccatctatccaaccacctaacatttactcatcattcagcaaatatttagtgaacaccaactatgtgtgaggcactatgtgggggagtgagt

SEQ ID NO: 17391 - DNA, 1202 bp, Artificial sequence
  DNA replication origin
ttgtgactgttggggactttgtgaggttctgctgcagttacagccttatgctctgttgaagctatgggcagggttgacatttgcggacagttttgagacatggaaacttgatacttttaagatggtggagacttgtgaagatggcggcactcttgtcctattagacacagcctgttgggggcccctctctcttggctcctcaggggccagcatggccacctcaatcccaccagcttcgagacctcaacttctctgtgggcctcagtgtcctcatctgcaacttggaacaaaaactctgtcctcagccagcagccctggggagctgggagaaaccaggcaatcagcccactaggtgggcagaggagagggttccaggagacagctgcaaagcctcctgggactctgaggacagagaaccctgggggtggggctggagctttctaggggctgccagtggttgaacccaagggccgaggcggcagctgggggccctctgcagtgaggaggaggtcccggctggaggtcgggagaggggtcacccagctttgcaatctgatgggcagggaggagaaagaggctatggtgcgcctgcatgggtgcattggaagctataaggctccagtgcgcggggccgatgggctctaggaccctggaattctctcagcacccgcccacacactgaccagtccccaaggcttattagtattgtgatcgctattatcgaaggaccccctctccctgtctcctgcgcccacccacagctgtccagactgggggatgcgaggatgccctccaggtgtccacagctggggttctgggccagggattaccagagtctgagcagccttgggggacgctgaggcagggggccggggaggagggcacccgggaagagggtagggcaggaggtttatgggaggccccacaggaagagaggacgcccttccctcccatcccccgcagggaggagctgaggctggagcctgggaggggaagatgggaaaggcgctcctggcagaaggaacagcgtgtgctaaggccggagtgaggcagtagctgagaagcagttctgtctggccaaggggccaggagggaggaagaaacgggtggcgcgcagggcacccacggcagggccttgaatgccgggataactcattcctcgctcctagcgcggggctgggccgcccttgggccctggggag

SEQ ID NO: 17392 - DNA, 1800 bp, Artificial sequence
  DNA replication origin
cttcactctcccctttctccccctcccgcccctcccctcctcctccccgctctccccggccctgtcccgggaaggctggaccggcccgcggcttgccctttcaagtcggcctcccggagtctccggagccgtccgagcgctggggccgctggcgcggacttcaaagcccgccgcccccagccagatccggttgcgggtggggcgggcgagctgggagggaggcgggtttcggtggattcccctttcatcccgcggctgcagccgggcgcagacctcggggaggcccggcgcgtccccgctgggcaagtccctgcagggcagcgaccgggaacggagggctggggacgccacgaggccgcgccgcagggcgggggaggcctgaacccagactgggggcttcggacccgcctgcgctgtgggacctcaggccagcgcctacctgtcgctgggcctcagctttcctgaatgccctactccctgcccaggactcctctggggaggggcattcgggaacattcagtggcccttggacagctgagataggaacaggaagctaagctgggagcccgggctctccttggggtacctgcccgaccccacccatcccaccggagaggaaccgcttcctgcatcagccaagccctgcccgcagtgtaacccgtggtccagcctggccctctctgggcctcagcttcctggaaggctgagggggtggcggctgaatgccctccctccgggttgaggtgtagcgcattccttcttgccgtcctgtttcccggtccctaaagtaagggtggagggaaatggctctccctttctggtgtaaccataaggaagtggctgcctgacattctgtagccgtccgcgtgccccatccaagccccacagagccctgtgtgtagattaagaacatcctttttttaggtgaacagcctgaggcagagggggtgtcgcttgccccaggtctcagctggcaggaaaactgggacttgacacaaagttacttgggctttcctccaccttcctccctgcccgtggtccccactgattgcaaaacagtcataggggaggtgagtccaggctgggaatttggaaagcagacactgacataacgtggggtgcaggcgcaggagtagtatcacccccgctttacagacccagaaacggacaccgagaggttgcgaagccagacaaggggcagagctgggtattgacgcagatttttggggccccagagacttgaggtttagccactgcctctggggtgagaggggcagggcacttactgtgtgtcaggcccaggctgggaagcatcttgatcaacacaagaaccccagctgggaggtggtggtgtaggaaaggggtccagatccagaccccaagagagggttcttggatctctcgcaagaaagaattcagggtgagtccataaagtaaaagcaagtttattaagaaagtaaaggaataggccgggcatggtggctcatgcctataatcccagcactttaggaggccgaggtgtgcggatcacggggtcaagagatcgagatcattctggccaacatggtgaaaccccatctctactaaaaaatacaaaaattagctgggcgtagtggtgcgcgcctgtagtcccagctactcgggaggctgaggctggagaacagcttaaacctgggaggcggaggttgcggtgagccaagatcacaccacagcactccagcctagcaacagagcgagactccgtcttaaagaagaagaagaaaaaaaaaaaaagtaaaggaataggccaggcacggcggc

SEQ ID NO: 17393 - DNA, 1563 bp, Artificial sequence
  DNA replication origin
cccacacggtacacagacaaaacaacgccccacagacacccccttcagacacacacaccacacacatacccggactcctgccctacaaacagccggtgaacacaggccgacctcacacatacacggcctctcacggggtctcccagggccgcagcccccacattcggggtcatctgctgccctggaggcccagacgcctccccctggccctctgtagccacttgtctgtccaccagcatgtcccccaccatgaacaggggatgaggaagagggagcgaggcattcaggggatggacccaaccccagctcttccccgggggccctccgggggcctatctctcaccctctttggcagagaccccagattgggggcctccccaggggccccaacagggcccttttccgtggggcatttccactcagggctggcgggggtggggtggggtttggggtgggggggctgcccctcctgggcttcaggaagcagcatgtcagggaggccaggaaagctctgctccccccaactcagacccatctgagcagctgggatcaaggcaggcgcaccctccaaccccacgcctgccattggtcatggacagtcctgtgcccagccagggcaggggagagtggcagcccggtctagttggggggagggggaggaatgactctgacccaaggcagaaggcagagctgggagaggcaggaggtcactgcccctttctaggtgtccccacctccccacgcctctgcacccctgcaagctggctccttagcccgtttgctgataaggacactgaaaccctgagggctcaggcggtctcacctgggcgtgctggcggtgcccactggagctggaactggtcctacagatgtcctgagccagcagagccctcggcggcgcacacaggagctctctcctaagccgctctctgtacagcctttggttgttggggaagccagggcccagagaggctcaactctttctcaagatcacacagtgaccaggtgttggagtgggcattcgcactcagcacctcttcacggggaagccccgtctcccgctgagcgcagtcctgtggaggctgcttcttcctgccgcacatggggcacctcggagcagggaggatcagggcaaggtcaaggaaggagaggcgtttatttggagagggtggaactgggcaggtgcacagggtccggaaggagctggaagcctcaaggctggtgggcaggacccacgactggagtggggaagagggcgctggctccaggcaggagcctggtgggagggagaggagggagccaggagctagggagccctgtagatgcagggccaagggaagccagccccaagtggggctccagggatggcagctgccccacgggccgattgccattctgcaggcggctcattcagctctgttatggactgaacgtgtccccccaaaattcatatgctggaaccccaggtctgatgtgatggtttgaggaggtggggccgttgaggggtgatcaggtcatgagggtggagccctcacaagtgggattcctgcccttataaaagag

SEQ ID NO: 17394 - DNA, 961 bp, Artificial sequence
  DNA replication origin
gaccgcctgagccctcagggtttcagtgtccttatcagcaaacgggctaaggagccagcttgcaggggtgcagaggcgtggggaggtggggacacctagaaaggggcagtgacctcctgcctctcccagctctgccttctgccttgggtcagagtcattcctccccctccccccaactagaccgggctgccactctcccctgccctggctgggcacaggactgtccatgaccaatggcaggcgtggggttggagggtgcgcctgccttgatcccagctgctcagatgggtctgagttggggggagcagagctttcctggcctccctgacatgctgcttcctgaagcccaggaggggcagcccccccaccccaaaccccaccccacccccgccagccctgagtggaaatgccccacggaaaagggccctgttggggcccctggggaggcccccaatctggggtctctgccaaagagggtgagagataggcccccggagggcccccggggaagagctggggttgggtccatcccctgaatgcctcgctccctcttcctcatcccctgttcatggtgggggacatgctggtggacagacaagtggctacagagggccagggggaggcgtctgggcctccagggcagcagatgaccccgaatgtgggggctgcggccctgggagaccccgtgagaggccgtgtatgtgtgaggtcggcctgtgttcaccggctgtttgtagggcaggagtccgggtatgtgtgtggtgtgtgtgtctgaagggggtgtctgtggggcgttgttttgtctgtgtaccgtgtgggtgtggccctgtggtgtgcctgtgtgtgtctcggggtgcgtatctcggtggtgggtgtgagtgccgaaagcggcgggactgaggcttccgtcctccatctgtggtctgcggggagggagtggacagcgcagggagcggacagg

SEQ ID NO: 17395 - DNA, 1199 bp, Artificial sequence
  DNA replication origin
cctgcaggccccgccccccccccaccggcgtggtgcccccggcgcgagcaagggcgtggagtccggggtcgcgggggcgccgagacccgccccgggggctccacgcggactccggcttcagtgctcggcgctgccgcacggctgcaagcctagcaattttgggctgaacaacaaaagcgagagagagggaagttggggggcgggggcggcgcgtttccccccacccgccagggccggtcgtgggctcggagcaggtgccaggaggtcgcgcggccggagcggggctgtgcggagccagcagcgcggaggcggaggcgggcgggcgcgagcgccgcgcgaggggaaaagtttccgaccctggagcgagaggctgagaagtttcggccgcgccaggcggcgccaaagccaggccaacactgcccccgcgtgggcgcgccgcggtgctgcagccggcgcaggggccggggcccgccgcgacccttggggtaaactgaggctcagagagggcgacgtgggctgcgcaaggccacctggaggaggggccgtagaatcaggcctgctgagacgggggacggggcgtgaatgtccagaaagggagacagaagggaggggacgtcccagggactgaatcccactcctcgtcctagatgtgtctccacccccttccttccagttacctccagagtccagcaatcaggtacccggtggaggggcggtggcagtgctgtcttcttcccatccctgcagagtttgtctaaactaaccctagctctattgcccttcttctggagttagggcgcctctcccaaaaggcgtcccccatccacaacccatcccggccctaaggacccccaccagccaccgcccaggccagtcccaccgtttgcagcccattcctttgccattaaacaaggcgccagggtgtggattccctgctgtttcctcagcggccaggaggtggcgagaaagacccggatcctgggcaatggcgcgggtctgggggccactgacagcttcagggaaagaggcggcggctcaaactttctccagggggctggaacgcaggtgtggcaggggcaaacctggtgggcagggtctgccaccttgtctttcgccacctcctgatgcagatttgaacatccaccccctcatccccagactaggagagaaaccgtgggccccagcccgtcccacacagg

SEQ ID NO: 17396 - DNA, 1015 bp, Artificial sequence
  DNA replication origin
ttccgacgcagcagcgacccgcggctgcccaagctgaccccgcccgcgctccgagcggctctgggcgcgcggggctccggggactggaggatcccggggggcggcgccgcgtggtggccggaaggggacgccaagcccggggtgggcgtcggacgcctcccgccgcgcctgcccgccttgctcaccgcgacccggcgggccgtgcggaagcgggggctgctgcggtccctgctgccgcctcccctgctgtcggccggcgcgtcccgggaatcggcgcccaggcagccagggcctggagagcgcgagcgcccccggaggcgcgtggccagggaggaccccgacttcttgggcgccttcctaggagagctcctccccagcaggttccgtgagttcctgcaccagctccaggagaagtgcgccgaggagccggagccactgagtgaggccccgcggggcccggggggcgggcccgagtcatttccggtggggggtggtcccttgtgtccccgcacccaccaccccaccacccaggctagaaggatgctaatgttagctgagtatctcagagccctcgcaacccgtccttgagggctggtctgccatcaccccgaggccacatgactagaaaggaccgtcccccagccaaggctcacaactgtttcctcctggctccagcatccccagcaccgcaacatcaaaggggtgtattagagcactgcccagggtctccgcggtgtcccaactgttcattcctcccagacctgtggtaagcgtcagtccgcttcttggtggggacggggttgccatcgatgtttccagggcgggacagcctggccactcatgccagatgtggcctgtttgtctttaaggggccagtcatcgcacctccaggatagtcttacgaagatttcgctccagcagacacctattctggggcccctgaagggtgatcactcacaattcaccactgtcagaaaggccaaccagtgagtgatgggcgggataagggtagggt

SEQ ID NO: 17397 - DNA, 1446 bp, Artificial sequence
  DNA replication origin
gagcaggtggggtccgcggccgccggagcgttccggtcggcgtctgggcatctcggcctcggcagaaagcgcgacggccctgctgcgcggggcccgcggcgatgccgttcctgcacggcttccggaggatcatcttcgagtaccagccgctggtggatgcgattctgggctccctggggatccaggaccccgagcggcaggagtctctggaccggtaactcaccccctcccgtgagctggccgaggccgctccgaccccgcagcgtcccactttatcaccacaagccgggcggggtggatgcgtcccccttgacagaggaagggacgggcggaagccggggttgcgtggctcggagtgcgcgctgccccgcgcggatcccactcctgccccttgcatggcggagacgaagggcggggagggcccgagggcggaggcccgcgggttgtcgcagggcctgcgcctcagccccaccctgtcgcctgcctgtcctgtgccaccccccggcgtggcagaggagcagggtggaatccgtgaggcctcagatgttaccccagagcagtgtgaaggtgggcttttgtagcagagtttgcgtttttatagacaagagctggtctgtcgtggacctgcaggaaaggggtcgggagcgaatctgcattcactgcccatggtactaggcacctggggtccatcagtggctcagcaaaacccccgccttcttggcgcatgtgctccagaggagagactgacaagtaattgtacggcggcacgcgaggtggaagggaggggagagcagaaggaaggggctcggctcaggtgttgagggggttgtcagttggtatttccaacacgtggtaatgatgagtctcgccatccagggactctggtggaaacgtaggctttcttcatcaatatcagctgaaggtctcaatgtgaggggagggaggaggctgtgttgctgtcctggctgcaggtgttgccggggctggggtcctgcgggtttgaggatggaagggctttctgaggaagaagcatcaaagtcgggcttgggctcttggcctccaggctggtggtcccttcagtcccagcagcccaggtgtgtgaggctttgtacctaagtctgcgaccggactctgggcaacgcgggaggagagcgcagacagacccagcccattctccgcaaatcccagtctgctcccgtattaagagatgcagcgtggccctctctctacttcagagcttcccccaagcccctgtgacccacagagccagggccctgcttgctgatgatgatagcaggactaaagcccaccaacccacaggctgcgcggtcacccggtcccacagctgtgcctaccctcagcctctctcctgtcccaggcccagttatgtcgccagcgaggagagccgaatccttgttctcactgagctgctggagaggaaagccc

SEQ ID NO: 17398 - DNA, 1249 bp, Artificial sequence
  DNA replication origin
cacagtgctgggattacaggcgtgagccactgtgcccggcctactcggcctcattttgaagtcgattcctttccagcgcgggagggggtgggggcggacacaaacaacacacgctgtgaggattaatgtattataatgtattgctaggctttccttaaaaatagtgttcccggctgggtgcggtggctcacgcctgtaatcccagcactgtgggaggccgaggcaggtggatcacctgaggtcagacgctggaaaccagactggccaacatggtgaaacccctcctctactaaaaatacaaaaattacccgggcatggtgatgcacacctgtaatcccagctactcgagaggctgaggcaggagaagcgcttgaagtcaggaggcggaggttgcagcgagccgagatcacgacactgcactccagcctgggcgacagagccagactcttgtctcaaaaaaataaaaataaataataataataaataataaataaaaataatggtccgcaggctttcagggatgtgtgcgggccggttttccatatgggaacagggaaaggatgtgctgaaggcttcctccggtaggcgactttggctgatgtgactttatgcctcgtagtgagggcagggcgacagagggacgggccggtgagcggctgtcctggagaaagagcagtggcatccggggggcttagggtctcaggtctgctcactccgcacatcttttctgtgctttcattgaaaaacaaaactgaaacaagagcggacacctaagtctgcctctctctttcctgtcacccgtctcaggctggctgtcctctgtgtgtgcgccaggaattctgcaacgaagcgcctgcctctccgcttggttttccttggggaagggcctggggcctcctggggggtgggcaccgggtgtgtgggtgtgtgtgggggacctggcagggagcagcgggggagaggcggggtggggggtcgcgtacaccccaggagcctgaggatgcgctgcctgctgggagagacagccttggggcgggtggtgtgcacagagctctgtcggccagcgcgggcgggcggggccgttgttgggggcgctgaggcgagtgaggctggagctgggagtggggggctcgtcgccttcgtctctgggccgccccctccacctgcggaggcgattgtaaagggaaggggggaatccctctgccatcacctcccagatacttgggggatggaaaacgacaaaacacgg

SEQ ID NO: 17399 - DNA, 863 bp, Artificial sequence
  DNA replication origin
ccgacgtcagcgccgggcgggccgcgaggctaggaggcggcgggagctgggcagagcgcggggcggccggggctctcgctccgacccgcgcccgcgacccttcctgggacccgagcccgagacccccgccggcccccccggggccgctcgcgggcatggacagcgcggccgccgccttcgccctggacaagccggcgctgggcccggggccgccgccgcctccacccgcgctggggcccggcgactgcgcccaggcgcgcaagaacttctcggtgagccacctcctggacctggaagaggtggcggcggccgggcggctggcggcgcgccccggggccagggccgaggcgcgggagggcgcagcacgggagccgtccgggggcagcagcggcagcgaggcggcgccgcaggatggtgagtacggccggccagggacgggggtggcggggccggggccggggccggggccggggcgcggggtccggggagccggcgcggggcgggcgaagatgcagggcgcgtggtcggcggcaggacttctgggggcgcgtgtaagtgacggtggacggcggttgaccagcactctgggctgggggagggggaccctcttcgggtcttggggtgcgtccccacggggaagtgcgctgccttcgctccccagtattcggctcccgaacagcctgggaagtgggtgtggctgctgccgggttacaactggggaaacagagacctgagtcgggcaaagccgctgagctgcacgttggggtttcaaacccgccccctcccgcacgagctagcgccgccccagctcctcctcggtcttaagttgggctctttggggggcgagggtgcctgcccacccc

SEQ ID NO: 17400 - DNA, 2170 bp, Artificial sequence
  DNA replication origin
gttgggctctttggggggcgagggtgcctgcccacccccccccaccctccagtttgccccgggagcagctgcctcggtggaacggcccagccaggcctctcttccccggcagaggtcaaaggtcatcaggaaggggctttaaaaacaaacaacccacccaagtggcctttttcaaaaagtgacacaggatggcagggtcctgagcccttggtaagaaggggagggacggggagaagatggagaaaaagcaaaggccccagccccggacggttcagtgggggaggggaggaccggagtcctcgcggctcagcacacactaaggatgggggcccggtgatctgaaaccaggcccctgtcccctagctctggggatgggccggcctgctgggggctctgggcccctgaagtgtgcccgcctgactccagcagccctcccacccgccccgggggaccctgttcccggcaccagcctccaggtctcagggtgcccaggctggtggctgcgttccttggcttttcagagacaggaggtgcagggaaaacagaggtggctgcagcctagtctgaatccatgtgcgtccacgaggacgcctgcgacacgcctgcctttcacggggcaccttctgccagcctgtggctgagatgaagccactggctccctcatggcagcggccaccactcactggccacagtggactggccactggctgcaccctccggggtgagtgtgaagccagcagacctcccaggagttggggtttagctcctcagtagaaaaggggagggagatgtccactctggcccggaggaaagcaggtgccctctggtttgtgctgggggaatgccctgccggcccaaggtcatttgaggacctcagcggctctgagccggtcccccaaccccaggacagaggagaggtcccggtttaccctgatgaagggagactccaggggttgggaagagaaggaggaacaacttgaaggtgaagggaaagaaggaaaggagaaggcaaggaaaggagagagagagggaggagagacagaggaagaggaaggaagggagaggagagaggggtgaggagggaaggaagggggccagggtgtctcgtactccagtcctggccaggggacggcctgcccatttctgacctacccctgctgtggggacagccagggaaggccgtgcttctcccggacacggtgttggaggtctctggtggcgggtttccccggggatcccagaacagctagtgtcagctggggatgtgggcgcctagacaaggcccttggcagcctccaggcagctgggtgtgcagtgggtctccccagcagctccctggggctagccaccctcctggagagcccatgaggcctccaggccttctcctaagaaggggcattggcacactgggagtacccaggcatgcttgggacacactgggtgtgggatcaggtggggtggggtctgggccaggctccaggaggcgctcgtgggctggtccgtcttggaagctgcctagctctgccctgaggacgatggagccctggcagggagagtccctgggctccgcccggggtgtggcccggatctgggtctacaggcagaaggtggagagaggggactgcagggcaggcgccagtttccaactcatccatctgggtcaggcggccccaccactgccacttgctgtggactcccaagtcctgaaggctccaaaggtgggggagatgggatccttctttccccatcatcgaccctttgaaagtgggcagccaaaccttgctgggcttgccgggactgcagaccccaggccagtgggctgagtcttgggttgcggcatcatcctccagtcctggacatacaggagcccggtcccctcaccacggatccagacatgcttggaggtgggttttcctgtggctcttggagttgttttcaggtccaaagaaagatggtctggccgggggcggtggctcacacctgtaaccccagtgctttgggaggctgaggtggttggatcactagaggtcaggagtttgagacaagtctggctaacatggtgaaaccccatctctactaaaaatacaaaattagccgggtgtggtggtgcatgcctgtaatctcagctactggagaagctgagacaggagaatcccttgaacccgggagg

SEQ ID NO: 17401 - DNA, 1023 bp, Artificial sequence
  DNA replication origin
ctcccagaaaactccagaaaagcagcttggagcagtagtgacagcgccggcttacacacctcccttgaggcctgaaaagaaccctgcgagtcagtgttgccatctgtgggataggaacaagggctgtggtatccctcaaagggcgtgtcgagccctgagtgggtgagggttctgggtaccatgcctagtccacagtaaagtgtctccactgcagctcctggagatgctctctgagggcctgtgagtcaggcgaggctgtcagaggcccagacaggcaaagcaacctgcccgaggcctcacagctgggaaaggagaggagggatttggttttggatcacaagtccaggcctccctctcctgcacagtccttgggctggaggagtcagggaaggggagctctcctggctgttggggagattctggctgaggcttgttggggactaaagcgggtgggaggggaggggcagcacggaacgggctctgtgcctatgttaggcgtttctgagtaggtgggggcaggaaggaaggtttgcggtggcttgtcccaggcaagaatgtggggtcaggctggacgcggcagaacttggggcacttccgtggtttcctagaccctaaaggacagtggctcacccagggtggaaggggaccttgggggtgatttaaggggacccaatgcttgcttgaagatacccttacagcagtgtaccaccctgggccagaggctgcgccagtggagcagaagggggtggccgtggtggggctgaaggaaggcgtgaggggacgtggtgagagtgaccgggaagcctcgtgggcacagcagctgtgtgctctgcatgtcggctggggcatcacaggcctcactggagttgtcctcctgccagccgtgtgaagcccattttatgaagagggaaactgaggtgtgaggtgaaggtcacaccgttcccattcctgtaagattccagcctggccctcctgttccaaaacccctgatctctaccactgcctgaagctgcccctggctcc

SEQ ID NO: 17402 - DNA, 1102 bp, Artificial sequence
  DNA replication origin
cgctagcaggggggcaggtttctgagaagccatctttccctcccccgggacagggccgaggggcgaggcggaccccacccgtctcgtgggtggctttcccatctggacggggagctggcttgctgggcgggggtctcccctccgcacgcgcgggtctggggtcggtccgaaatccaggggatgccagggccggcgcgccagccgccgccgcccagcccggccatgtgcgcgccagccagtgcgtgcgagcgcgccgcgctggtggcggccagagcggcgccgcggcacatctggttccagacgagcccctggcgcctgcctcgccgcagtcccgcggcccagacacacagacgttaatagatcccgcgcccagccccgcgctgcccgcgccgccgccgcccagctgctccgagggtgcgcgccccggccgggcgggagggggcacggcctaggggagggggagcgggacgcagcgctcccctgcagcccagccagctccctcctcgccttccttccagctcagacacctccctctccactcccgctctccaggcaggtcccgggtgggagccaggactgactgctctttcctatcctggcaccgagtgcaagggaatccaacccccgattagtgacaaaggcagttcctacgtgtccagctccggccaaggccaaggctaagggccaggccgggccgggcgcctatgggcgtgtctccacacacggtaaccctatgaggcaggtactgctgctaccgtccccgtttaacagtcgggataaccgagactagggagggaggtcagtcgcccaaggtcacacagcgagaaagctgcagagcggccattcagctggtctatcggactctggccccaggggggtccgcgctgcaccccctcttcaactgctagcccacacacctggaactcaaagtcaccttcacccggggcgcccctcccttgccctccctctgtcagggaccccctctgcacctgcaaccttgatcccttagcgagggtcctcccacccaagcatctggggaaagtgaagctttgtggggactctgcaggaatttgcccagctcctttcccttggcaaggcggca

SEQ ID NO: 17403 - DNA, 870 bp, Artificial sequence
  DNA replication origin
tgccccctcccgcccggccggggcgcgcaccctcggagcagctgggcggcggcggcgcgggcagcgcggggctgggcgcgggatctattaacgtctgtgtgtctgggccgcgggactgcggcgaggcaggcgccaggggctcgtctggaaccagatgtgccgcggcgccgctctggccgccaccagcgcggcgcgctcgcacgcactggctggcgcgcacatggccgggctgggcggcggcggctggcgcgccggccctggcatcccctggatttcggaccgaccccagacccgcgcgtgcggaggggagacccccgcccagcaagccagctccccgtccagatgggaaagccacccacgagacgggtggggtccgcctcgcccctcggccctgtcccgggggagggaaagatggcttctcagaaacctgcccccctgctagcgcccccgctgtctccaccccacaaagggctggggacgcttccccgccccccgaagtttgttttcctaagtttgtgcgtaagatttttcaaaattctgagtcagagcttcccctaagatgaggcctttggggcatgcgagaaacgccaaaatgtgggtgggggaggggagcgtggaggttggagggttttaagcgccgggattcggaagggggcttttcacccactgggtgagtacaagggcttcattgaggccggtcccagctccgcaccaaatctgtcttaaccacaaggtggtccctggtcctggctgctgtcagcaccgagccttcccgtccccaggcagcttcggggtgctctgcctttctggaccagccccttcagctctctgggccccctcgcagggcctataaagtgagcagtggagctg

SEQ ID NO: 17404 - DNA, 1347 bp, Artificial sequence
  DNA replication origin
ccccccgaagtttgttttcctaagtttgtgcgtaagatttttcaaaattctgagtcagagcttcccctaagatgaggcctttggggcatgcgagaaacgccaaaatgtgggtgggggaggggagcgtggaggttggagggttttaagcgccgggattcggaagggggcttttcacccactgggtgagtacaagggcttcattgaggccggtcccagctccgcaccaaatctgtcttaaccacaaggtggtccctggtcctggctgctgtcagcaccgagccttcccgtccccaggcagcttcggggtgctctgcctttctggaccagccccttcagctctctgggccccctcgcagggcctataaagtgagcagtggagctgggagctcccagcaggggagcttaggagaaatgggtggttggatggggcgggggggggggggggcgggggcacttaggctctgtctccatggttctccaccaaaaggaagcgtaagaccaggcggtggtgctgccaggccgggctgggccaggccaacccagtctggctgcagagaagagggcttgcccagggcttgggactcagcagttccccgagttccccctggtgtgcagcccttccccatgatcgggaggagggtgtttggtgaaacacacgtggcaagagcgggtttttcccgccacgcctgccttccttgttccggaaaaggggagctgggatgctgggtagggtgggggtgtcagccatgcacatcaactcagagactaatccctgctaggcgcgtgtgggcagaggttgagacaacccagactgggcagccaaggctttggccatttgtcagtactgggtggacgccccctcacgtcactacctcacgtcactaccatcccatctgaggccctatgggcccacttcacagggaaacaggcccagagaggagcggtcacaggctcaaagtcacagagctgggatgtggagaaggtaggattcccaccctgcctgctggactccagagatgaaaccttgggcttgggatcaaatcttcctggtgtctggaggctcaggaaacaaggtggttcgttcctaaactctaggaagtagagggaggatgctggcccagctggagggccatcaggatagcctgactgtcccttccctcccagggcatgctggaggcccttccccacaggaaggccgctgtgcctgttcctctgactatgagcaccagcaaagccaggctgaagcatttccctgtgggaggtgatttccctagcccatgctctggcctgtcaattaaaaaaatccatcaataggctgggcgcagtggctcacgcccataatcccag

SEQ ID NO: 17405 - DNA, 1307 bp, Artificial sequence
  DNA replication origin
ctacgcccagctaattttttgtatttttagtagagatggggtttcgccatgttggccaggctggtcttgaactcctgacctcaggtgatccacccacctcagcctccaaaagtactaggattacaggcgtgagccactgtgcctggcccccactttagttagaaggtacagcagctacacttgtgaataaagtgaggaccatctcccacctgcccccaatacacccctgaatactcttccccatactccatccggatttccaccacagaacgtggccccttcagatgtgcaaacacacctggggaagagtgaccgcccggtcgctgtgtgacttcttccttcggtggctggacggcttcctccctggccgcagcagggcctctgaccagcaggagagcctggggcaccagtgggggctggggtggaggggagggggagttctgctgaggtctacagctgctcagccccacctgactgtgagggccaggcctgtgccctggactgggggaggagggggagtcagatttgtgttttctggctcagtttggcctctgcctcgggtaagtgctttctggacctccatttgccattcttgcactgagaaaatattatgaaacgcaaggttcctggccgcagaggctgcgccatgctatgaggaggcaaagacaaaggaataattacagcaccactaaggctatgagggggtgctgcaggggcccagggagcacagacggggccccaaaccttgttgaaggcatctgggcaggcttcctggaggaggtatgcctgagaggatgaagagttcaccaaagaggggggaggggcaacggtgtttctggctgaggggactgcatgagtgtagccctggggcaggccagaagcttctctttgggccagtgggagctgttcccgggctggatctcctggtgccgggtgaaggtggagaggaacaggaactggctcaaacgaggtttgtgtggccgggactagatgtttggatgtcaccctgtctgtggggagccatggaggggatttgcttggtggagggacgtgccctgagcctccatgaggaagagggaccgtgggctaagagtgaaggagacagccccttgcggaggccagggcgggtgtccaggtgggaggggctgtggcctgggccagatggggacagagttggtggagctgggagatgtttcggatgcagcaaaaaaaaaaaaaaaaaaaaaaaaacaggaattggtgacttggtgatgggctggggagactgggagccttcaaagccagtttgcagactgggcacgttggct

SEQ ID NO: 17406 - DNA, 1287 bp, Artificial sequence
  DNA replication origin
ggcagatggggccttttaacccctgctggggagcggctgcctggggagggggcaactcacctgcggtggggggtgaaagagcggttttaaggggaccatccaagccaagaaagcaaggagcaaagagaagagctcagcagctctccccagacccctccaccttgagcttgggaagtggagggcggtggggaaagttggggaggaaaagtgtgagggttgatggtgtggaggggagatgtacggaggggcgtgggggtagggggagggagtggggatgggggagggatggggtatgaaagggaggcgtggggggtgtggagaaggggtggatatggaagggaggggtaggggtggggtgggtgttggggatgagtgtgggggaggggtgggtatggaaaggaggggcaggggtcggggtggttgtgggggaagattgggacatggaagggaggggtggggtggggtgggtgttggggatgtgtgtgggggaggattggggtatggaaggaagacagggtggggtggggtgggtgagggtgttgtgggagtggtgcgtatggaagggaggcttgggttgggctgggttgggggtgggtgtcggggagtggtgggtatggaagggaggtgggggtgggagacagatgggcatagaaatgaggtgtaagtgtgggaggggctaaagggatcagcagtgtggggtcacgagcctctggcccttatcagggagtctggggctgtgggtcacgccgggatgggcttggcatggctggctttgtttcctaagaggacctctggctctgccgtgggagggcagggggtgtggacagccaggcagtggacacagtgggcagtggcatggctcttgcttccccagtggcttggacagtcccctggctactcgcccaggagctggaggacccaggtgcgggggagagaagagaggggcagtacccaggatggtgtctgggctgctatgaggagcccattgaattttttaagggagagaaggaggccctggaggcctgtgctgctcccacccaagatcagacccaaccctcggggatggggagggccaggaagaggtcttctggctccacagccagggccctagggggccagggcccatctcccgggcagcagtggagcacagtaggccagcgaggcagggagggcatctcatggttttcttttttcttttctgagacaacagtcttgctctagcccaggctagagtgcagtggcacgatctcggctcactgcagcctccgcctcctgggttcaagcgat

SEQ ID NO: 17407 - DNA, 905 bp, Artificial sequence
  DNA replication origin
acctgcaaatgaaacatttgtttcacaaggtgtcatgaagacacctggctcaatcttagatgctcaattaaggtaaactcctttcatttccaaggggaaggagaggagcagggaagaggtttcctgagacctgtggtggattagagatgcccagagggtccccaaaggggatgtcctggcccttgtgtggtcagtccttcatggtggggacaggcccttactctgcagggccttaggcatccctggcccgcagatcagtctgtcctcttggagagtgttctatccttgaacaccaagcacatatttatggagcacctactgtgtcctggtcagagttctgggaattagagacacagaggacaaaagacaaggtccctgccctcctgaagctctcgtggcagtgggagaggagggcaataaacaaggactcagatggggtgataggagagagagcaggtgcctggggggtaggagtaagtctactgtcgacgggggaggtgggcttggagctgagggttagaagctgttagctgtgtggggcttggaggcaagagtccaggctgagaacacgttatatgtgaaaactccgaggcaggagagagaaggggcggggggcctgagaacgagggagcctgtgggatgagaacgagggaggctgtgggatgagaacgagggaggctatgggatgagaaaggctctctgagaggaaagtgtgcacatcactggggctgggaggtcagaggaaggagggcacctttcttcccaagggttttgggaagccatcgacaggtaccaagcaagaatagcaggacccagttccttgtaaaaagaccacctgtccctgttgtagggagaatgactcagagaggatggggtgaagatgtttgcacttaccgtgacagaca

SEQ ID NO: 17408 - DNA, 1585 bp, Artificial sequence
  DNA replication origin
tggcggatcccaaagtgctgggattacaggcgtgagccactgcacctggccctgactacatctctcttttttttttttttttctgagacagagtctcactgtgtcgcccaggctggagtgcagtggcgcgatctcggctcagtgcaagctccgcctcccgggttcaggccattctcctgcctcagcctcccgagtagctgggacaacaggtgcccgccaccatccccggctaattttttgtatttttagtagagacggggtctcaccgtgttagccaggatggtctccatctcctgacctcgtgatccgcccccctcggcctccgaaagtgctgggattacaggcgtgagccactgtgccaggccttttttttttttttttttttgagaccgagtacggtggcgcgatctcagctcactgcaacctctgccacccaggttcaagcgattctcctgcctcagcctcccaagtagctgggattacaggtgcgtgccaccgtgctcaggtaattttggtacttttaggtagagatggggtttcaccatgttggccaggctggtctcaaactcctggcctcaaatgatccgcccgcctcggcttccccaaaatgctgggattacaggcgtgagccacggcgccaggcccttggctccccatcttttaatggaaataacatcccctaccccactggactgttttggaaccaagtaagagaaatgttgtaggagagctttgtaactacctggactaagtgtgccttaactcagtggagccgggggctacagcaacacaaaggaaagagaagcagaggccagagttagtgagcaggtcacccggaccagtccgactggcctgcagacgagataatagcgggttctcttgcctggtacagttttatcttctgctcatgagggaagtgcagagtcgatacaaacaggtggacaaagttactcttcagaccttttgggtgaagattttcagccacaatttgactgacaaaattcttgcctgtgccagcccagccgtgtaaggaaagggtcagtggtttcttgggatttttgttgttcctgaagccagtcagcgccttgaaaatcacttccgtggctagatgctgtccaaacagcttctcctccaaatccagcttgagagctgcaagaacagccccagaacaaagagagaaacagaccttaaaaatgcatcagcaacgcagcactttcttagctggccaaagcaagaagcacagattatccagggacacagcagggtgtctgccacaccctagggccgaggcagtcaaacgatgccactttcaagattatgtggaggtccttaacgcttcggggtctgataaggaagctaaatgttcattcattcagagatgaaccatcgcttgactgagcgcttgctaatcccagccacccttgctgacctgcaggaaaaccaggggccaaatgtgggctttctgggcgacgcagcacgtctgaaaactacttaatagggttggcagggcgcagaagggccgcccgcctactttccgtttcttccacctgtgatcccaaggaacgggagctttagaaaggcgctg

SEQ ID NO: 17409 - DNA, 2143 bp, Artificial sequence
  DNA replication origin
gcctcagcctcccaaagggctgggattacaggcaggagccaccatgcctggcaaaaataacgtccataaacaaaaacacgtggccaacaggggcggagcagaaccgagtttccggaagcaaaacagggctttgtaccgaacaaagatggcggccgccggcgtcgggaggagggctgccctgaagaaagatggcctccgcgagaggaggaaccggaagcgtgggtctggcggctgcaccggttcgcggtcggcgcgagaacaagcagggtggcgcgggtccgggcatgaagctgggccgggccgtgctgggcctgctgctgctggcgccgtccgtggtgcaggcggtggagcccatcagcctgggactggccctggccggcgtcctcaccggctacatctacccgcgtctctactgcctcttcgccgagtgctgcgggcagaagcggagccttagccgggagggtaggctggggcgggggctggaggctggggctggggctggggctgggcgatggcactagggctgaactaggaccagggcatggagaatggaggatggaggccgggggatggcaccagggccgggctaggactagggctggagcggggcctgggggctggggctgggcgatggcactagggccgggttggggctggggctggggctgggggatggagcggggcccgggggctgggggtggggctgggggatcgcactagggctgggttaagaccagggcggttggctggggctaggggattgaggatggtggatggaggctgggggatggcagtagggccgggctaggactggggctggagcggagtttgggggctggggctcaggagcgggggctggggctggggctggggctgggggatggcactagggccaggccggggtaggggtcacatcccaggagggccgggcctgggcagagctgagtccgcgggggccggaccccggaagccaagcggccggcctgcaggatgaggcctggctcctcggccatgaccacagacgtgccagacttaagtcggagacctgaggagccaggctgcaggttggcctactttgcgctaagctgggggtggaccagtggtaacctccctccgaagtgggttctgcctcctttctagcctagcgggagacaggaaggatggtgaggactcttccgcagccgaccaggagggaccaaactgtttcctttcccggctctgccttggggtgggaggagcagcacaggggttaggggtgcaaactggtggcagtggcagtggcaccaaggggcttttcgggaaggagtcgggccagggctttagaataggcaggaccagcaaagggagggctccctggaccgccgtcccctctgggccaggagcttacagaccgcagtacttgaggtttcgcaaggtgcttggagggcgtctagacggctttgctggctttcttatgggctgtaaatgtggctacattttgccgctgtttcttccccactcctgattggctttgtctttcccagcactgcagaaggatctggacgacaacctctttggacagcatcttgcaaagaaaatcatcttaaatgccgtgtttggtttcataaacaacccaaagcccaagaaacctctcacgctctccctgcacgggtggacaggcaccggcaaaaatttcgtcagcaagatcatcgcagagaatatttacgagggtggtctgaacagtgactatgtccacctgtttgtggccacattgcactttccacatgcttcaaacatcaccttgtacaaggcaaggatggaagtttggaatcccttcctggatgtcatcgggtttggggtctctttgttgtgggatgagatttgggagttctatgttgaaatgagtgagcccggaaaacggttcatgtctcagttccccttggaaaggtgtagaagttaagagtttgagatgcgtggagcagttaataccatcaaagctttgtggtgggttctgaaaatcggtccagtgagtatgtagggtcatgggattttagaggtggacatgatcaaatccatcttagagatcaacacatctcactcatttttttatttttttctttattttgagacggagtttcactcttcttacccgggctggagtgca

SEQ ID NO: 17410 - DNA, 1096 bp, Artificial sequence
  DNA replication origin
gaggaggggagaggggcggcggcggccgggggggtcccgggctccgctcaccgggccgctgcgtctggcgtacctggcgaagccaggccctgtcagcccggagccgggctggggtcgccaatgctcagaggcccggcccacagaagcagccggtggcggcccggaactcacctgcactcgcaactgcgccgccgccgcctgtcagtcaagcgcgccccctctgaggcgacgcgcagggttgtggggccgtctggcgacgccccacctccttccctctgccgtccaatcggaagaggctgacgccaggagagggggcgtggccacgcggactgtgcgtgccgggggcggggccagacggggcaggcgctctgaccgctctgccgcgcgccggaagcagcctgggccgctgcgcagaggcgcggcggctgtacaactcggccgttgtcaccatgccggtcgtccggaagattttccgtcgccgccggggcgactcggagtcagaggaagatgagcaggactcagaggaggttcggtgcgtttggggcggggctcccataggcttggtaaagatagacttgtttgggggactcaccaccggctcggcgcttcgctgacattgttaactgtgagctcgggtggtggttccttctgcggacgcagaaattgaggctcaaggggtgaggccaccgccccaagctcgaacggttgagagagatgcctccgggatgcgcagtggctctgactcccggtgggtctaggcacaaggtcgtcctctggaccactgtgctggtggctcagtagctgggctgggatgccctcgaaggtgccttattggctctgttagctttggattccgcggggaatcactcagcttatgcattgctgcttcttcttctttttaaagattaaaactggaagagaccagagaggtacagaacttgaggaagaggcccaacggggtgaggtgggtaccacgcggggaggaggaggaggcggcggggacgacagacacatccgcgtccgggtcgctgtcacaaatatctcctcagacgtagatttttctcttgacacactgtacaccttccactgcccaact

SEQ ID NO: 17411 - DNA, 1119 bp, Artificial sequence
  DNA replication origin
cttagagcaatcggttaccacagggcgggtctgagatgaggaactttcacggttttctctctagcctttagctggtctttccttcagagttaagagaagcccaaacaggagactgatgaggccatccgccccaactcgtctttctcataagtttagttttgagagaaagtaagaaacggaggccggggctgggcgccgtggctcatgcctgtaatcccagcactttgggagcctgaggcaggcagatcacgaggtcaggagttcaagaccagcctggctaacatggtgaaaacccatctctattaaaaatacaacaattagcctggcgtggtggcaggtgcctgtaatcccagctacttgggaggctgaggcagaagaatcgcttcaacccaggaggcggaggttgcagtgagctgagatcgggccactgcactccagcctggacaacagagcaagactccgtcttaaaaaaaaaaaaaaggaaacggaggttgggtgcagtggctcatacctgtaatcccagcactttgagaggctgaagagggaggatgcatgagctcaggagttcaagaccagcctgggccacaacatagccagacctcatctctacaaaaaattaaaaaaaaattaaccagcatgttggcatgcgcctgtagtcccggctattcgggaagatgagttggaaggatggcttgagcccagggaggtcgaggctgcagcgagccaggatcacaccactgcacttcagcttgggcaacagagtgagaattcaactccagaaaaaaaagaaaagaaaagaaatgcatcaatttcctagaatggtacaaggaacatgaaggtccaattctctcagaaggaaactcttggctcttcagcagtacaatgtaaaatctttggtgaaaaggaaaacctgttgttctgtattcattccgcaataaaccgtgaaaagctcttcatctcaaggagagagaaaagaaacaaaagaaacacagacttctcaggccctgagtgcacgcaagatcagaaacaggggaggtgccatcatttaaaggaggaggtaggggtgggaggcagaatttttaaaaaagcattgggctagaaaatcccctattactggag

SEQ ID NO: 17412 - DNA, 1337 bp, Artificial sequence
  DNA replication origin
atgagctggggcaccgagctctgggtgagtgaggggctgggcccgcgggcagatgcggggcgcgcgctgcgtttccccgcggcctggggagggggcgcgggccgcgctgctgggcggaggcgagggcgcgctggtcggggtcctcgcggcctggggaggaggcggggttccaatgcccctcgtccgccttggcccgagcaggaggtgcgggccggcttgtccttcggaggcgaggggagttggtgcgggtccccggcggcctgaggaacggcgcgggcgggcctccctgtccccggcgccccggagcgggccgtgtgtgtcgggccgagccctaatcccccggggcgagccgcggatgcccggggagggccgggaccgggcgtgggggcgtggaggccccggctgcgcggcgctgcgttgggtctcggggcgccccggccgcgagttctgtcctggctccgcggaggcgctggcggatcgggcacttccccgggagcggggcggccggggcgagcgccgggggtcgggttttggggtgctggggcgagagtgcggtcttcgctctggaggcgaggacttctggcccgtggcggctccgggcgcacttgttctttcggggtagctcaatcctgagtgggatgtgggcactgcgacgtctggtctggaggggaaagtgggagttagggagagatcttacgtgatctacctcaggaagaggcgttcgcggggtcaatgatctttaacggttgctcggagaatagtttccagtggggaaagttggcggtgaggggcgccttgcggggatgcttggccgggggatgcgcacggtaaacgggcagccctcagggctgagggccgtccccggaaaggcgaggggctggctgtggatggagctcttttcctgccgtccccggattcctggggaaatcactgggcaggggatgggcagtgcggcggcccgggaaggagcagacgaaatctcagttactgcactgaaatgccctcaagatgagccatttcccaggatgaactctaaagtgcctgaactaccttttggaattctatttgcaaagggtgtggaggagaaagtgtagggtggtgttgctatctgagatgaggccaagaaatctcatatcaaaataaaacaaggttagagcaattacagaaacagagcacatcctcccttgttttttgttttgttttcttttgctttaattgtttttacataaccatttgttaggtacagaagcagctacggttgttattaccaaaatcctgagggcaatagctcccttaaattaagataattcattttataaacatcttctgcctaaaag

SEQ ID NO: 17413 - DNA, 1188 bp, Artificial sequence
  DNA replication origin
cagcaaaatggcccgaggaagcagcagccgcggccgccgcagcgcccgcccgccctacacccggagagcgggggaggggcgggaggggaggggcggggccggtctgacagctcgcgcacgcgcgcccgccccaccccggcccggccccctcccccgggctcccccggccgggtccgcgtcgccctggggtccggaaggacgcggagggaggtgtgagggacggcgggacccggatccctaggactccccctgccaatctggtaatgacttcttagtgaccactgtctgctcgcagtactagcgcttgccttggaacgcggcaggccctgggatcaccgatgctccgccgcggtctgagatcgctcccctgcgcgtatcgccgctctggatttaaggacaatactttcccctggcagccatgcgcgccgagcagagtcagcccgggaggctcttttcccaccgcccgagggaagcccgagagtcccgcaggctggcgcggtgggagtggggcggtggtaactgcgcgctgtgcgaatagagacgtcgaggcaagcgcgacggcctcgagtggctagggaaagaatccaggggcgtgcacccagtgatttccaatctctgaaaccagtgatttccaacttgttcagccaagaaactctcaggcgtgaaatcacgttaccgcctagtgggtaaaagcaaaggcgtggggtacacagataacttgtttggttcaaatccagcctcccgcacgtgctggccgggcggaggcggacaattgctccacctctggaagcgcagagcgcagtccaccaaatggaggcaaataacgtgtccatctcactgcccggcggtgaggatcaggggtgggccaaggccgaaggttggtaaacccagcgctcattttatcagcagacggactccctctctatatatccaaaggtctgcacaaatgttcctgacaagctatggaaaatgtttggaattccaactcctgaatcactagccctttccccacagcttatctttctccctcggttaatgctactactggatccttttctgagaaaccgtgcgactcccaacatgggcccccagttaaaaaatattttacgatgatgcatttctccaatcccaccccaccattttcaacctgcttatcattctcctccattaaaaggtggagctaacccg

SEQ ID NO: 17414 - DNA, 1385 bp, Artificial sequence
  DNA replication origin
gagtcttcccgccccgtgccggtcagcccgaagaccccagcgccgcccagacccgccttccccacagaccccgccacctgtcagtgaaaggccgcagccaggggcaaagaggtggtccagtggctcagaggtccccaatgggccaaagttgccctaaaacccggggagtggcctcggcctccgccccccggcccggccttgccaagctttaccttgagtgccaggtgatggacgcggcccaggccaggctcggccagcaactgcagcaaacccagcattgggagcagccggaggcccgcggccagcctaggaccgcgggaggcgggggagccgacgggcgccagagcggccatgtttgttccagcatcaccagccgcttcctctcccgcccacgtccggggtgaaagggcgcagccgccggaagggcccggggagcggggctcggcggctagctccgctgaccctgtggtcgttttcctggagattgcgacctaggaagtcgtcgaggagcctgtgctgcccacctcggggcccttcgatcggccgctcctgtgcagactttcagttagagatgaagccaacctattggcggttgccataacaacggtggccgaaccagaccagcccgggccgcacctccgcctcgctgagctttggaagcgaccttgggctccggggacccctgatctcagggtcgggggataagctgtgtcagccgcacggtgtcgggccactgattgaactgatttcactgagcgttgactcggaggaaaatatctaaaaattcccggctcgccgtaggggtcctgtggttttctaggcgcttcacactcaaatacaagcgaaatggttgcaataatacgattgattgagcccttatgaggcaatttgttaggccttttgttgtatttaatttttggaacaatttgatgagctaggaggtacgtattatcattattcctactttacaggtaagcaaactgaggctctgagaaataagtcatttgctccaggttgagctgggaatcacacggaagctcttaactcctgtgttctgttgcctcatgctatttcatccaaccccaagtctgggtcttaacatttttctcttaattctgtatggaaactttctttgcttctttcagaaattataggaacttcttttttttgagacggagtctagctcttgtcacccaggctggagtgcaatggcacgatctcagctcactgcaacctccgccttctgggttcaagcgattctcctgcctcagcctctggagtaactagaattacaggcctgcgccaccacgcccggctaatttttgtatttttagtagacacggggtttctcccatgttggccaggctggtctcgaactcctgacc

SEQ ID NO: 17415 - DNA, 1116 bp, Artificial sequence
  DNA replication origin
gacttcctaggtcgcaatctccaggaaaacgaccacagggtcagcggagctagccgccgagccccgctccccgggcccttccggcggctgcgccctttcaccccggacgtgggcgggagaggaagcggctggtgatgctggaacaaacatggccgctctggcgcccgtcggctcccccgcctcccgcggtcctaggctggccgcgggcctccggctgctcccaatgctgggtttgctgcagttgctggccgagcctggcctgggccgcgtccatcacctggcactcaaggtaaagcttggcaaggccgggccggggggcggaggccgaggccactccccgggttttagggcaactttggcccattggggacctctgagccactggaccacctctttgcccctggctgcggcctttcactgacaggtggcggggtctgtggggaaggcgggtctgggcggcgctggggtcttcgggctgaccggcacggggcgggaagactcgagctgagggaggggaaggggctgaactgtggcgttgcccccacggactcgggaggctgctcttaaatccctgctggcttccctgaattcctcactcagggcagcccgatcgcctttcttctttctcccctccagcttttatgctggctttccttgtccgcggtctccgctcttctgtgcccttgtactgtaccggcggtttgaaggtacttggaaccttagcctcagtttcccatttcggtttagggcgctctctggagcgagactctagagaaggaatttcaaatcttgcttaaaacacgtgactgagaatgtaaagccagcattaaggtgtgtctctaatcaaagggcctgctttttcttcctctatccagccattgtctagggaagagagatttttgataaacctagaatgatactctggatcttgctttgtaactagcagagaaaagacctctaaggctgaaacgcaccctaaggtggttcagcagtttactatatctgggaaattgtccaggtgctgtggctcatgcctgtaatcccaacactgggaggcctatgcaggaggattgtttgagcccaggagttcgagaccagcctagtcaacgtgctaag

SEQ ID NO: 17416 - DNA, 977 bp, Artificial sequence
  DNA replication origin
gagcccaaggggtgagaatcagagtctccaggggtgcggccaggaaactggcactgcaaaaacactctacaggtgattctagagcccgggagaatggacaggaagggctgggcacacctgtattcccagggcagctcacgcctgcattcccagcactttgggcggctgaggcgggaggactgcttaagcccagcaatttgagaccagcctgggcaacatggcaaaaccctatctctacaaaaaaatacaaaaacattagctgggcatggtggcattcatctgtggtcccagctattaaggaggctgaggtgaaaggattgcctgagcccggggagctcaagcctgcagtgagctgtgatagtgccactgcactccagcctgggtgacagagtgagaccctgtctgcaggggaatagaaggatggacaggaaggggagaggatcgggagtgaagaggtcagccaccacaaagcccaggcacgagagcaagaggcggggtggggctgggggtgagaggcacaaagtaaggcctacaggacgctctgcacgggctgaggaagagggacgtggttcagccatggctgcaggagactgggtggatgtccgtgtcaccaaggcctatagggaacaatggggaggggcgagcttggtgtgatgcaggaagactgtggcttcaaggctgaggtgacgcggagcaggaggacagggggacctggcattcaggaggggccgggggcagtgagggggtagcaggggcaaccctgggcttgggtgagtcctgggagtgcgaagagggagaacgggagtaagggtgtgtggtagcgcaggaggttgtcacaggcagggcgggtgacagggagcttcagtgtgtggccaggactgggagtggcagaagtgaactcaaggagaggaagaaacctgatggcagatgcccagggtggggtaggcgctacatcctgttcccccagcaaacctctg

SEQ ID NO: 17417 - DNA, 1529 bp, Artificial sequence
  DNA replication origin
cgcgctgcgctgcgcggctgtcggcgccggggcgcccggggcgtggggcggccgctgggcaggcccgggcggtccgggcgccgcggcgcggggctgcctgggctgggcgccggcgccggcgcggtgtggccgcggtcgtccctggttactgggctccgcggcacatgctcgctgctgcctcccgcctgccgccgcccctgcgctccccgcctcccgcctcccccctcccgcccgcacccgcgcgccaggggtggacccggagccgccactcagcgcccggcgccacctcccgccccgcacccgcctggccgcggcctccgccagctggaccccggcctcgccagccagccggaggggcgtcccctcggctcaacgcggccccagggcggggcagccacccccgccaccccctccccgaatccagccctggcgctccggcccccgccgcggcggggagggcccggaagatcggatgtgaatgaggccaggtcccggcccggagacattcattcattcgacacggattcatggggtgccggggacacggcggcccacgggacaggagtgccccagccctcgcagggcgggcagggggctgtgcgggatgcggcaggtagcggtgggagcacctactctcggcctgggggcaggagacctccaaacccagggtcaggaagggaggtggatggagaagcgttctggcccaggcaacctggagaggcggggaggcctgcatgcccgagggagagttccccggcttgcgggcttgcgcacggctgcaggcacaggggacctgggagaagggcagggcccacggggcaggccaggagaggcccctcgccgaggagctgggcccctgcccaccagcgcccatgaaaggacttcagcagagagtgatgggtcagagctgctggagtgacaggtcagagctgctcagagctgtttctctgagccgaggctggggtgacaggctccacctgaatggacagaggccagtggattcgcgtaggggggtgtggttcaggtggtaggtccagcatggccttcccggtccacctcatccaacatatcatcatatcttgagaactctcctatccttttcggctttagtttctctccttcacatccatcacaaacgtcacctatgttttctgcatcctgtttgtctcttccatgggagaacaccctcccagagggcagaggcatctccataacccagaaggccgcctgaggtgttacccagcaaatctctgtgaatgagcgaaggacggaggaaagaatgacacccggtgctggggccctggggtaggggagagagcggggaggatgaggcagccctccccggggctagcagggatgaggcaggagtggggtctctttctcccttctttccacagtgttctaacctcggagggtccagaaagctcagaggaaccctgagcagggccgagtgccttccagctcccaaatatctctcctgcctctaagcatactccatccactcctgctttcccctgaagcccctgccc

SEQ ID NO: 17418 - DNA, 1795 bp, Artificial sequence
  DNA replication origin
tgaccaggaagacctactgtgagtgctcccagcccccagcccgcgccccgcggtcacccccacacccaccgcccccgcccccgccccccggacccgcgcgctacccgctccgcgctgccgcctccgctccgtcctccccgcccggcctccaatgtggacccctcggaggttcccgggccgcgcccctgccccccgcccggccccattgttctggcacccccagcccggggagtgcgcgccggtcggcgtgcgcggcgccacccctaggtccggaggggcagccccagccccctggcggccccctctccgcagagctgtcccaacgggcaggggctgttgccagggtggggcggtggtcccgggagggggcgcccggctgcgcggagccgactggcacgagcgcgcggggctggtgattcatgcatcacgatgccgccgccgccgctgctgcgagattggcctgtcgccccctccctggccccgttcgtgtgggggggggggtggcgagacttggcacagcgctcgtcgtgcggtgacggcggtgaagggtccccggcaccctgtgggttgcagcacttacaggctggattctccctggccccatctctgtctgccacaccgggaagtgggtttctacagcccgggtcatctgggccgcgtgtgatcattagctgtcgcgggctgcccggaggaggatggcctgtcctttctgggcgtctccagatcagcctcagtgtgtctccctccacttgcctaacttcacaactctgcagtccccttgcagtcctagtttctccataccaggcttcccccttccctgcagcctctccggaggtgccctggcataccaggggttaatggtaatgggtccagaccacccaggggattgccagagggaaggcttcagcatcggggtctggaaggacctctgcctgggtgtttgacttggaaggggacagtggttctgggcttgggttggaattcagaacccatccccgggcagctgcgtgggcccaggccctctgcaccacccctggaggcagcagcttgaccgccagccccatgtgttgatggaggctggggaggcagctcctggtggtgcattgcacaacctctgctccccgcttccccccactccatcggccttctgggcacgtctgcaggtctgtccaagcccacgcttcagctccatgcccctcacccctcatgcttggaacaaagggggctttcctgagcgggtgctagtctgctgcgaggtgctggcccttctcctgtggaatcctgcagcatggagctcacatcccaagagctgctacctggaaggggtgaagcccctgggcacaggggctgttctcaccctctctccaaggtgggcaggtgggtggcccattccagtctggctgctgttttgtgagattcgctggggactccttcaagctaagtccagatgtggcccacagccgccagcaggtggacttcctgggtccctgtgccgggggagggtgaggacaccgtgggctccatcaggagtggtgggcatgggctgcacgggatgcctccatcatggtgggacaggggagtgaagccaggtttcctgctcatcgagcatgtcacgtgccaagctcttggcatcattagcacctcgactctgccacaactgctctaccaggctgggtgctgctacgatctccatttacagatggggaaactaaggctcagaggggcaaagtggcattcccatgatcccacagctagtgaccaggcagtgccaggacttgaactccggtctgtcctg

SEQ ID NO: 17419 - DNA, 1142 bp, Artificial sequence
  DNA replication origin
agttcatgatacgggcaaacattcagaatggtcaggtttttttaagtcagaaaataaaaagtagataatcccaaatttacaaggtaatgaaaactatgagtccagggacagcggctcatgcctgtaatcccagcactttgggaggccaaggtgagtgaatcacctgaggtcaggagttcgagaccagcctgaccaatatggtgaaaccccgtctctactaaaaatacaaaaattagctgggagtggtggcggatgcctgtaatcccctactcgggaggctgagacaggagatttgcttgaacccgggaggtggagattgcagtaagccaagatcgtgccaccgtactccagcctgggtgacagagtaagactctgtttcaaaaaaaaaaagaggagggaaggggagggaaggggagggaaggggaggggagggcaggggaggggaaagaagggaggggaggggaggggaggggaggggaggggaggggaggggagggaaaccaagtcctactgagtcttcctcctaaatatatctggaatctgtctttcatgtcatccccaccgatactccagttcatcaccatgatcaccttcggtctcattaccacccctcttccccgccagtccattccgggactgcagccaacaacaatttttctaaacccaaatctaatgtgtctccatcacctcccttccacggctccctacggatctcgaataatgtccaaattccttcctgtggcctctcagagggtgacatgggcccggcccactcgacaggacaccacccccctccactgcccatgccttgccccaaaggggtttaagacaggccttgggagcagcaggagctgggtccgatcccaaggcctctgccggggaaaagggctttcccctgacacggggtgatgggagaattctgtggggtgatgtagggaagggagaagctgggtcccatttaacctggagcccaaggaggcagaaagggcaaaaagagcctgtgaggaggaggctgggctctggggcctgggtgagtccctgccattcaccagctgccccttccctctctgtacaagggggtggccacaggccacctgccctggatgcggaagacttgcaccccaaggaccagctgctgccag

SEQ ID NO: 17420 - DNA, 1200 bp, Artificial sequence
  DNA replication origin
caggtggctgcttcccagccctcgagtgtagcaggaccccagtgggaaccccacaggtgtttcactctcttttctgtcctccccacctcccagtgtgcggtactccatggttggcacagctagtaatgtcctctctcacagatggggaaaccgaaacccaaactggggaaaaaaccggtcacacagcaacggagtggcagatccctggagtccaggtcccacaagagaccaccaccgtcttcgctttgaggaactgcccctccccaggggtgggcccggtgtgggggcaggagggtgtgtgcggccagcggtgcactccctccgctctgacttagctgtgctgttgctgcccagggagggcttggggcagagcaccctattctcaggagatggtaccgagggggctctgaggtactgcagggagaacacagctgcggggtgctgtgaggaggggcaggggtgaggctggagaggctggagacgcactgaggctctggaggagggttctaggaggggaggaatgtgaccacattagggatgctggcagctgcaggtggggactggatgggaaagtgggatggggtgggggctgagaagaggccggcacagcagctgggatggtgtgggggcgacgtccagccagccctggacagtgggggcattctcgtatttttgaggcagccaggttggatgggacttgtctgcagttggtgcaggactgcctgtagggagatctctggatggggacctgggaagaggcccgggcgatccctttgggccacgtggagcctgaggggcctctgggccatcggtgaggagcttggacgggggtgggggagctgaactgcaggaggggccagctgggaggagactgggagtgaggggtgcagggagcagagccgcccccggaaagcgtgtgagctgggcgcttggaggagccctggtgctgggagattgagcacaggagaggcgtgggcctgggaggagcttctgaggccagctgcgcttctggaaggaggacagtcagtgatcaaaggtgtcaggaccgaggggactgtctgatttagtaagatgggtcactcgtggccaggcccaaaggccccgccttctattcttgtgctgctcaaacccaaaggccctcttgctggtgcggttttccttcagctgtggtggagggctggggccaggtacagagacact

SEQ ID NO: 17421 - DNA, 928 bp, Artificial sequence
  DNA replication origin
ttagtggggcatggtggcacacacctgtagtcccagctactcgggaggcagagacaagagaatcgcttgactctgggaggcggaggttgcagtgagctgagatcatgccactgcactctagcctgggtggcagagcgagagactccaactcaaaaaaaaaaaaaaaacatggatttgaagcaccaaggacgatgcctgttgggggccaagcacccactgtggccaggccctagggacacaacatggacaaggccaagctagccagccctcagagtgccgacaggatgcagagagggacaaaatgcttacctgctgcccagtaagtcatcggctgtcccagggaggcacagggcagtgggaactctgacagaggcctggggggtttcagggggtgggggggaggggcgaggaggtaacagcccagcaggcagagggagcagcctgggcaaacatcaggaagccccggagacaaaggtgagttcaaggaacaaacagcagttcaggctggccagagggtaaagggcaaaggccaacaggcagaggacgccagactgcaggggtcaacagggccagactgaaccaggcctcgtaagcacataaccatgtcaagggtgaggacttcaccctgaggtctggggagggtggcagacgcctggcatggtcaggtttttgttcagcaaagacccctctggctggcgtgtgtgaaggcagggagaacatgtacggatggggaatctagggaggtttcatggtggaggcgacttgggctgagccttgggaggggcagagttcagatggcccaggaaggaaggcgggcattccaggaagcagagccacatgggtgaagatctagaaggagggtgtttctagggcactcacctggggaagtgcagaagtggaaagtgagggcggaaactcaatcccagga

SEQ ID NO: 17422 - DNA, 1035 bp, Artificial sequence
  DNA replication origin
tgaaccctggacagtcagcctggcctagttacgtggccgtgtgagggccacctgcccagggcccaggcctgccctctgcagacacagctgggacgccatctgtggtcactgcagtgggtgtctggcacccctgcctggtgagggccgagggctgcctccctctgacctgggccctccagctgctgccacacagggccaagggggcaggacttacaccgtagcttctcatccagggttccccgtgaggtcaccgacagcgcctggatgaactcggagaactcaattcgcccgtcctgacaggagagagaggggattgcctcagtcagtgccggccaggccaccgggtcaggctgaacctcgggacgggcgaggggcagtcgcaggctccagacactgtggccaatggacactcaggtggagagggcaggctcgaaggaatggggggcgagaggcaaggagagggtggggagcagaggctgggggactgtgtggggggttagaagtgggagaggccaggagggaggcacaggaagaaggactgaggctgaacggagaggcttactccactcttgatgggagaaggtgccagaagcaccaatgcctgagctcctctcagcaacagcccggaagcccctcggcctagagctgtgggctcatgggcttttgcagaggaaaggccgctgcaggttgtttaattccacctcttatttgcaaatgaagaaaccgaggcccaagaagggaagagcccttcccagggtcaggcatgtgactcccagcctgggggcacctgggagaagctggggatgggatagaatagaaacctccacggtgccagcagcagggggtacagagacaagtggcagtaaatccaccctcaaatgctactgcaggacagaatcagggtcatcgcagataacccaacagctatccgtgcagccactgcccggaggtgacacaagctaccacatggtaagtcttgaaaacatgatgctcagtggaaaacgccaggaacaaaagatcctatagcctacgatt

SEQ ID NO: 17423 - DNA, 1918 bp, Artificial sequence
  DNA replication origin
ggtaattcctctattagcacttacctcattgacttagaattatttgtttacatgtctcttctccccagagtgggaagcatgtcttctgcatcttcatccccccaccccccgctgctgctctcgctgcctagcagagtgcctgaccacagcttgggctcagcaaatgtttgtggtgtgaatgaccgaaggacctttgtccccaaatgttccctgcactgtgcctgaaatgtcaccatttatgagtcctgcctggttcctggctcctgttggcttttgccttcccacagctgggacctctttctccaacagctggcccagccctgcccagactctgggggttatcacagacttagcccagggagatttaaagagccagcattaagaagtgcaggtgactcaacttcctgtgaacttggctgcaagttccactcccttgctgggtctgggcacctggtggcactatattccacgagactggtagctccgtgggagaccatttccctcggaccccagctctgggctagaacagagtccctgcggatgtgtgctacctcccgctgtggccaatgcccagctgccaagcttctctgatgcctgctgccccattcaggtggcacaccttccttgggcacctagcatgtgccgggcacaggatctctgccatagaactcacagccagagtgggagaggcagggccccagacatgacatgggctgtacggtgtggtcagagccaggacagggctcagagaaatgtgggttgcagggcaagggttcagaagcagcctcagaggtggggtctgagctgagaccgaagaggaaaggaagagcgtggcggaggggtggcttcctggctgacgactctgcagggacaggggctcaagaaagcgccccccatcactcacagacctagagccctcagccatgtctctgggagcatggtgttctcggaggagggattgaggggattagctaccttctcgcacatgactcaaaacccggcatttccacaaaagctgcggtttatttattcagacaacattagtgcctccccaccatgtgcttggatatgggctgggaactaggggctcatccagtgtagaccaaggcctagccgtgccctcaaggggcttataggccagcggggagagaggcctggaaacaggtcccgagagcacagcctgagataagcagccgtgcctgagcccatctggatctgcccggagcaggaggctgaacccagtcccaggcagcacctcacgtgggatgcagcatccacacatgcagcccatggggctggggaggtggatgggcaggaggatagccctcatcctctggagtcaccaggtgaccgtgtgacaatgtcttttaacacaagggaggcagcagagccctgggcctttggagtctttctagatctggcctctgatcttgtcttcattgtttgataattgagtgacctggagcaaatgccttcacctctctgagcctcagtttgctcctctgtaaaatgggcttagggttagtatttcattctagggttgcagccagtcttcaagcaaataactgaaaatgcttagaacatggttaacaacaagacttcttgttgattataatagcagtagtgcttgcaataaccgggaagcacagagcccacctggcagaaggaaaacgaatggcaaagtttgtgtgtgtgttggggggcgggggtggggggatttgtcgcagcactgggtggagggagctgcagaagccagggtccgctttggccaggcaggggtggggggagttggggctggagggagactggggccgttgcgcctccccctccctctctcccgcccccggcgcgccatcggcgggaggcgcaggtgtccactgcatcctgcgcgtccccatccctcgctgccctggccggg

SEQ ID NO: 17424 - DNA, 1236 bp, Artificial sequence
  DNA replication origin
agcccatagaaggaaaaggaaatccaagtccgccaaggcatcaatcggccctgcactcacggctgtgtccaatcttgcccttccccactttcccgctccactcctcccgtgcacacccagctcccacacacacctgtccctccacatcagccctcctgtccatcccccggtccttacccagccagctccacatgccccagggagtcctctctccctgctgtgttcccagcacctggcatctgccaggcaaacggccaaaacccagtaaacattcactgatgttcttcaggccctactcacaggctgcttcctcaggggggggtctttccttagcccccttccttgcttactggcccatggccaggagttggcacctgagccaccacatgtcactttctactccccacctggcctgtcccagagggctaccagccccgtggaatgaaccatgcccctttacactgtgagcctccctgggctctacacagatcaagggctccatggtgctgaagtctccccgacgtctgaacctgggggtgtcactcggaagctaatttggggaaccaggatggagaactggatttttgtttcatagaggatggagtgagggggctgagcctggtgaaggctggagaactgcccaccagctcagtgcccagagaggagagggaagagcaggggtgggaggtgggcttcctgaggctcatggccacaaatggggcagcgaggacagtctcaggaaccctggtctgggcttcaggacacgacatctggctctgaaaggctgctatcctgctgggccactggagccacatatttcagagacaaatgtgggttatgattcaggaatgacgccaccctggcaggtggccttgggaaagtctcatcagtgtcctgagcctcagtttttccaactgtaagataaaggggtagattcaacgatctctaagctccttcagtgtgatgtcttcggaagccccagaacaattcagaaagtgggtgagagagctggggagacggagggtgacctgtgttccagcttaagtgccagaacacacttcacagcccacctcctcacaacccccagcttggttgccccctgactccaagatagaagctgtccatctgatgttcctagaaatctttgtctagagccttggcttctgagctttgagctgcaaaaccctgtggtgcccagaactcctggaagcagaggggcctccaagcccctagacc

SEQ ID NO: 17425 - DNA, 1170 bp, Artificial sequence
  DNA replication origin
gtgagccaccacgcccggccgtgacattgctattaaccagccttgcctcatgaaatagaaaccatcagtccttcttctgaggggaaaattcactctcttaacctggccctgggcacgtccctccttggaggcctggaggcctggaggtctgagcggcccgtgaggtgtgagctggactaggcacgtccctgtcattcccagggtgcctgatgggttggcggggagtggcctggctgggccaaataacacctcatcaaagggctttccaggcgaggaactgtgcaggggaggggtgctagaaagagatggcccagggtgcctgcagggggaggaccagaaaggtgaggaagccatgggtctgagggcaggaggtccctggaggggcaggggtgggtgggtgggtgtgtcaggtcagcctgtacagcctgacctggtctggttcctggggatccccctgcacccattaatcacttactccatcttcaattctcaagggtcccctgggggccaggcagggtgctggcttgccttggcacctgcagtccagccagaaaggcccatggtgaatagccaagttcctaggcatctcatcacagctgtggctgcccgcaatgacattcctgagggagtgacgttgaagctgaggtggagagaagctgggtgggtgggggagggtcagagcaggacggggaacagcactccaggcagagggaacagcagaaacaatggctgtgaggttggcagaaatatctccttgattgaacattagcaggtggagttgacagggacactcagggtggagctgggctccatcactgggtgttcagggagaggccctggggaggaggccccgaggagagttgcttgctggactcctggacactgaagaggaggcagataaaggttctggagccattttggctctttgggcagaaccacccacccagttggctcttgtgccattgtgtctgtcccttgagggtgtctttgagggaatcacgtttgcccagacgggctcaggggctgtctgaattctagcaggcttgacatcactttctccaacccctgccctttagagatgggatagctgagtcttggggaggggaggtggtttgatgatggtggtggctgagtgcgggacctacctggggtcactgcagctggaggagg

SEQ ID NO: 17426 - DNA, 852 bp, Artificial sequence
  DNA replication origin
tagatggatgggtgagtggatgggtgggtgcatgagtggatgaatgggtgggtggatgggtgggtgagtgaatgggtcagtgcatgaatgaatgggtggatggatggatgaatgggtagatggatgaatggatagttgacttgatgactttgttctaaatccttgagctgagagccacatctgagcatcttagtatttaacataatgccttatagggaatagctgtccatagaagcttaatgaacaaacactttctaatctaatttaatctaatccagtcagggaaggctccaggatgaaatgggactctgaatgagccaggggcctgggagacaaaagagccaaccactcacctggggccaccccactgtaggacactccagagacacgaaggagggggtttccctcatggtccttgcccttcaccttgaggtagaagcgctccttgggggtgtggaagggcggcccgccccacagctgatgggtggagccattggagaggggcttcgtgggcagagtcaggaggggcttccctgagctttgtgccagctccaccgagtctaggcggccgggtgccttcaggcccgtggaattgatcaccagggagatggggactcctgcagagggaaggtgaagaacaaagtgctggcgtcagtgtctgcctctgtgatccccctcaagtaggggccctcgaaccacaccccaggggtcctgcttgcctggcccttcctacctggtccctccttccctacctaccctggtgctgaccaacgctgggggtgggataggtagatagggaccttgctactgtccgtggtgctgaaacaccacagtcgtccaaccacggcttcc

SEQ ID NO: 17427 - DNA, 1098 bp, Artificial sequence
  DNA replication origin
agcttggcccaggactgccccatggaaagtgtccaaatggtgactcggatgattgtgattatgacagtgattgtgattatggaagagcaaaagtccatgtctgccctgcccactgctgtgtctacagtgcctagcaccatgactggtacatagtagatactcaaaatgaatgctgagtagatggatgtgtgggtggacaggtgggtggacgaatgggtggatagatggataaatagatggatagataggtgaattaatagtgaatgggtgggtagatggatgggtgagtggatgaatgaatggatagatggatgggtgggtggatgcatgaatgggtgagtggatggatgcatgaatgggtagatggatgggtaagcaaatgggtgagtggatgggtgagtggatagatgggtaggtgggtggatgcatgaatgggtgagtggatggatgcatgaatgggtaagtggatggatgcatgaatgggtagatgggtgggtgagtgagcgggtgggtggatggatgaataggtgagtcaatggatgcatgattgggtgggtggatgagtgcatgaatgggtgggtagatggatgggtgagtgaatgggtgggtggatgggtgagtgaatgggtgggtggatggatgaataggtgagtcaatgcatgcatgaatggatgggtggatgagtggatgaatgggtgggtagatggataggtgagtgaatgggtgggtggatgggtgggtggatgggtgagtgaatgggtgggtggatggatgaataggtgagtcaatggatgcatgaatgggtgggtggatgagtggatgaatgagtgggtagatggatgggtgagtggatgggtgggtgcatgagtggatgaatgggtgggtggatgggtgggtgagtgaatgggtcagtgcatgaatgaatgggtggatggatggatgaatgggtagatggatgaatggatagttgacttgatgactttgttctaaatccttgagctgagagccacatctgagcatcttagtatttaacataatgccttatagggaatagctgtccatagaagcttaatgaacaaacactttctaatctaattt

SEQ ID NO: 17428 - DNA, 1382 bp, Artificial sequence
  DNA replication origin
agagctgggacagatcaggctctgagtgtttgccgaggccacggcgagagaggcaggtgctagagttctagggaagcgcagagaatcgagaatgtgctggtctgggctgaatgggccaggctgggccagggctggctggggcagccgaggagctcccaaggcgggccaggctctgactggagtaggcatagataggagggtctggcctgggggggttgtgctgtctcagggttgagatcctctcaggcttggggtgctcttagccttcgttcacttgttccgtctttcattccttcaacacagggtcaccaggtgctcgtgtgccaggccctgtgctggggacacagggcaggtgagacacagcatcaacctttgtgttgctcatgagctcaggcagagagaacagaggacagggaatgagcatgcacagggcaccgagtggctggaaggtgcatcctcaggggctgtgggtgcccagagaaggctaatcccaggaagacttcttggaggaggtgatgtctaaactgaaaccagaagcacccagaaagatgacgagctggggaacagtgttccagacaaagggaatagcacgtgcagccctccccgtgacaagagaagtgaggcagagagagggtggggagggggcagcaggacggctgccacctggtaccagtcactccccgcctggggagctgcggaggagtttgggctgtgccctgagggggttggtgagaggttttcaggaggagggtcgtgtgctcagacttttccactgtggctgggttctcaggtaggctgggctgggccatgggctcaggagcctgataaggacagccacggaaacacgagccggcgcttctagggtgtttgccaggtgctggcaccagctcagagcacattttgttgctggctcatgtaaccctcacaacaacccttggagatggaacgatcatcatcccctttacagatagggaaaacaaggcacagagaggtttcatgtcttgcccaagatcacacagctggcgagtggcagaggtgggatctgaaccaagggtcttgcacctatagcccctggccttgagtctgatgctcaccagcagagtgggcctggcgctgcttacgtctgcaagccttgggctcctcattgccaaaatgagacgttgtgtgagcaagagagaaggaaggtctgtggcacgtgagctgtgatccagctgctgacactggtattagaggttctgggtgagcagatagggtgctccagggagggtgtaccttgtgttgtgatgggcattgtcatcctttgctcagcatctgacttatttgaagcagacccatatttatttatttatttcctttctttctctctctctctttctttctgt

SEQ ID NO: 17429 - DNA, 710 bp, Artificial sequence
  DNA replication origin
catccaccccaaccacctacagggcgctggcaggagagggccacccctggacaaggggaatggagggggccgcagaggctcagcacatcttggctctcagccctgactacaccgcagaattccccacagacaggagaaggggctgccgtggagccctgtccttggggcagctcagcagggaagaggagcaagggagcaggggaggggggagaggggcgtggagggctgctggcccctgtcaagagatgagcacctacgactcaccagacgcatcagccaggtaagtgctccgttttcagaagggcagctttgaggctgagcctggggacatccttggagaaggaaggacaaggaagacaagggagaggggaagggaggggaaggggaggaggagggaaagggaagagggagacaggagaggaagaggaagaggatgtagggaagggggggaggggaggaggaagcagacagacagaaagtctcactgtgtgttttccaaggggctttttaagtctctgtgttctggtcgagtcactgagggacggagggggtgtggtgtgtctgtgagaggctgagtgtggttctgtgtgtggacactgccagtgtggggcagggagggaaccagaggacccagagcctgcgaacaaagcttcaagtacaatcaaaagtgaggctatggccaggcacagtggctcacgcctgtaatccca

SEQ ID NO: 17430 - DNA, 1948 bp, Artificial sequence
  DNA replication origin
gagcctgtcagcctcacccaaatcccctctgatagcactgcctctccccaccaggcctgccgcctgggctgccccggcctccttcctggtcaggagggccttgtttcacagccctgtggccttgggctcggagcgctctgagggctacagggttgggactgagcccagcaccctcatggggactccctgggccctgcagtgacaccatctgcctcttcctcgtggggtggggtggggcgtgaaggcccagagcctggacacccacttggtggtgtgtgtggtgtgtgggactctgcacagtggggagggggcggcgtgagggaccctgggcagcagctggtgcccggggatctccttgtcctccttgtcacagagcttcagggccgtcctgcactagagcactttaggctgagattgtggtaaacaaggttccacagcagaaaccatcacccctcccgacctgcagctcggaaggcctggcccccggcgtggcgggaagtacaggggctctcaggggaaagctgaggaagatgagaggggggtgtgcatgtgtgtgagtgtgcgaatgtgtagtgtgtgtatgtggtgtatgtgtcatgtgtgggatgtgtgtgcatgtatgtgttctgtgtgtatgtgatgtgtgtatgtagtatgtggtgtgtgtgtgtggtgtttggcatgtatgttgtatagtgtttggtgtgtgcatgtatgtgttctgtgtgtgtgtggtctatatatatggtgtttggtgtatgttgtgtgtgtggtgtgcatggtgtttgtgtgtggtgtatgtatgtggtgtgtgtggtgtgtagtgtgtggtgtgtatgtggtatgtggtgtttggtatgtggggtgtgtatgtagtgtttgtatgttgtgtgtatgtgtatggtgttgtgtgtagtgtgtgatgtgtgtatggtgtttggtgtatatgtttgtgtgtggtgtgtgtatgttgtttgatgtgtatgtagtgtgtgtgtatgatgtgtagtgtgtggtgcgtatgtgtgaatgtgtggtgtgtgtgtgtgtatggtgttttgtgtgcatggtgtttgtgtgtatggtgtgtagcatgtgatgtgtatgtggtatgtggtgtttggtgtgtgtggtgtgtgtagtgtttggtatatatgttgtgtgtgtggtgtgtgtatggtgtttggtgtatgtggtgtgtgtgtgtgtgtgtggtgtttggcatgtatgttgtgtgtgtggtttggtgtgtgtagtgtgtagtgtttggtgtatatgttgtatgtgttgtgtatgtggtgtgtatagttttggtgtgtgtgtggtgtgtgcatggtgtttggtgtgtatgttgtgtgtgtggtgtgtgtagtgtgtagtgcatggtgtgtatgtggtgtgtggtatgtattgtgtgtggtgtgtggtgtgtgcacagtgtttggtgtgtatattgtgtgtggtgtgtgtatggtggtgtgtgtagtgtggtttgtggtatgtattgtgtgtggtgtgtggtgtgtagtgtgtatgttgtgtgtggtatgtgtatggtgtgtggtgtgtgtagtgtatggtgtgtacgtggtgtgtggtgtgtgtgttgtttgatatgtatgctgtgtgtgtgtatgtttgtggtgtgtggtgtgtatgtggtatgtgtggtatgtgtagtgtgtggtgtgtgtgtgctgtgtgtgtatgttggtgtgtggtgtgtgtagtatgtggtgtgtatgtggtgtgtggtgtgtatagggtgtggtgtgtgtgttgtttggtatgtatgtcatgtgtggtatgtgtatggtgtttggtgtgtatagtatgtggtgtgtgtagtgcttggtgtgtatgtttgtgtgtggtatgtgtgtatggtgtttcgtgtgtgtagtgtggtgtgtggtgtgtgtatcgtgttgtgtgtgtgtggtgtgta

SEQ ID NO: 17431 - DNA, 1339 bp, Artificial sequence
  DNA replication origin
ggtcagggtagggcggagggggcagggcagcctcctgcagagatgatgccagtgtgccttccacatgccatgtcttccccgccaccatgcttactggtccttccaaggatgaaagagtgagcggcccacagcataagtgtctacccctgggcccccgctgccaggggcggccctttctgatgataatcagtgttagctacaacagtcctgatgaccagcggtagcagcagaaggcgggtgggagtgacgtgccgatctgcaagtgtggggaccccacaggctcccctgagtcagcgctggcggaggtcagggggcaggtgagagctagggccaggatggcagcagcagagtgtgtgcctggggctcacgctgcgacctctgggcagtgtgcctcaaaggggtcacttggaggactgggctgttagcttcagctcacataggaccccctctgggcaggttctgtccttggggcccgtgaatgaaagctccactccagcccagtgggcagctgtttctggcacacctactgtgtaccaggctgtgtgcacagaccaacatggggcgtgtcctagagatcaaggggctgggggatgtggcactcacggtggggctggaggcaggggggtgtggcactcacggtggggctgggggttgtggctggcaaagtgactgacccaggcttgtggagggaggagcaggagcaggctgagcagaattggggcctcccacaggccctaaccccagggcacaacgcagggtgctggagcacggcaggcttggctcgttcattgatttagtgcctactgtgtgccgggcactgtgctagaggctggcggtggcagcagggaaaaaaacaaagagcctggccctcgtcgggtgggggacacggaaaagagacaacagagacctggagcatagacgcgtcctctgatcactggaaagtggaggacgacggctgaaaagcagggagggcaggggctgggggtgcctgttggggtgcaattctaaatgaggggactggggacttgctgtgaagagaaccagaaaacaggcctgcagtccccgccttggtccctcagggaccctaggaggctgtatggatgggcagtgtgggtaggtggcgggtgtgggggctcccacggctccgagggaaatgctccttccagcctcggggggacggaggtgcctggagtcatcgctggaccgtcagccccttttgcacaggagagacatgtgggagacagtgcaggtgtggaggggaaggtgtcagggtgtttgtactgatgactccatgcaccctgccaggaacgcccaagccgcaggtcacatggaggaaggg

SEQ ID NO: 17432 - DNA, 877 bp, Artificial sequence
  DNA replication origin
ttctaccagctcctaacgccacctgctgcttccccaggaccagctgctctggctagccctgtaatgacttgctcaagacatttgttacaaaagcgtggccaggcctcaccttcagagattctcactcagggggaccctccctggtcactgtgacaccaggttgggtgtagaaccagatggatctaaggggactccagcaccttgcaaagctgagagtcagaaagggtgacacctgggcctgggcacgactgggggtgtgtgggtcccagggcaaggctgctgcggccatctgcaggtccacaggaccctttgtggctgggcggacggggacaggcagaccttctccaaccccagtgacgaaggggagggaatggcccagatgaggtcccttcggctgtggctctaagggggcagggaagcagctcctcggctctccttgcccccaagtgccccccagcatccgggaggacgggcgcaaggccaacgtgtcgggtatggccgggcagtccctgacgctggagtgtgacgcgaacggctttccagtccctgagatcgtgtggctgaaggacgcgcagctggtgggtgtccccctagggtgggcggggtatgggtgggatttaggctggggacaggtcttctggatgggcatttctgcgtgtgccaaggtggggcagggagatgtgacaggtgtctttggtggtgctctggggttcacggcagtggaggatagtggtcatgtagtgaagcctggcaggggctgcgtggcagagagcatggcaccgttctggccactggccacctctcgggcctcagtttcctcattactgatgctgggggtggtggctggatcccctcttactggctccctctggcctct

SEQ ID NO: 17433 - DNA, 1454 bp, Artificial sequence
  DNA replication origin
accagcccctaggcctcactcctctccccagcttcctctctgtccatctgctgaacttcacttagttcttttaatatatcaaccctctttctcttgtcttcgtctacgtttgctgttccttctgcccagaactttctccctcctctttgcctgcctagctccttatctttcaggcatatcctgaaatacttttcctccaggaagccttccttgattctaccatgtttctcatctgcactgcccagcctctcaatgccttagccctccaacaactacattgggattgcttatttggttgtccatctccactgtccacctctgtgagctttgagagggcaacatggtagctgcctttccctgactgtgtccaggggcccagtatagttctggccacagagtagatgctcagcacacataaggatgcatggatagatcagtgggtgggtggatggatgggtgggtggatgaatgggttggtggatgaatgagtggacagatagaagggtggatggatggatggatggaaaggtggagggatgggtagatagatggaagcatgggtggatagaagggtggatgaatgggtggacagatagaagggaggatggatggatggatggatggatggatggatggatggaaaggtggatggatgggtagatagatggaagcatgggtggatagaagggtggatggatgggtaaatggatagatgggtaaatggatggatgggtggatggatggatggaagggcgggtagatggatgaatgggtgggtgggtggatggatggaagggtgggtagatggatgaatgggtgggtgggtggatggatgaatgagtgggtagatggatgcatgggtgggtgggtggatggatgagtggatgaatgggggagtggatggaagagtgggtagatggatggatgggtggatggatggatggagggatggatggatggatggaagggtgagtggatggatgagtggattgatggatgggtgggtggatggatggaagggtgagtgggtggatggctagctggatggattggtagatgatggatgggtgggtggatggatggaaggatggatagacagaaggataggtagatgaataaatgcatgaatagatgcatgggtgcacagatggttgggagaatttttaaagagaataacttctctgctggctcccagtctagagctctttcccctaagccatgcgtctaggggatatggtgggcagaagctagatgctagcctttggccagcccttcaagggcaccttctcacccccaggcatcgagggggttgctgggtgcccactgtactcctcctgattctgactcgggctcttcctgactctttcccttcccagagttcccatcggtcagtatcattgggggtgagaacatcacagctcctttcctgcagcctgtgaccctccagtgcatag

SEQ ID NO: 17434 - DNA, 1102 bp, Artificial sequence
  DNA replication origin
gtagatgaataaatgcatgaatagatgcatgggtgcacagatggttgggagaatttttaaagagaataacttctctgctggctcccagtctagagctctttcccctaagccatgcgtctaggggatatggtgggcagaagctagatgctagcctttggccagcccttcaagggcaccttctcacccccaggcatcgagggggttgctgggtgcccactgtactcctcctgattctgactcgggctcttcctgactctttcccttcccagagttcccatcggtcagtatcattgggggtgagaacatcacagctcctttcctgcagcctgtgaccctccagtgcataggggatggggtgcccaccccaagcctccgttggtggaaggatggtgtagccctggcagcctttggggggaacctacaggtatgtgcaggggccccagggctggcaagccagctgggcacaggtggaggggctgctctgggggcttcctggagactctgagcaaatcccagcaggctgggcataggaagggcccagagccctctcagcctgaaagggtgagcctcagcctcttccgggtcctaggagcttcagttgtcagagggagaaaatgtcagtgggggggacagggaatggtatgcctggagatcggacgaatccctggaatccaagtgcttggctcataactctacctccagagccaaaagtgtccccatgcctcactgctcctgcccccgggctcggcagcagcctggccactcgccatgtcccgtcatcacttggacagccctgtggcatactctctgccccctcccctccagattgagaaggtggacctgagggacgagggcatctacacttgtgctgctaccaacctggctggggagagcaagagggaagtggcgctgaaagttttgggtgaggacgtgggtaaccagcagggcccaggccagcatgttgggtgatcccttggggacccttggggctgaagtgtgtggcgagggagggggaggaggtttttcagtcatagttgtgcacttaacttcagaggaagtagaaagccctgaaatgaaagtgttagcaatagctgtgtagtcc

SEQ ID NO: 17435 - DNA, 1005 bp, Artificial sequence
  DNA replication origin
tagccagaagattccattgtatctgggaggcaccagccatgatgcccagggtcccaggcctctgcccagctacccactgctcttagaaccaacctctcccatggcccatgaggcccaagaggtccagcctccatatggccaccagcaccatcctggccctcttctcagtgttgtaaatcccaggccccgtggcctcctttcagtttctcaaattccccagatcttcataacctcaggccttggcagagacctcagtgtaggtatccaagtgtcaaagatgcctcctggactccacaggccaagtcagtgccctgttataggtgctccgttgcacctcatgttcaccagctgctatcacaattgacatcaagtagtactctggggaatgatctgattgctgtgtcctccactacactgaaagctcctaggtctgtcttatctagggctctaggtccagtctccgccccagagcatggactcaataagtgtggttggatagaaaatggatcaaggaaagaatgggtagttgaatgactgaatggatggtgaatgggtagatgggtagtagatggatggatggatagatgggtgggtggatgggagggtggacaggtagacaaatgggcaggtggatgggtgggcagacaggtgggtagataaatgaatgaaaggatggttgggtggataaatggatggatgagagatggatggatggatggatggatagatgagttgatggatggatgggtggataggtggatgagtggatgggtggatggatggaggggtggatgggtggatggatgggtgggatggatggatggatggatggatggatggatggatggttggatggatgatggatggatggggtaacggatggatggggtggtagatggatggatgagtggacaggtggatggacagactaatagacaaatgaatgaaaagacaactttttggacaagggaccttgtaggcccagggaagctcaccattgacccg

SEQ ID NO: 17436 - DNA, 1349 bp, Artificial sequence
  DNA replication origin
cttcagaaaggaggggatccctggggatctgcccacctgccccagccccactcctcctgactggggtctctctacatcttggactcggcaccaggtcccagctcatctttgcatgtgttcttccatcccaaacactcttccctctccccacctcactacagacctcagctttcaggaccctccacagggagtccttggctggcccctaaggctcagtgggccatctccactgggctcccacaagccccagtgcttccctgtcctagcactgacccacattggaccatagtggccttgtggcatctgagcttcttgaagacccagctgctgccttgtcaccatggtttccccagtgcctggcagagtaggctcccattcgtgcttatgggttgaaggatggatggatggatggatggatgggtgggtgggtgggtggatggatggatggatggatggatggatggatgaatggatagatggataggtaggtgggtggatggatggatggatggatggatagatggatggataggtagatggatggatggatggatggataggtaggtggatggatagatggataggtaggtggatggatagatggataggtaggtggatggatagatggataggtaggtggatgggtagatgaatgggtggatgaatgaatgagggttggatggatggatggatgtgtggatgggtgcatggatggatggatggatggatggatggatggatggagaaatttgtggctgaataaaaggataggtgggtaggtagatggttggatggttgggtggttgggtgggtgaatgggtggatggttgggtggatggatgaatggagaaatgaatggatgattggttgaatggagggatagttgggtaggtagatgaatggatggttggatagttggatggttgggtggatgggtgggcggtgggtgtgtggacgaatagagagatgaatggatgattgattgactggaaggataggtgagtaggtagatgaatggatggttggatggatggatggattggtgggtggtgtgtgggtgggtggatgaatgaatggatggaaggaataccttgtttttctgtcttgcctgtctatgctaagccatctctagccattcctcagtaaggagaaggcagccaaatcacagaggaaggggcacaggctgctgctgcttcttcttgtgcttcatgggcctctgggccggaatggaaaattcacatcccctgatccatctgggagcagcctgtgacccctgggctgccctagtcaaagcctgccaaattgtctcattctctgctctgcatacaggccacccacagcccaagctc

SEQ ID NO: 17437 - DNA, 1463 bp, Artificial sequence
  DNA replication origin
ggcccctcatttctgatctcccttcccctgaccccctcatcctcctcacagcccgtgacccccagctcgcggctgcaggtcctgggtgaagggcgactgctccagatccagcccacacaggtctcagactcggggcggtacctgtgtgtggccaccaatgtggctggcgaggacgaccaggacttcaacgtgctcatccagggtgcgtggcgccagtgggccaggggtggggcgtcagccagtgtgaggacattgtggggctggccctccgcaggcccccaccatgtgtcctgcagctcacgcgccacccgtggcatctcccactggctcatctcagcagcccagaacggcaccctgccccaacccctctgccttgagggaccaaagtcaagacatgagggctgtggccccaaaccacagaattgagtggtggagcctggaatggtctggttgagccagaacgccacactcttagcccctctgccagatgcctctcgcgttgttagggaaacctggggatttgcttcagaatctctggtcgagagtaagctgagtggcggcctcaatggttgaaactgcctgtgggtacctggggctcattatattcttctcttgcttgcgtcagtgtttgacgttttcctttttaaaaagtgaaggaaggaaaggagggagccgggagtcagagaagctgggagggagaggctgggaggctgggatgaggaggctggggaggaggctgggaaggggaggctgagaggctgggatgaggaggctggtaggctgggatggggaggctgggagggggaggcagggaggctgggagggggaggccgggagggggagggtggaaggtaggaaggggaggctgggaggcagggagctgggagtgggaggctgggatggggaggctgggaaagaggctgggagggggaggcagggaggtgggaaggggaggctgggagcgggaggctgggaggctagaatggggaggcggggaggcggggaggcagggaggcaggaggctgacaggcaagctgggcgatggataagtgttcagaaccaggttttgctacacaatgcccatggagtgtcctggcaggaggaacacctgctctgggctgctcataccctttttcatctccggtgcttctggccaccagtcctctagctctggctctgtcatgaactggttatgttacctggggacaacctggggatgacacggccccctccaggccttaatttgatcctttgtaaaatgcaggtgatcagagcaggtgaccttgagggcccccctccatttctaaagctgatgattttgtgcctctatgctctgatagacaaacatcggctgaagcttagtatctggcttccaactgtgaaaaatatttccatgttacagggagtctttagcgtccattagacatgagctgcttagggaatgagccttatcctagtgccca

SEQ ID NO: 17438 - DNA, 699 bp, Artificial sequence
  DNA replication origin
gtaggggctggggaggcatcgcctgggaccctctgtgatcaaaagccagccaggggccaggcacagtggctctcgcctacaatcctacaatcccagcactttgggaggccaaggcaggtggatcacctgaggtcagtagttcaagaccaacctggccaacacggcgaaaccccatctctactaaaaatacaaaaattccccgggtgtggtggtgcacacctgcaatcctagctactcagaaggctgaggtaggagaatcacttaaacccaggaggcagaggttgcagtgagccaagactgccactgcactgtagcctgggcaacagagtgagactctatctcagaaaaaaaaaaagagccatccaaggccagagcctggcatctatgggggctggcgttggtctccagtgggggcctggttagggttactgtgtgctcagaattctaggctggggctggccggcccgggctgtgggtagcttgaccaggttaagagcctgcagagcccagtggccaggattgaggcagcagtggcattgtaggggtcagttgatgtttgaggtcagtgtaaggtcagggtaagaattcaggtcagccgtgaccatgacgcctattttctcaggattagagaacagaggttagaggtcagttgtcagggtgagaggtgagtggtagggttggaggtaagtgggcaggact

SEQ ID NO: 17439 - DNA, 737 bp, Artificial sequence
  DNA replication origin
ctgcccctctacccctgtctatcaaggtttctgctcaagtcaaaccagcccctcactgaccctacacaggtcacactggggcttccccctgggcctctgctcgggctcctcccactcccggccttcaggcctcccccttcattctctccagccacacccctgcccaaagccatctctcacggccccagcccaggacgatctccttgcccagatcctcatggatccagccagcctctcaacacaaagacacgagcaactgccccatgtccagcgcagagcctgggaatcaagatgagggcagctcagtccctgtcctcaaggagttcacaatgtatcgggggtgggggccatgaaacaaggggacccagtgctgacaagccctgtgagcccctgatggagccggggaacttgggggacaggaagggtgggggagggcttccagaggtggtgaatctccgctgagacgtgaatgttgagcagtagtcagccggggggagcagaggtgaccacgggagcctgggtgggtattccaggcagggaacacatgtgccaagagctggacgcaaagggaggtggggcctgcagccacctgacccgcgagaggcgatgacacaggtccacacagaaacacgaacacggaggttcacagcagcactgagcatctcagccaaaagatgcagccaccccaaatgcccatcaactgaccagtggatgcacaacacgcgacacagccacac

SEQ ID NO: 17440 - DNA, 1258 bp, Artificial sequence
  DNA replication origin
tattccattgtgtggctgtgtcgcgtgttgtgcatccactggtcagttgatgggcatttggggtggctgcatcttttggctgagatgctcagtgctgctgtgaacctccgtgttcgtgtttctgtgtggacctgtgtcatcgcctctcgcgggtcaggtggctgcaggccccacctccctttgcgtccagctcttggcacatgtgttccctgcctggaatacccacccaggctcccgtggtcacctctgctccccccggctgactactgctcaacattcacgtctcagcggagattcaccacctctggaagccctcccccacccttcctgtcccccaagttccccggctccatcaggggctcacagggcttgtcagcactgggtccccttgtttcatggcccccacccccgatacattgtgaactccttgaggacagggactgagctgccctcatcttgattcccaggctctgcgctggacatggggcagttgctcgtgtctttgtgttgagaggctggctggatccatgaggatctgggcaaggagatcgtcctgggctggggccgtgagagatggctttgggcaggggtgtggctggagagaatgaagggggaggcctgaaggccgggagtgggaggagcccgagcagaggcccagggggaagccccagtgtgacctgtgtagggtcagtgaggggctggtttgacttgagcagaaaccttgatagacaggggtagaggggcagggcatggagggagaaagcaaaagcagaaaccttgattgatgggggtagaggggcagggcggggagggagaggatgggagctgagagctgggcctgagagcaaatcctggacactgaagggagggggtcccttgggaagagctgtctcaagtggaaggaaatgaggaaggcttctaaggaacagagactgggctggggaaggtggggacatataagaaggcgcctctgcctctgtggggctcagtttcctatgagcacaagaaggggctgggggattcaggggacccctctgtcccacagagagcagcgcggtgcacggtgtggtctcccgggggggccgcctccagctgagccgcctgcaaccggcccaggcgggcacctacacgtgcgtggctgagaacacccaggctgaggcccgcaaggacttcgtggtagcagtgctgggtaggtctgcgcctgcaccctcctgtcccactcccatggcagcccctgccatcacccagggcctcactg

SEQ ID NO: 17441 - DNA, 884 bp, Artificial sequence
  DNA replication origin
agaacacccaggctgaggcccgcaaggacttcgtggtagcagtgctgggtaggtctgcgcctgcaccctcctgtcccactcccatggcagcccctgccatcacccagggcctcactgcacccctgcctcagtggccccccggatccggagctcgggcgtggcgcgggagcaccatgtcttggaagggcaggaggtgcggctggactgtgaggccgatgggcagccgccgccggacgtggcctggctgaaggacggcagcccgctgggccaggacatgggcccccacctccggtaagacttggcccatgccctccccagaggcggtagggcccatgttcccttacgcctctgccctgggccctccttccctgtggcaggttctacctggacggcggctccctggtgctaaaaggcctgagggcctcggacgcgggtgcctacacctgcgtggcccacaacccagccggggaggacgccaggctgcacacggtgaatgtgctgggtgaggagccccagggcatctggagggtgatgcgtgggcctgggcacgggagataaggcgacatgtgagcaaagcccacactgtgtcctgggccacgggtctcacttccctgggcctccatggcccatcctcaaactagaggacaatagtgccagcccagggtatagcggagattcgggaggtgagaagagagtcagggagtggctgtgtcccccatgcagcgggcctcatccttcacaagggaccactgtggttgctggcggcagaagtccaggtctccacttctgggatttccctgggaggagcccaccttcctcccaagacctccgcactacccctcttttttctacccaccctcagttcctcccaccatcaagcaggg

SEQ ID NO: 17442 - DNA, 973 bp, Artificial sequence
  DNA replication origin
atgcagcgggcctcatccttcacaagggaccactgtggttgctggcggcagaagtccaggtctccacttctgggatttccctgggaggagcccaccttcctcccaagacctccgcactacccctcttttttctacccaccctcagttcctcccaccatcaagcagggagcagacggctcggggaccctggtgagcaggcctggggagctggtgaccatggtgtgccctgtgcggggctccccgcccatccacgtgagctggctcaaggacggcctgcccctcccgctctcccagcgcaccctcctccacggctctggccacaccctcaggtaggggagacggtggacaggccttggctattccactcagagtggacatgtggggattgtcagcaaatgggaggtgctggaagccaggactggctgcaacacccactccccaccccacagcgagtgtggactgcgccccagatgctaatgctaggatgggtctcagggacccagggaaggggaggtggtgggggtaggaggagatgcaggagaagtcaggtttcagggaaggagagaccaactgggccacaggagacgaggcctgaggacggactgttggctttggtgctgtgcctgtcactggggactgggcaagagcagctcaggaggagtggttggggcgaaaggggctgagagaaagtgggaggacagagagtgaagccagtgagctgagatgactccagtgagctctgagggcaaagagggctgcgtagaggaaggggagccaagctgtccatatgggacgtggagcttcccgaatttgggaggcaggaggtctggcttcagaatgagattggttggagcaggcagcaggggtggaggcagctggaggctttatcctgggggcaccgggaacccaggtaaagagtttaagcaggccgggtgcggtggctcacgcctgtaatccagcactttgggaggcc

SEQ ID NO: 17443 - DNA, 1285 bp, Artificial sequence
  DNA replication origin
aggtgacatcagtgacaaagggccaaggagggaggtggcaacagagggagaagtcacatttgcccactcagcacatccttctgggcacggggctatagttttttttctttaaaaaaaaaagtgtattttttcagagatggggtctcagtatgttgcccaggctggaatgcagtggctaatcacaagtgtgatcctactgctgatcaacatgagagccttgatctgctctgtttctgacctgggcaggttcacccttccttaggcagcctggtggtcccccgctcccgggaggtcaccatattgatgctgaacttagtgcgaacacccaatcagcatagtgcactatagctcaggactccctgggctcaagcgaccctcccgtctcagcctcctgagtagctgggaccataggcacatgccactgcacccagtgggatacagctttctatagagaccctggcctagtaacttcacagggggttactcgtgggtttcccacttggagtaggggaggccagaggagacctccaggggaagtggcatttaacctgcgatctgaagggaaagcaggtgtttgctgagtgaggggaagagtgttcccggcaaaggcaacagcgtgtgcaaaccccttgaggcaagaaacaagaagctgagcagcttgattagaccctggaatgaggcaggtctggcgtgagctgaatctggcagggccagaccacacaggacctggtgtgtccagctgaattgttgcattctatcctgggggcagcgggcagctgtggagggagggatttttaacgggggtgatgacaaggtcagatttgagtttagaacattctggatttgcgaggggcctctcctgtgagctcccgtgtgccaggaactgtgctggagctggggttatgccagtgtggcccagcaggatctgagagaccttcctggaggaggtgtccagtgcagcacaggaaaaagccacacaattccctgctggcagggagagcacccaagagcgggaaggcgctgcccccaccccaggtgtccccctccacctctgccccgactcaccatggacggtcacctggtagagcctgtgggcctcgcccacctcattgctcaccacgcattcaaactgggctgagtcctgggggccgggggccgtgaggagcagggcgttggagggcaggagcctggggtggacagacagacggccaagtggctgctgggctgacagagaccagctgtggctttctggctgtgggggtctcacgcccatttccccttcctg

SEQ ID NO: 17444 - DNA, 1506 bp, Artificial sequence
  DNA replication origin
ccagtctggatttgccctgcgggggcggggttggaggtggagactgcgcttagccttgccgcgggcatctgcttccaaccccagcctacgtttctagttgtaaggcctggggcaggtcacccgccgggagaaacctttccagggcagcagctgccacccctaaggtccccatgtctccgtgtgtcttgatgagtgtccgtggccgctgtgagtggcgtggaggagatgggtttggtgctggcgtgtctgagttttgtcctggggttgtgtgagtctgcatggtggtcctgtgtctggggtttggtgtgtgtgctcctgtgtccccgttctctcccactctggcctctccctgcccccagggctccgtgcgttcctgcctgcatcacttgtgtggggagtgacaatgacagggccagcctgcacccccagtgactgaaaaatgtgcttttcctgagggcacgaggccctgccaactcagcccttacccagggctggggccctgccggtaggtggcaggacagggtgtgtccacacactggtagctgccacgggtgttgaagcacatctggccgggtccacactcgatgctctcctcctcgcactcgttgatgtctggatggggaagttggtgaagcgggggagggagatgaaaagatggagcaaaggagaaggggggagtgcgtggggagaagtacctttgggggaccagtgaggtgggcagcccttctccctttgtccccagccagtctgacccatgaccacccagctggaggcccgcagcaccttctcatctccctcggggggccagggctttccagggcgtgtaggtgggcaccgtgggggcctcctgagcaagtgctgggtaggagggcctgggagagatggggctttccctgggtggctgctttgcccgaagacccagagtgcccactgcccacgggcagagcccctgatcctgtcttcctcagtggaagccccacccttctcagaggatgttcagtgacctccatggcagcatgagggacagagacaggcagggcaggcatggttcctgttctttagagtggaggaagcagcatgaccggccccagccccgtttgtgcacaccagggaaactgtgcccggtttgggagttagaggcacttactataccagcagcagcagctgtgcggctctgtgctcaacctccacagctctcatcccagctatctgagaggggactgtgctagccccatttaaccaggaggccggaggcttagagaggtgaagtgagtttcccagggacacacagcagtgctaggattggccttgcagggctgctttcagagcctgcccgcgtgatctcagagctcctgtttggagcatgggccctggcgtggctgtgggagcctggggtgttcacagaacccctctgagcctgcctccccgccccacctcacaggatagttgtgaaggggctggagtgaacggagtaggtaagatgccacatgtcccatcccacgctgc

SEQ ID NO: 17445 - DNA, 1248 bp, Artificial sequence
  DNA replication origin
gggtcaaggctgtgcgcagggtcgtgttgacccaaggtctcgctgacgcacggggcgggagacgatgacgctccgcttgccacagcaggtggcgtggaccaagcttctcctcgaccccttcctcgggggtcacgccagggcggccgccaatgccctctcccgtttagtaggggtagggggacacggcgatgagcaagacgaagacgctttggtggcgcggtgccgcagcacgcacggtgagccggtagaggccggcgcgggtgagcgcgcgacgggtgtagaccgcgccaaggcccgcgcgcagcggacgcagcgcgaaggggctgcgggggtcgggctccagcatgctgagctcggtgcggttggcggggacgccgacctcggagaaggcggtgaggcgggccacgtcgtggtgggcgcgcacgcccaggggcagcggcagcagccggtactgcagcgtagaggggccgcccgtgccgcagtcctgcgagcagcgccggaagcacgtcctgcgggcggcacagacacacggacaggcggactcgggggtgcggtcggagcgtggcccatccgcgtaactcagacctccctgccagcccctgcagttccgcccacgcgctgcccgtccttctcccgcagagccccacacgccttctctgcaggctcccacgctagcccgttttagagttcaacaaactgaagcccagagaagccagaggcctgccctttcatggtccctccagcggactttcgggatccatgccccagggaagcccagcagacacaggggagcgatgtgcccctgggccaagtcacccagtctggatttgccctgcgggggcggggttggaggtggagactgcgcttagccttgccgcgggcatctgcttccaaccccagcctacgtttctagttgtaaggcctggggcaggtcacccgccgggagaaacctttccagggcagcagctgccacccctaaggtccccatgtctccgtgtgtcttgatgagtgtccgtggccgctgtgagtggcgtggaggagatgggtttggtgctggcgtgtctgagttttgtcctggggttgtgtgagtctgcatggtggtcctgtgtctggggtttggtgtgtgtgctcctgtgtccccgttctctcccactctggcctctccctgcccccagggctccgtgcgttcctgcctgcatcacttgtgtggggagtgacaatgacagggccagcctgcacccccagtga

SEQ ID NO: 17446 - DNA, 1988 bp, Artificial sequence
  DNA replication origin
aattaaaaaaaaaaaaaaaaaaaaggaaggtatgagtgtctcagatcccagtgcctttgtttctccacctgctcaggcctaggtgctgctttgtttttaggaatgccaccaagatcacttacctagaaggtgcaaaggctcctggaggacccctgacctaggtgtgggcagggggtaagatgaaagtcaaaggccatggtgccccagtctcaggtgggggaatccctttgggccacgccccactttggccctcagcactgctctgcagggtaagggccagggcagggttgaaggtccccctggccgatggaggggtccaggcagaatggggctcattcagaagctggccagtcctccctcaccttggtctctgcctctgggcaaccactcaccctgctgttggtggcaggacggtgggggtggggggcggggtgctgctggcagtttgggcccctgttttcttctcaggagcgctgtgacctcactgtccctcatgtcactggtgcatgtgagttaggaagggtctgtcccctaggctggaaccatttctgcggcaaggagtaaaggtcccagcagcctgtgaccctgggactgtgacctcagttcagctcaggctggagctaaagcagagggtttgagccagagcttcagacactggattctagctccgctctgccactcacatgctgtgtggccttgggaaagatacaccgtcattctgtgcagcaggtttctgcccataccattgagataacaatcacaggtacttcatacagggtagtcgtgaaggtgaaaacagaatgcttgctctttccagggcgaccctaccaatgagaaaacaggctgcagtggggagtgaccgccccaaggacacacaactgctgcaagggtgtcattgtgtaggtgttcctcacttgcctcctgctagtgtgggaggcccagagactccacgagacccccagctgctcctgtgagagggctgaggggggccagctgtgataccgcctcccatctagaaggggcctcaagccacccatgtacacccagccccacgtggctcaccaggggcccctttgccatcaagggccacatcccaggtttaagtgtcagagaactaaggggcttaagagagaatcgagctgtggctttgtttgtgaattggtttgatccttttttccttctagaaggactcacagctactgttgcttgccatgggcttgagggggtggtgggggctgactggcagaggggctgagagtggatggtgattaaaaggagcactgactccagggtagcggctgggcaaggcttggggctcccacctcccccaggttcagagccggctgaggaccgggagtcctcccttctggggtcagtgctcactatggagcaactgccttggatggggtcccaggacttgctcttttactggggctgtggttgcagtgatcagggctttggagccggcagaccaagctgggaaactcctgaggtagagaagctgttgaaggcgggcctggggtcacaactcccagctgctttttacaagcaagagacttctctctgaacctcaaccttccctcctgtctagtgggttcgcagccagacagtcttttactcactgcttactgggtgccctctggagtctgggcaggtgccaggctctgagaagacaggccagcaatcagccctggcctaagggatgaaagccgggccttcccgcgccggctcacctcggttttctcatccttactcggctaccagaggctatggttggggagggagggggctctgggggctgcagaaggcccaggctgccggcaccggatagaagtgagcacgaagctccctgcgccagtggaacttttatcccggctcccaccgcgaagcgtttaaattgcttccccagggccaggaggcaagtctctcgaaggacggctgcggccaccctccgcccctgagttacatgggtcgcagccactgccgcc

SEQ ID NO: 17447 - DNA, 1355 bp, Artificial sequence
  DNA replication origin
cactctacacaccttccagaaaaccagccccccagtgagtcatggccaacctgcccactatttctctggagagcctgtgtgctatagctcaggcctactgccccgtggaagattcccctgcaacccctcgctgacattctaactcagctgagctcggtttgtctttggtgatggacgaagggcacattcattcattcgttccactcatatcaaagtgcctatgggtgcctggtcgaccccaagtctggggagggagccacgccctggaagatcaactttgcccaaagctacatcagaaatcagagccttagactctgaattccagcgaagttacctctttccacatgggtgcctggtgcccacaggcaagccactgacttcagggactgtgtagtcagtgctcagatgaggcatctggttgacctggctggcctcccagcaggccaaagatgagatgggcccgggttgggagggggaagcgcttgtgcagcaggctgttttgggcctggctccaccccaaggctcctgcggccctgggcctgcttcccaagcactcaggaatggagactgtgctgagagtggggcctccccttccctctcacgacgtgtctgcccccgcaccggccaggcgctcagcaggcaggagtcactattcattcacttgatccacccccacagagcagaaccagaattacttctcagcatggtgcacagatggccccgccaggacagggtcccgcccccacccccaaacttccccgccctaggccttgggcctaaggggtctgggagggagagggagtttggaatggagactcctccagttcctgctcctagccaagcttcccagtccgtgtggctgcttctccctccctctcatcagaacctaaccccaggcacagttattgtgcaattggacccaggcccagcacccaacagtctacagagcccttagcagccgcacagtatctgcaaatgtttcctgagccctcagccccagccagctctaacagactgaagcttgggggccaggcactttgggtggctcgagcctgtaatcctagcagtttaggaggcccgagggaggagggtcgcttgagcccaggagctcgaggccagcctgggcaacatgacgagtccacatctctgataaatttttagaaagaaaagaaaatgaaaaggaagcttgggaatctggaggctgagccaaggcctcaccagctctccccatcactgggtttgtgcttgctgggagcgggaggatcaaagcccaagtcccctaggtcttgatctacccctggggagagaacaggtctgttcctgccctgagacctgcagcctgactcggctgctcg

SEQ ID NO: 17448 - DNA, 1483 bp, Artificial sequence
  DNA replication origin
ggttagggctggctgagtcaccagcaactcaggggcagggggttgaatgcccagtagggacgttgtgggcaccgaccagaaccatcttctctgccccagctgcatggtccatgaggtgtttccccttctaagtccaaagggcagcacaggcctgtgagccccggctgactggcaggtgggaccgtgcagcatgcacgggactgaattctcatgtgacggagctccaaagtccacctggctacacggccaggctctgcagcagaggacgggaggcctgggaaaggcacttcctctccccgagcttccaggcacacagagagtgctcaggatagcgatgcctgcatcactgcaatggtgatggccgggtgacccttctgggctccacttccccagtagtgtctaataaagaccctgggtgactctgaccttgtgacgttggtcagactccagtggaaacgttcccaggcagaacaaacatgccctgtacatttgggaaatgcgggatgctggggccaggtgtccacggaggctggaaccaggaggcctgggcccacatctgcccctgctgcttgttgatccgatgaccctgggcaggtgacctcgtctccctaaccctggtttcctgttcagcaaattggacacagtgaagacgcccaagcccagggccacaggaggcatgtgggggaggggggtgcagggcgagcccaagggcagcccaggattcagggagagccctcggggaagaagcatggctgcaaagatcaggagacaggaggccttggcgccttcgggaggcttcattgtgacggagggtggggcaggatgggagaccgcaggcacttcccggctgcagagggcctggctgcagagagccctcgtgcccatctgtccccccgggaagggccgctggttgcagaggtcttaggcctctgcctgtctatcgccttccctccctgggcctcagtttctctacctccacactgggggaagttggtctctgagcccctccaaactgggcattggcagagttgaattcagaggcgctcacatttggagacacgatgtctaaaattccagccagtgaaggttccatggggttgcaggtaggagagggactggggctgggcccctgccccacagcatccttctccacctgcaggtgggcggcggcactgcgtgctggggaagcacagattcttgtgccctctgtgaccttgagcctgccactgacctctctgagccctgctggctgcctccccaataggaatgacaactcctacttcatgaggttgtagtgggggctcaggggcacagggagatcccgctgaggctcccagggccctgcctggtgcttggcaaggagcagttctgatgggggatgtgtcagctgccagaggctcagagccaaggcccctcccacatctcctgcctgcgtgcattcctcacatcctggccttgggccaaactgctcagcctcagccgc

SEQ ID NO: 17449 - DNA, 1083 bp, Artificial sequence
  DNA replication origin
gctgtctgcccatccagatgctgccatgcggacacccatctgttcaggagccagagaccctcgaagaggccaaacaaacgcttccttggttcaaactctgccctcgtctcaggcaagagccaaggaggccagtctaatccttccccctctgaaccccaagaccccagcaccagggcagctcctggcagctttccggggagaaggaggatgtagtgtctcacacacgagtgtccgcatgctgatatttgtgcacacgtgtgtaaacatgcatgtaaacacggtcccactgggactggggggcctggggtctcccatctgccctggggcacccatacagatggtgccatttacaaaactctcgctccccggctagagtctcagaatcatatttccaggcccctcttccaaaactagggggagagaggagccccgcaagggccaccccagcttcggtgcagctctctgggtgggcaggggtggggctggcagcagggcatgggaggggagagtgcggctcaatttctgcaccaggtgctgtctggacggggtgctgggaagggaggctgcctccgcctctgccttcagggctgggctcaggcggttccagcaaacaggatgcccttccccctcacatcccaggccaatccgttgtccccccaacatttcactgtcaccttccctgagcccaaagacccgaaagcctccacctggcccgtcccccgtgatggcgcccggggcagtgctgggtggatactcatgggatggtggtgctgggtggttactcagggggtaaatgcctgaaggctggaccagcacctccaaggccttggattcccctcgctcccagccttcctggttctccactcatacccccagttctcggaaattgtctccagaggctgttgggggtttcctgggtactgtcataaagggacactgaggcgcagaagtacgccttgcctgtcaaccccaggaaagaggtggctgtgccaggtagcacctactccccggcatccccggagtccgtccctgttgggtcttctgagtgtgaatgcagggacgcccccaagtcccgagcggcca

SEQ ID NO: 17450 - DNA, 1427 bp, Artificial sequence
  DNA replication origin
ctgctcagggcgagggaacgggccctggggctggtgccctccagctctgtggctcccctactgcccacggcccctccctgtccaaacctgtcactcaggagagctgccacccttgccccctgggggctgatggcccctgtgtgtggctgctgcctgctggtcacaggtttttctagttcatgctctgctgaccccacaacactcaggccagccaccctaattagccagtcagtcagctccaagggaggcagggaggccgagcctgcagggtggcttccaggcagggcatcctctcaggcccgtgggccccaagcatgctgggcaaccactcccggccattctccaagcagcctatggcctctgcaagcagcctatgggggcagagaggaggcccccccagaatagaggacctcaggattgagaaagcagagcaaggccagagggaaatcaccccctcggaccgtgcaggagggcatccggggcctggagcaggttactgagctacggtgggcaggtcctgcgccctcccaggcctcctgtctcatgagggcattgggtggagaagtcagtactaaagagaatctggattaaggatcctgctacctcacccacacttgggtcccagagacaggaaacccgagtctaaatcccaacttttcttcttattgctgtgcaacctcgagcaagttacccaacctctctgagcctccagtactccttgcccaaagtgggaaaacacagcacctccctcctagggcatctaaagcgcttggcctgtctcagggcaagccctcagtcatgcagctgggggtcccatgctacctcttcatgggaggaagggtccaaggtcctctcagggacccctctcaagaaaggctgggctgggctaagctgggtgtgagtcaggggaaacatcgttcctgctgagaggcccggggcacccagagtcccacccaggcacccagagtcccacccaggcacccagagtccagtcactctggaaagaagtttgccccagccatgcagactccccaagggctttgtgctgagggtggggctcaacgtcaggacgcacccttgcatccctggacctggcagccctgtccccctcgggatgagctcaggggaacagagcctggggaacccgtgcccctccccctctccaaaagaagccaggagacctgcggaagggagggcttgaaggcagatggctgagccattttctgcctccgtgagggctgattgaagggcaatgaggcagctaatgcgaagaaagatagaaatttacttgctttaacttcatacggtccacagtgaaagagttcattcagtcgccggcccgccatagctgatggatgaataaaccatttgcggcatcgatcatgcctctacatcatggtttagttcatgggccatttgcttccaat

SEQ ID NO: 17451 - DNA, 1116 bp, Artificial sequence
  DNA replication origin
ctccaagtgtctattttcatctccccgtgtttacaggaaaaagacagaggtgtcagcagttctctgtggagcagcttcaatcacaccataattactgccaagaaaggtgcagcggggagtggggagacgggcaaggatctaggggtggccaggggtggctggggggagagtggaccaagcagaaagaggtgggaaccaaacagctactgtggcccaaattcttctcatctgtccctgaggctgccaggttaggcagaatgagcaattttgcagaattgagtgggatccgccagctcagctggggcctgggctggaggtgagggcacctggactaaaggctctggtcctttgggaaagtagaagaagtgatttggaagaggtggggcataggggttggctggagcccaagggctcccctcttaggtaccagggccaaggtgagaagcagttgccatggtgatgggaggccagtcagggtgggactctagccatcctctatgctcctggtgcctggcgggccccatcctgggtgggcctctggggctgaaaacctttttgcttcacaggtctccctccattctccatctggaatgttccagatggtgggtgggcacgttgggcaagtgggtgacagcccttgttccttctgggccagaaagtggaggagtaaggaggaagggagacaggaggggagagtggggaatggggaggaggatgtgcaaagagggaagggcaagggagggaagaggggaaggaggaggaaagggagagagggaggaggaaagggagagagggaggaggaaaggaaggcaaggaggaggagcaaggcgggggcaggcagaggtgagacgggcagggctgggaggagagcggagaggggagagcggcgggagaagtctggggccagagaggagacagagaaagaggctgagcacaaggacatgcgctggctccttcccggcctccctcggcttccctccggcctgccttgccccccttctcctccccactgatttcatttacttcacttaattagcccccctccagagttaaaaagataatgtgataatgacatgtgaacagccacaatacggagaaagctactccagccgcggc

SEQ ID NO: 17452 - DNA, 912 bp, Artificial sequence
  DNA replication origin
gcctggccgcccatcgtctgggatgtgaggagcccctctgcctggctgcccagtctggaaagtgaggagcgtctctgcccagccgccaccccatctaggaagtgaggagcgcctcttcccggccgccttcccatctaggaagtgaggagcgtctctgcccggccgccccgtctaagtgaggagaccctctgcctggcaaccgccctgtctgagaagtgaggagcccctccgcccagcagccgccccgtctgagaagtgaggagcccctccgcccggcagccaccccgtctgggaagtgaggagcgtctccgcccggcagccaccccatccgggagggaggtgggggggtcagccccccgcctggccagccgccccgtccgggagggaggtgggggggggtcagccccccgcccggccagccgccccatccgggaggtgaggggcgcctctgcccggccgcccctactgggaagtgaggagcccctctgcccggccacgaccccgtctgggaggtgtacccaacagctcattgagaacgggccatgatgacaatggcaattttgtggaatagaaaggggggaaacgtggggaaaagattgagaaatcggatggttgccgtgtctgtgtagaaagaggtagacatgggagacttttcattttgttctgtactaagaaaaattcttctgccttgggatcctgttgatcggtgaccttacccccaaccctgtgctctctgaaacatgtgctgtgtccacttagggttaaatggattaagggcggtgcaagatgtgctttgttaaacagacgcttgaaggcagcatgctcgttaagagtcatcaccactccctaatctcaagtacccagggacacaaacactgcggaaggccgcagggtcctctgcctaggaaaacc

SEQ ID NO: 17453 - DNA, 1194 bp, Artificial sequence
  DNA replication origin
agcacatgtttcagagagcacagggttgggggtaaggtcaccgatcaacaggatcccaaggcagaagaatttttcttagtacagaacaaaatgaaaagtctcccatgtctacctctttctacacagacacggcaaccatccgatttctcaatcttttccccacgtttcccccctttctattccacaaaattgccattgtcatcatggcccgttctcaatgagctgttgggtacacctcccagacggggtcgtggccgggcagaggggctcctcacttcccagtaggggcggccgggcagaggcgcccctcacctcccggatggggcggctggccgggcggggggctgacccccccccacctccctcccggacggggcggctggccaggcggggggctgacccccccacctccctcccggatggggtggctgccgggcggagacgctcctcacttcccagacggggtggctgccgggcggaggggctcctcacttctcagacggggcggctgctgggcggaggggctcctcacttctcagacagggcggttgccaggcagagggtctcctcacttagacggggcggccgggcagagacgctcctcacttcctagatgggaaggcggccgggaagaggcgctcctcacttcctagatggggtggcggctgggcagagacgctcctcactttccagactgggcagccaggcagaggggctcctcacatcccagacgatgggcggccaggcagagatgctcctcacttcccagacggggtggcggcggggcagaggctgcactctcggcactttgggaggccaaggcaggctgctgggaggtggatgttgtagcgagccgagatcacgccactgcactccagcctgggcaccattgagcactgagtgaaggagactccgtctgcaatcccagcacctcgggaggccgaggctggcggatcactcgcggttaggagctggagaccagcccggccaacacagcgaaaccccgtctccaccaaaaaaatacgaaaaccagtcaggcgtggcggcgcgcgcctgcaattgcaggcactaggcaggctgaggcaggagaatcaggcagggaggttgcagtgagccgagatggcagcagtacagtccagcttcggctcggcatcagagggagaccgtggaaagaggggagagggagagggacag

SEQ ID NO: 17454 - DNA, 1170 bp, Artificial sequence
  DNA replication origin
acctgcaccttccactcagaatggccagtggttctcccaccacaactgattcacagctttggcttgatcacaggctgttgcctcctcttcggtgctttccacttactttccactgggttaactcttatgcagcctttgaaacttggtcaagttcaagaccagcctggccaacatggtgaaaccccatctccactaaaagtacaaaaattagccaggcgtgtgggcgggtacctgtaatcccggctgctggggagactgaggcgggagaatcgcttgaagctgggaggcggaggttgcagtgagccaagattgcaccactgcactgcagcctgggtgacagagtgagactccatcagaaagagagagagagaaagaaagaggaagagagaggaagaaggaagggagggagggagggagggagggagggagggaaagagagagaaaaaaagaaagagagagagaagggaggaagggagggagggaggaaggaaggagcgcccatcttcatttgtcatgaaaaacgtgactactgctcacttctgcagctagggtgaaacgagggggccaggagagcaggttctacaatttttctttaatctgctcctttagcaagtaagtgttgagctcctgcagtgtgcttggagtataaatttgaaaaaggcagaagcaggcaccagcctgggggaactcacaggctagaggagaaacaggtcatgagtccccttgtgactggcaagccccgcatgggggagcatgaaggtggggctgcttcacagcctcagggagctcattcctggggaggggaagtctagccaagacctgaaggaggaggattagccatgcaaagaggaagggaagggtgttctgggcacaaggaacagcacatgccaaggcttggaggtaagagagagcagatcggtctggggacgggaaggaccagtgtggctggaaggagacacccagccagggtgatggggctcaaggcacacaggaggcagcagatgaaggtggggtcagacttgcagaacccttgggctgagcctaggagtttggaggccactgaggaggattatgcaaagaaatgacccaatctgaaatgcacttagaaaagtttctctgggccgggcgcgatggttcacgcctgtaatcccagcactttgggaggccaag

SEQ ID NO: 17455 - DNA, 853 bp, Artificial sequence
  DNA replication origin
ggcacacggacagggatagacaggctgatggccactggcagccatggtgattaaaacacaactggagtcccagctactcaggaagctgagacatgaggattccttgagcccaggagttcaagcctgcagtgagccatgattgggtcacttcactccaggctgggcaacatagcaagaccccatctcaaaaaaatagagtaaactcaataaacattggatgcttcctgtgtccatttccctcacctgggtcctgctgcacctgcctcaccatggcctccaggatcctgcagctgggctctgattggctgttccctgtccccatgcaggtgctatgaaagcctgacctgatgggtggggaaggctgcttgaggaggtgacggttcagtgatgctcagtgagggttaagtgggtggagcgagcgagagagagagagagagagagagagagagagagcagggcaggggaggacctacagctgcaaggcccaaggcaggagggagctgtgagttgggagagagaattcgtgatgaagctggagaggaggtggggctggtccacagggccctgtgggccatggggagagatttgggtttgatccgaggccaatgaggggttgtatcccaaggtcgatgagtcatggaggttctaagcaagggaggggtgtggcctggtgggaggggcccaaggggggcagggaggtagtggatggcactacccagggcagaggtggatgaggatggcacagaggccaggacggtgggatggagagtggtgcataagaggtaactcggactggcaggagccccctcctctgcatgtccccagcatcgaggcccaggacctcatgctcaga

SEQ ID NO: 17456 - DNA, 1724 bp, Artificial sequence
  DNA replication origin
tgggagacccgcccgacaggccgggcctgggcctcgcagtggcgccttatccccccggctcctcccggctgtaggaactccacggaacggcccggcccggctgagacgtcggttcaggctgcctcccgccccccaggcccgaacccctcttccccgcccgccaggccccgcctcgggatctcgtgctcctgccagccggctgcgcccgtacctgccggacccggtgcagggcatccacgaagccctcggccttcatccccacaggagcgctctgcccctgcaccagctccgccattaccgcccccgccgccgtcgccgccgccgccgacgccgccgacgccgccgctcggctccccggtccggcctcccgctccgcttggggacccgtagccggaaaaggaaagtcgccctacttccggcggaagggaaagccgggacgctcgcagctggaggagtcgcgtctgcggggcggggtcagggcacgtgaccttcgaccgatcggaagtgggggcgggacggcagcgccggggtgggctcagatcgccaggcagccgtgggtctccagggtccggtcgcgacccttcccttcccgggcgggatttggtccaggaccgtcgatggcgtcttgacaggtccccgaggcttggatgtggtcccgaggtgtccgctgtcggccgtttggaatctcagagggactgacgtggctctcccaagacggcaccccgaacagtcgtggttcatcaaaagcctggtcctgggtagcccctccctgaaatggctgttggttgggaatttgggggctgagcgctttgaaagggcattgggacagcatcacagaatgtcagtgtcccacatttgcgaggagtcccgggccccagttcttacactgcagtttgcatgaggatgggccaccgccacttccgcctggggttgtctggtgatgcccccaggagagacgcgcccactgaaaagccagcgtggtgtcctcttacacggtccttaacaaactctgggactctgggggtgcaggaaataccacaggaccgtcattactcccataccggctgagtcacaactgtattgcaggaggcttcttggaacgcctatgtaactttaatggaagtgaccaggtacagatcttctacagcaaggaaggaatcttagtgctagaattcagttgagcctttgagttggctcttcttataagtgagcaaacaagtaacaaggtttagggggcgcccatttttgtgttagcacgattgccctcgtgtttaatatttcccaagccctattatgataaggagttggacttaatgaagaaccatgttgtcaaacatcttatgcccatcttgaagttgtgaaggaggatgagcaccaagaaaaggaaataaataaaatccaatacgggccgggtgcggtagctcacgcctgtaatcttagcagtttgggaggccaaggcaggcagaactcttgagcccagaaattcaagaccagcctaggcagcatagtgagaccccgtctctacaaaaaatataattagctgggcgtggtggcaaacacctgtagtcccagctacttgggaggctggagtgggaggatcacctgagccctggaggtcaaggctgcagtgagctatgatcacgccactgcagtacagcgtgggtgacagagcaagaccctttcttggggaaaaaagtcccatataactttccttgatgacccca

SEQ ID NO: 17457 - DNA, 1281 bp, Artificial sequence
  DNA replication origin
cccgggaagggaagggtcgcgaccggaccctggagacccacggctgcctggcgatctgagcccaccccggcgctgccgtcccgcccccacttccgatcggtcgaaggtcacgtgccctgaccccgccccgcagacgcgactcctccagctgcgagcgtcccggctttcccttccgccggaagtagggcgactttccttttccggctacgggtccccaagcggagcgggaggccggaccggggagccgagcggcggcgtcggcggcgtcggcggcggcggcgacggcggcgggggcggtaatggcggagctggtgcaggggcagagcgctcctgtggggatgaaggccgagggcttcgtggatgccctgcaccgggtccggcaggtacgggcgcagccggctggcaggagcacgagatcccgaggcggggcctggcgggcggggaagaggggttcgggcctggggggcgggaggcagcctgaaccgacgtctcagccgggccgggccgttccgtggagttcctacagccgggaggagccggggggataaggcgccactgcgaggcccaggcccggcctgtcgggcgggtctcccaggtgcctgaagtcgctgggaaagggtttgcttagagcgtctggccccatcgtgccccagcggccagcctggacccacagtgtagctagcgcggggttctgaacctcgcgaggggaggggtccgggaagcccacggggaggatctgggtgtagacataaagcagctgtctgacgcccagtagcttgttaaaacttggggaacatcgtctttagactttctgttgagtagaaggaactcgagggcatcttatatgtgagggtgctctttggagaggtgagagagggaggtgttacatgtgtgggggtggtccccaagatgtagaaatttctcatggcaagcttgcctctactggggagaatgatatggcctcattccgacattgaaactttactgtctgacaatgtcgtgcatttaatcaaagttaaattaactgggttttagaaggctccaggcttccccagagagtgaatatgggacctgccaaaaatacttactggcttctggcatggtacttagaacagaacgtgttcttcatttgtatctaaaacttacttacaagtcagccctaacacttcagcttcctcggttaagtgtcttatgtcctcctctcttcttatgtaattgtaagcgcactgatactttaaaagttgggctataactaattactgcttgattcctaacagaaag

SEQ ID NO: 17458 - DNA, 1612 bp, Artificial sequence
  DNA replication origin
ggggcccgcgccgctcccctccccccacccccgttccccgtaagacggttcagggttccagggcgcccccgccggcgcgtacaaaggcgcggctggctgccaaggcgggtgggggcgaggccgaaaaaaacggtttcaacagacgtgactcggggccaggcctgcgcggggctgccggcggagtggcggcctcggctcagtgaatggggacagcggccccctctcccaccccacccctgtcccctcccaatgtaattagctttcaaggctcgggagagacaaaggcgcgccccggggcgcccacgtggagtgcgtaggcgcgaagtcggcgccccgaccggcaggtgactggcacgcgagtctccccaggcgcccaggggcggaggaggggaagcccctcccctgcgcctctcgaacccccttccatcgcccacaccccggtccccaggccagcgatgccagcgccacagcccaggctgatcaaggcggcgggaacgacgggagagacgccggggacaccaggagaccgggcggtgggagagacagaggcgcaggcttctggaagcagagggggcgagacaggggtcgggggagactgaggcaaggcgatgccgaggtggagggagcagatgaaaggccgagtcggagacgcaggggtacaaagactcggagatgaaggaagcagagggggagaggcacggcttccgaaagagcgggaggcctggagaggctttcaagagctggatcaccaagagggagcaacagggtgctacagagagactggagtgtgagggcaaaaggagtcctggggaaaacagcagggaaaggttgaagagggcaggctggttggggtctgtgggaggcaggcgccctccctgtccgtcttccctggcccctccagcctccagctcaccctcctctgttgcctgcccctctggtgggtctaggggcagccagaaggagccctctccgacccattcacaacctcctcttctgcccgagtcccttcccaccccacacccagcccttcctccacaacttccctgagccgcctcctgccttccagaaccttgcactcaattccacctgaaatgtcctccctgcattgccccagagcagacagggggttggagtcagggggctgtgccctgactgctgctccctgaggccacctgctgccatccagaccatctcctgcctcatggggaatcattgcattgttcaacaaacattttttgagcacctactatgtaccaggtcccatacaaggccctgggggcaccaagtgaccagggcagacccagttcttgccttctcagaccaccttccaagcggtgcaccctggtaggccagagcttctcctaggtcgccctggtggctctgaggtctctcttgacagctttctctgagggctcctgctgaaatggctgtgacttcatttgtagagtgggaacaataaccaggcctgtttgtgatgcctcacgtatcaggtgaatgagctcacactcaagttgcagagtgaatggtgaaaaggtgcttgtggctggcactcctattactgtcccctccccagagaccactccccaggtgaataggtcctctggggccatca

SEQ ID NO: 17459 - DNA, 769 bp, Artificial sequence
  DNA replication origin
ctgtctctcccaccgcccggtctcctggtgtccccggcgtctctcccgtcgttcccgccgccttgatcagcctgggctgtggcgctggcatcgctggcctggggaccggggtgtgggcgatggaagggggttcgagaggcgcaggggaggggcttcccctcctccgcccctgggcgcctggggagactcgcgtgccagtcacctgccggtcggggcgccgacttcgcgcctacgcactccacgtgggcgccccggggcgcgcctttgtctctcccgagccttgaaagctaattacattgggaggggacaggggtggggtgggagagggggccgctgtccccattcactgagccgaggccgccactccgccggcagccccgcgcaggcctggccccgagtcacgtctgttgaaaccgtttttttcggcctcgcccccacccgccttggcagccagccgcgcctttgtacgcgccggcgggggcgccctggaaccctgaaccgtcttacggggaacgggggtggggggaggggagcggcgcgggccccacgcgaggaaggaatttcctgggccactgcgaaagattgaggctcagaaagccagagagagacgtgcgaggaggaagcggagagggtgtgcgaagctggagagggagtcggagcgccagcgaaagaggggagcgctggggaaggaggaagagaaggagagggggagaagagagacgcggatgctgggcgcgcgacggcagcgggcggaggaggggagcggccg

SEQ ID NO: 17460 - DNA, 1456 bp, Artificial sequence
  DNA replication origin
cctcaagcctcggaccccaggccctgacatgctgggtgagggagctcaccccacctgccgcacttctggctcccatcaccagcctacaatttcagatgccgctaacagaggtgcctggaccctctcggcgtgggtcaggctcacggattagtctccgctggactgtgtggactccctagaccttctcctcagcgcggaggacttgggtggaagaacagcgagctgacctcccatgagcgagaccctgtccaaacgcctgttggcatagacgcccctccaccacccggacgcgccttggctaagagggtctcacacctggcgtccagactccagacccctggtccccagttcctgccagtagtctccggcatcccccgtccccgttgggacgcaaagggaggaaggcggcggtagctggccttcagaccctgcgtccgggtccgcccgaggctggagcccaaggaagggcacacctggcagaaggcaggaccgttgggcagggcgccagcagagggcagcgctgctgaggagggaggtgggttagggtcgccgaaccctccactcatttttcgacgcagcttgtgggtcgcatcggctccctggccagagctcgagtctgagggggcgtatggagtccgatggctcctgcaggggagcctcaccggggcctacttcttggcttctgggaagacctaggtggagaggacaaagtgctaggagcgagggagacgacgtcggggagcgctgccaggagccaagcgctgcggcagctcccaagccccgaaagcgacctcagttcctccaggacaccaaagggggataaggactgctgtgtgtcctgtggactgcccctttcctctctgggcctcggtgtccctgtctgtgcaatggtttgagttggactttgtgaactgaggtttctttgcttggtctctctttgggtaagatcactttaccccacgacaaccccgaggattttgccctctccagggccacgtcccactgcgggaagccctcaggtctgtgcatcctccgtgctggggtgcagcgtttgggtcctgaaccccggcttagagttagaggcttggattccgctggcgcagtgaccacgggctcggactgcggccagggagtcccattcctctcctccggacccgcaagcccggagagcagtactgggagccgggcagaagcggagcgcagaacgtcctcccagctggtgcgcccaaatctccaccgcgctcacattttgtgcttctagtctagcggcaaaacccacctggacccccgcccggggaaaaaggagcccgtaggtagcgcccagtctcaaggtgcattgaaatagggagcaagaccctgtgctcacatctccccgggaggagatttcgaggggaaacattccgggctttcccagcggatgacccgtgttattttgtcattttccgcggggcccagg

SEQ ID NO: 17461 - DNA, 1333 bp, Artificial sequence
  DNA replication origin
gaggaaaggggcagtccacaggacacacagcagtccttatccccctttggtgtcctggaggaactgaggtcgctttcggggcttgggagctgccgcagcgcttggctcctggcagcgctccccgacgtcgtctccctcgctcctagcactttgtcctctccacctaggtcttcccagaagccaagaagtaggccccggtgaggctcccctgcaggagccatcggactccatacgccccctcagactcgagctctggccagggagccgatgcgacccacaagctgcgtcgaaaaatgagtggagggttcggcgaccctaacccacctccctcctcagcagcgctgccctctgctggcgccctgcccaacggtcctgccttctgccaggtgtgcccttccttgggctccagcctcgggcggacccggacgcagggtctgaaggccagctaccgccgccttcctccctttgcgtcccaacggggacgggggatgccggagactactggcaggaactggggaccaggggtctggagtctggacgccaggtgtgagaccctcttagccaaggcgcgtccgggtggtggaggggcgtctatgccaacaggcgtttggacagggtctcgctcatgggaggtcagctcgctgttcttccacccaagtcctccgcgctgaggagaaggtctagggagtccacacagtccagcggagactaatccgtgagcctgacccacgccgagagggtccaggcacctctgttagcggcatctgaaattgtaggctggtgatgggagccagaagtgcggcaggtggggtgagctccctcacccagcatgtcagggcctggggtccgaggcttgaggctgacactggggagccgcgaagcctgcaggaagcggggccttccgctgggctcagcagctacctgcttcgggagaggggatcgctgggctccgaggtgcctcgaaaccgccgcaaagcaagtctgctcctgggatgatgggcaggaggaatagaggagaggaagggaaagaagagagaggcagaggagaaagaaagaactaggaggcaagaaggaaggggcgccgcaacgccaccggcttcccgaggttgcagctcagcaaggagccggaaagccgggccgcaagccgaacccgcactgaggcctctcgcggagctgcctgcagtttctgagggacttcgctctcaggcacgcctgctcccacctaggaagggtctcgggacccctttcaatccccctatatcccgtaggaaattcttttcccagagacaggctgccagggcgattcctgtccgcccatctcgacccccgacct

SEQ ID NO: 17462 - DNA, 1240 bp, Artificial sequence
  DNA replication origin
cggggccgagcgacggggtcgccggggtcggtccttgagccgggtgggctgcggagctgcttggtggctcgcgtcctggtttggcccatggggaaactgaggtgcaccgagcgccgggagagcccaggttggcgcgagtagcagcgaggccgggtatcccagccgcgtctcgcgcatcgccaggacgggaatgggggtcgccgggaggagggattgcgccgggctccgacggctggactcaccgccggagaaggactgcgccagcacctcggcggtgaaggctgtcttggggctggcgtggtggctcttgtcctcgaagagctgctccccgagcacgttgcgccagcggccgtacaggaagctgtgcaggatgtcggaggtgataacctcggccagcgccagtcccggcgccttcagcccggtcttgagcaccagggcctcagccgggagcacggagcccatcatgggcggcccggagctccccggcgccgggggacggccgggccgacgggggaggtgggcgggcgagaggggagcccaaggggcgagaggagagcgctgcgatggagaaggaaccagagcagggggaggacggagaggaggaggacgcaggagggagcgggaggtgagggggcgactgggaggaaagcgaacgagggggagaggggaagagagatggtgaaatctgtagagatggcaaaggcggcgcggagggtggagagacgcgggtggaggcggaggcgggtgcggggggtgcagggtgggtgagaggcgggtggttgcagggaagcggcagcaaggggctcaggcgcgcgctagcctctcgcacactcggccggggccgtcttccccttggcaaaatctcagcgcctttataggagccgcagtgaccctcctaattggttattaatgaccccctgacgtcggaggacagacttgttgtacccggctgggctcgaggagccttcgtcgcgagagcgcgaggggcgggggcgcgcggaccgctccaaacagtacccctccactcctctctccccttcctggtccttcctcccccctcctgtttttccttctctccccgtgggaagcgcagggcagggagggaggctcagccggctctgaggagaggaggggacggagaaggggagggggtgcggcgaggctctctaggactccagggaccaggctagacaagaggggacgcctggcttcgggccccgcgctcccctcaggcctgatc

SEQ ID NO: 17463 - DNA, 997 bp, Artificial sequence
  DNA replication origin
cgaattctcaaagcattcgcaacttcttccatcctctgccccggataagtttaagaattaatgagccaacggcagcgagcggttttatgcacagggaaactgaggccaggtcctgcaaggaggtgaaggccaaccggagactctttcgcctagtcggcttccgggagcccactgtgtgtccaggctctgggcactggcagaggagccgggccgtgatcagcgctggggacagacctcgggctggcaggtgttggaggtgccaaagaagcaccggcagcagctggccaggctctgcgctcgctgtgtgaccccgggcgcgcccgagtccctctctgctcccaggccctggggtgccagggagggcggcgcccgggctcagacaaaccccgatgtcatctctctgggcggggaggagccgcggcggcccccagctccccgagggttcccctgtcgggcatctgcggcagggctggaagcggcgaggcgcacaagggcggcctccatgtcttacaaggttcccctctaagctacctgggaaaatacccggcgagcgggccggctgaaaggggggggttaaacggtgtccattgcggcgcggcgggcaatttgtcacgctgttaaagtgatcgcattcattcggctccattcgaaagaaattgctaattctaaattcattagccctggaagaatgctgtagcagtaaattgtagctcaatgcggaggggacttgtttaaaaggggccgaggaattccccttacaaaaaagggggattagatggttgacatagcgtgaatggaagtggaattagtcttcacggtaaattaagagaggaacagaaatcgtaaagggggaaaagagggcgacgcgcagagatgccagagccagggaaagatattgtttgcgggttgatgaatgaggaataagaacttgagacatcttaaagaaaagaaacttttctcgctctctctttctctccctcgctctccccgcggcttt

SEQ ID NO: 17464 - DNA, 1157 bp, Artificial sequence
  DNA replication origin
gatcaaggaccaggtaaggcagggctatgccatgtgtaccatcttccaggcacatccacacacacactctccatcctcacaacagccccaggaagtggataaagcttcattttcccactgaagaaaggaaggctggagaggtgcagggacttgcctgaagctagccggctggaagtggcccacaggggatcagtctccagggctctatgggctgaccatgatacacgctcctgttgccgtgtcctccctacccccagaagaagagggtctccaagggatcactgcccagacaaagtggccctgagctctctcaagggatgcagaggtgctccccatggcactgggaacatcagccaggcctcagagagggaggatcctggagtccagggagggagggctgggtcactgtggcactccagcttggcctaaaccccttcacgggagctgccaaggccactcagaggtcaaactggaccccaacttcctgacccagcaactggagaaggtggttagtggtccagccctccagaggagggagatgaggtcaagagaggcctctgggccatcccgcagttctatcaagttgggcttctccagggtccgccggggggagctggagtgggggagcgggcgagggaatgagtttaggaagggtgtgcaccagtctggcctcagtgggtttcccgttctgcaaagttaggaagaagcacaggggtggccctccctggcactggcactgtgatgggtggaaaggcctaggatggaagcctcttggagcctccgtgaaaagggaacagtaaggcatgggctactgaggtcatccgtgactgcaggctggggacacagaagctgactcaatgccacctcagccacagtcatcgtgaatgtcattctgctttcaccaggcattctcctttccagccccacctcacccccagcccaggactggccttgaggggcttcccaggctgcttccggggccagggaaagaatgtaagtggctgggaagaggcctggagggatggcgcgtggggaccctgggcaagcgacctgactgctctgggtctcagtgccctcatctgccaagtggagccaaccacagtcttgctctgccagggtgtccgggggaaggagggtcggattttcggcacgggttg

SEQ ID NO: 17465 - DNA, 1763 bp, Artificial sequence
  DNA replication origin
gaggcttccatcctaggcctttccacccatcacagtgccagtgccagggagggccacccctgtgcttcttcctaactttgcagaacgggaaacccactgaggccagactggtgcacacccttcctaaactcattccctcgcccgctcccccactccagctccccccggcggaccctggagaagcccaacttgatagaactgcgggatggcccagaggcctctcttgacctcatctccctcctctggagggctggaccactaaccaccttctccagttgctgggtcaggaagttggggtccagtttgacctctgagtggccttggcagctcccgtgaaggggtttaggccaagctggagtgccacagtgacccagccctccctccctggactccaggatcctccctctctgaggcctggctgatgttcccagtgccatggggagcacctctgcatcccttgagagagctcagggccactttgtctgggcagtgatcccttggagaccctcttcttctgggggtagggaggacacggcaacaggagcgtgtatcatggtcagcccatagagccctggagactgatcccctgtgggccacttccagccggctagcttcaggcaagtccctgcacctctccagccttcctttcttcagtgggaaaatgaagctttatccacttcctggggctgttgtgaggatggagagtgtgtgtgtggatgtgcctggaagatggtacacatggcatagccctgccttacctggtccttgatccatctgtgcccaggtgttcaatgaggatggcacggtgcgctacttcatcgatgccagccaggaggaccaccggagctggatgacctacatcaagtgtgcacgtaacgaacaggagcagaacctggaggtggtccagatcggcaccagcatcttctacaaggccattgaggtgtgtgtgtgtgtgtgcactgttgtgtagggaccagccggtaaacccggcggggggaggtgtgcagggcagcggtgtccaggaaccacagtggacagaggggagctgacactggcctcgctggctctgcgcaggccatggggctgtggcagacaggtgggtctccagacatcccgctgtccaggtgtgtgacctccatgggaagctttctgctgcagatcagaaatgatggagctctcaacttgacggcattgggaatgtcacgagcatctccatagtgaggtccccagatgttggctgacagtttcctgaggttcaggggtcacagagacacagagaagcaagatggggagaggcggcccagggaatgcgttggggtgggagagagggcgtgtgtctgcagccgtttagctgtctgatggccctcattctgcatgcatgggcaccagtggcttacggctcatgactccagactcagcgatggctccccgtgtgtcaggcttctcccagatgctggatatgcagtatggtatttaatccccacggggccccaggaggaggattctgtgattatttacagtttactgaccagaaaaccaggtctccctcggtggcagcagacttgggggttttgccggccatctggggggagtgttagcactaatagctgcgcttcctgagccttctcagaggagacagacagggccaggtaacagcctgaacacggtggcttatgcctgtaatcccagcactttgggaggctgaggtgagtgaattgccgaggcgggcagatcacaaggtcaggagatcgagaccatcctgg

SEQ ID NO: 17466 - DNA, 921 bp, Artificial sequence
  DNA replication origin
ggcggcggcggcggcggcggcggcggcggcgagcgcgggcgcgtgcgcgtgcggggcgggcagcgcgggcgagtgtgcctgcagcgcggtgctgggcggccggtgccgcgcgctcttctggtgggcgcgcaggccggccagctgcgagtaggcgctctggcacacctggcacttgtaggggcgctcgcccgtgtgcaggcgcacgtggttgcgcagcgtggacgactggctgaagcggcggttgcagaagcggcacacgaagggcttgtccagcgtgtggatgcgcatgtgcgagcgcaggttgctgcgcgagttgaagccgcggtggcagatgacgcatcgcatgcggcccgcggggccagccgccgagtccgccgggtggaagtcctctggccgcggggcggggcggggcgggggaagggagacggagaaggggagagagcagccccgttagaaccggcgccccgcagcccgggccctcagcgcccccagcccggggccggtccgtccttgagggtgggtgctgcttggacggtggcagacggactggagggacagcgaagggtaccccggctggggggtccaatagggagttggactcccgatcgcgatgcgagacctcggggacttagcgactcagcctagctaaacctcagctttctcatctgtaaaatggaaagctagcactgccttttcgggcgtacgattgcccgagaggatgagaaaagacgtctatgaaaggtctctgcgctaagcacccgacctgccttagccagtgcctgagaggtgcctggattggagcagccttctgtaaaggggagcaactgtgatgacccctgcccccaaacctttcattaactcatcccacaaacatttactgaatgcctactctgtaccatggaactgcgcctcggttttctc

SEQ ID NO: 17467 - DNA, 1185 bp, Artificial sequence
  DNA replication origin
ctggccggcctgcgcgcccaccagaagagcgcgcggcaccggccgcccagcaccgcgctgcaggcacactcgcccgcgctgcccgccccgcacgcgcacgcgcccgcgctcgccgccgccgccgccgccgccgccgccgccgccgcgcaccacctgccggccatggtgctgtgagcgcgcccgcgcccccgccgggccccgcgcgctcctgggtccccggcaccccggccccgcagcgcgactcgccctccagccccaacccccggcccggcgccgccgcggagccccgcgcgctggggttgcgccccggaggcggatctcaggcacccccgccttggcccgtgtcgcagatgaggacactgagggcggcgtccctcacccaggccacgcagctggtgcggctgttcggccgcctcctctgggagggggtccccctgcctggcctcgcccccgagtctccctgctgctgtagagccgggcgcccaggccggcatccccctcgtgggtggcaggagagcggacttagagcccccgagggcccctcagcagaggaaggggagtcccctcctccgccaccgagagtcctgtgcttcggaatgaagggagggcgacctccttgtccgggtgtggtcgggcgcgggggttgtgggggcgccatctcctcttccggcccctgggactggtgtcctgaagtgtcgggagtccttacgcaaccttgacatgtgcgggctactggggtccatcggcagcgggaagagacccggagagatgcatcttctgggcccttctctcctttaggccagcttacccccaaacctggctcctggggacggatgaggaaggagctctttgcagtgcaccaggcacgttgagagtggaggcacaatggaaatcctctgtgggaccccgagcaagaccctgcacctctttgggcctcagtttccccatctgtaaaatgaaggagttggaccaatgccccctccccttcagctgtgacatcgtgcctgggaaggcgaaatatacccccagccccttccaacacacacactccagcgagaggagggcaagactggaaccgctgcccgagaggttaaggtggcttctgtggccacgaagcgcttccgagctgtgcccagtcccgggaattccgcccagtctgcccacacttccctcggtccctgcccg

SEQ ID NO: 17468 - DNA, 1667 bp, Artificial sequence
  DNA replication origin
aggccaagccccactttgctgtgtttgacatgttgagctcccagaaaaggttctgctttgaaaccaccagggcccggagtccttttgcgggactgaggtctgtggctctgagaggtggtcacagaatgtcctgcatgtgaggggctggtctggggtgggagcaatattggggtgaggatgaggggtccccacgtggcccacatgttccccagcctcaggtccccgcctgcccccttcagaccggggtgcctggagcccagtcaggcgttggatttggtgccaaaccttctgactccagggacttgcctggtcccctccacccctggaactcctggacggaaaaattgctttcagatgcccttcctgggcccctggaagcatctgggttcccccacctcttgagcaattgggggtgacaactgtgccactgtttgccaccagcagccgagataggcagggtctgggctgcctggatgcacagggtggccggggctagatcagtccaagagtggcagtacccatcggggcggcttccagcgctggaggctttttctgctgtcgggtaaatgcagggaggcgaggcgtgagggtggtggggctggtggtgcaggaagccgctctgggggtggagtccgtggaccacctcgaagcctgtggggttccctgggaagctgtcctgacataggtccaggccaggtgcccgcatggccaagctgaccggcagcccctgcctgggattcccaaagtgaggaggctggaactggagtggcaacgcctggatgagctaaggccaggccccggcctcgcagacccctttaaccacatgtcactcccggactgggttccacagccggctcagccacagccagcctccacctcactgagcttcagatcctccgcctggctgggcatgacagcagtgcccgtgtggtggggtggggttgtcggggtggcatggtgcccgcttaggcagtgttcactgctgctgctagggagggcgcagggtggtggcccccatctaagcccgggtcccctgggctgttggcaactgccgctccggttctgctggccgaacccctcctgccctgggaagccgcttcccatgctgttgggcaccatttctcgcggaattgcatgagcccttgtctgaggacctctgtgactgagtccttgaacctttccaggagctgcctcaggctggtctggtggttgcgggaaaagggttgagttgggcacacctgcacctggcatgggtgtggcacgtggggaggcaggtggccatggcctgtgacttccgtggcctggctcaggagtcccatccccaggcgtctccacctctgcccctcccacctctgcccttcccacctctgcccccaacctgtgccccctccctcttctacccacccacctctgtccccccacctctgcccctccctcctctgcccccacctctgtccccccacctctgcccttccctcctctgccccccaaacctctgccccttcctcctctgctcctccctcctctgcccccacctctacccccaactctggcctcccacctctgcctccccacctctgcccctccctcctctgcccccacctctacccgcaactctggcctcccacctctgcctccccacctctgcccctccctcctctgccccc

SEQ ID NO: 17469 - DNA, 1055 bp, Artificial sequence
  DNA replication origin
ggaaggggtcatcacccccaaggccctcctgggaggcctcaggaccctggagtccctgggaaattggtggtgggggttgtacaagcctcatcccagccctgcctaggccccagcccagaaaaccaagagcttcccattagcgcagtccagccccacggtgcagggccccacccaccttccagaggcaggagaaatgggatggcagccccagctgccccaggtaggaggacggccgggagctgggtgggggatgggttgggcctcatttgagacagagagcaggtgggcacagcaggtaagaggactgcagaccccaggcctgccggggcacagggtgggtggcctccagggaactggtctcagccttggagcgtgggtccccaaaggcagcagctccccatcctgacctcagggcctggtaggatggggccacccagcccacagccaggctgaggcccttgggggagaggtgggttctctgggcaccagggaaacggggtgggggttggcattgggagggctggaggatactggcctcagacctgacctcagagagacctgacgttccccacgatctgctaggaggactccaggggtgctgtctgccccctgctctctgtccccataatgccgggtatttggccgggcagggcagagggtgcctggggcagactccaccatcctggccaggggacggcaaacagcaccggagtcacagtgggggcaggcaggagttggggtcgtcaagtttgccagcccccatcagcagaggcaagagatcagtgagctgccaaatggagggggtggggacggcgagaaggcgatgtgtgacttcaccggcccagggagcttcgtgtcagggatggcccggcccctccctactggagagtgggtccgccaggcacaggtgggtggagaacattcacgaaagagtgaggtggggtcggggatggggcgacagggaccagcagggccaaggacaaggtgcaccagtctagcggtcctcccggaccggccggatcttcatctcagagaacttgagtgagtactgccag

SEQ ID NO: 17470 - DNA, 1114 bp, Artificial sequence
  DNA replication origin
gaggggaacaggggactctgtgagctgaccctggggtacccactctggagcggacattaggcaggagccaccttgggctccctgagatccccagctgtggctcttccagcagggggtggggcggggtttgggcctaggacgacacatggcagcaggaacctgttgctaacgtgggttccagggctgatgtgtgtgggcgcccggctttttgaactacccaatacacggcgcgtgtgcagaagaaaaaggaggagtgtggctggaggagcagagaccccccacagctatgggctgacaagtgctgtctgattcctgcacctcctggttcctgcctgggtgggaaacaggagcgagatgccccaactgccagtcacagggcaggggcgggaccacagaaggtgctgggagaatggggcagacgccctgctttgaagaccaggaggactggctctttaaggcttctcagcttcacatttcatttcagttggacagacatttttgagcacctactgtatactgggttccggggaagcacagagatggagaagcccctgtcccagtcctcccgaggaatttacacgccagggggcattgggggcggaagaagtcactgtagcagaggggagggtaaagcttcctggagaagggggcatttctcatgagccattaaagcagggaggatttctgagtgcgggcaggaaggagaaggtattccaggaggagggggcaacctaacgcggctaccagggaacatctgaggagcagggcccgagggatttgtggtgcgtgatgagatgaggctggagtgttccagccccaggctgcagggttgggacacacagtcgggagctactgggggtgttgaagagaggaagacgggatggggactgtgcttcaggagaggtgacttggcggtgtgcatccttgggcagtggggagagggacggggaggaggtgtttcgaccgttcagtccacaggtctatgatgggaccccgacagcagatgtcagagaggcggggagcctggaggttccacgctctggccctgtcatccacaggctgccccaggcatggctctgagtcctgctgtgtgacctggggcaacttacctcgg

SEQ ID NO: 17471 - DNA, 927 bp, Artificial sequence
  DNA replication origin
ggccctggagtctcatggctggggaaccctcaccccaacttccccgctccccagagctgggacccgaggcaccggaggaaggcaggccctgccccactcaccagtggcacagccccggggccgggttccccgggcaggcgctctctgaaggtcggccttgttgcggggccggcccagcccccggtccctctgcagggcatccaggatgtcgctgacggagttcaccaggtgagccatgtggccctggctctcagagagaagctgcggagcacagggggtgagccgagggggcaggggctctgttgggggtggggtggcgcacatagcaggtcactggccagagtgggccctctcctgaggcagaggtgggcttctggctcaaggccccgccctgccctgccccttgggtccctgtccaaggtggtctgaggggccagccaggctatgatggagcctgtgctctggggcctcgagggctgggagggccggggagcaggcgggaggggaaggaggctccagcaggcacctgccacccctgctgccccaggctgcgttcttcggccatctcttcggcccagggaagagtaaactggaggaggccgtgccaggtggggagagagtgccccgtgttgggcaaatccagctggagcccaacacgtccacttgccggttatatgactaggggcgaatgtcctcaccacgcctcgtctcccctggcctggccaaactgctatggggaccagtgacaacacatgggaggtgcccagcacagcggcaaggaccggccgggtactcagcacaccaagttcccacagcaccttccaggctaccagacatccccaccgctgcctcttccgatcccgagcaaggctgctgaggtaggagtgattgatctgcacttgacagaggggtgccctgaggctgggg

SEQ ID NO: 17472 - DNA, 1165 bp, Artificial sequence
  DNA replication origin
acatccctctaccccgggagggggaagccaccttcccatcagtcacccagacagggtgatgaggactgtaatttctccagctgctgccttcaaagggagggaaagggcccattgctcatgagcagctgagtgaccaaatgcctggatctctcagtggctgctgggggcggtggggcggaaggggcttgggcgcccgtgggggcaggggcttggctcctagcctccagggatctgagtcaccgggagaacgtggcacagggccaggggccgggcagggctccagcaggggctggattccaggtctgacctggccacggcacccaggaaaaatcaccacccatttctaggccaccattttctgtcttggaaaatggtggaggcagatgagacgatcccaaatccctcatcctatgaaggaggaacttcttgtgggtggtgcttccagcatggtctcagagccgaagctggaaagccttcacccagacccacctggagctggctggagcctggcttggctgggggcaggggtggggagggtggaggtggtttgggacaggctaggggtctggctgggctgcctggactggtctctctgtccctgggaagctgtgggtattgcatggtgtgaactgggagggggtatggagagatggggtgcggctctgagggggtagcactgatcagccacatgcccttcagcaagtcgcatcccctctctgagcctcgatttgctcctgatgggggaatgccctgcctcacctgtaccctggagcactggggaagccccaagccctggatttactgagtgccaagtgccgtggggtgctgtacagtttaccgggtcaccgggaaagaaacaggatttgaatcctggctcccagtagctgtgcggccctggatgagtgactgcgcctccctgagcttcatgggcttgtctgtagatgggaacagcagtagccccttgtctggggccttggggattaagtgaggccatggacatcaggcgcctggcacatggcagcagcagcaccaacccctcgcctccagcaagaccccaagatgcagaccccagccctacctggatgaggcggccctgctcactctgcagggcgctgaggccctggcccagcgtgccatgccccttccgcagccccatgcactccgt

SEQ ID NO: 17473 - DNA, 1143 bp, Artificial sequence
  DNA replication origin
gccatggacatcaggcgcctggcacatggcagcagcagcaccaacccctcgcctccagcaagaccccaagatgcagaccccagccctacctggatgaggcggccctgctcactctgcagggcgctgaggccctggcccagcgtgccatgccccttccgcagccccatgcactccgtctgcagctctgaggctcgggccagcagccggggcagctggtcggccagcgtgtccagcagctcctgctcctggtcgcccaccagccgtggctgggcctggtgctctgtcagcgcctgcagcaccgaggcctgggcgctctccaggcgtgcgaagctgtcggtgaggtcggggcagcgcgggtcaatgaggatgctgaggtgcgagctgtccgccctttccacagtgaccagggcgctgttggcgctggcagccccagtgctgacgacaggtgggggcgccgtgcccggcgcgtgggcgtggttcaggaagagcacggcaccggtgacagctacagccagcagcacagccagggccagcagcacggtgcacagcacgtagccgcagctcggccgctgcaggcccgcccgggacgcacagacacagacagacagacgggagagagaaggggccagcattagaggcatacctggggtcagaggacccccttcttggggggctgggcaagggcgtggcacagagactgagatgagacaggcactgagagacagtccaaggggagacagagagacagggacagccacagatgcagtgagagggacacagtgagcgcctcagggagaaagtggagagagacagagccccagaggggaggtggagacatagggagagacggggagacgcggggagacgcagggagatgcagggagacacagggagacgcagggagatgcggggagacatggggagatgcggggagacgcggggagacacggggagacatggggagatgcggggagacgcagggagacgcggggagatgcagggagatggagacggacaggatgggaaatagaaactgaggcagaaagacacaaagacacaagcagaatgccaagccttccctctcgctgcccctgccacccacctccccccatgccctgcacagtgacagcccagggacccacg

SEQ ID NO: 17474 - DNA, 1970 bp, Artificial sequence
  DNA replication origin
acagtggccacaggaaaggccttgcctcttgtctgaagcttcaaacaagcccagagctggcacagggaacagcctgtctacatgctgggtcaccaaacgggcggggaggggaagcgggtgcttgctattggcccaggctcttggagcaacagccctcgagcttcctccaatgccaaggggcagacagctgggctgtgtgggggctgaaagctgtgcccccagggagcagcagaggaaggcggggcccggcctggaggccttgaagccacatttcaaacacattccccagaaggcacctccccttgagacagaccagtgcctgctggccgtctcctgaggctcttcctggccgaagcgtcatgcagtgccattcagcaaacgctctcaatgcctgacctgagctgcctggaaagaatggagcttgggcccagggagagatgcagagatgggctccagaggagggtgtgtccaaagggatctcctgatgcaggaggggcccaggacaaggcagctgagtggcacaggctaaacactactagaacttagagacatagccacagggcatcaggaagtcttcctggaggaggtggcagcatttgagcttgattttgagtatatgtagggtgtccctgagtgaaggggtgtgtgtgtgtgtgtgtgtgtttgtgtaaggctggggaagcaaacaagatgacacagaaaagatctggaaatggagcggcgtggtgtggggcccagggttggcaaataacaaacagtcactgcctgtaagggaccaatgggaaggcacagtatgccaggttagggatggccttggaggacaggtctagaagttaagacagttcttgctaagggggagaagtcagatctcagcaggaggggacttgttattttggggtggcttaggtgcagacctgacctaaaagaggggcgcgaccaccccggagaagcagtgggataggtgtgtggttagaccagagtttgaatccccactctcttgccaacgtgctgtgtgacttgggcatgttccgaacctctctgatccctggtctgtgatgtgggaacgcactggcccccagcctgtttggagaagtgaggtagtgccgatgaatgggaaggggctttgcaaaccgcagagggctgggcccttgtgccacggcagtgtcacaccaggaagaatgagcaggttgcagctcctgagaggaagggaccaccaagggctgcccgtgccgccccctcctgcagctgcaagcacgaactgttccttccccaatgacatctgtctggaagaaatttaaaatttaaaatgggcagccctattctctcctctccttggtgagcgagcggcctcctcgttttcgcctgcctgccccagtcccttggcagcccagcctggggcagccctggggctcccctccgccttggcttcgggactccagcccccttgctggccagcccaggtgttctgccctcacccgcttccaccgcacagccctgggcaccctccaagccccacctccactgcccctgaagaggcagcaggaagggaggaatgagtcagccctggagcacacagacaagggttcaaatcccgacagagctgcgtggcctcaggcaggagccaaccatctctgagccctgctttccttgtcttaaagtcagaaaatcacaatacccagcgttcctgcaggagatgaatctttattgatcccctactgtatgcagggccctggctaaagggaaggatgcagaggagattcagggggtcaggttcaggaccaggtgcctggcacagggtagcgcccagagtggagattctgtgggtagttaagatgcccattgtagaggtgaggaaacggagactcagcaacggggctgatttgtctgtggacacacagcgaactgtaagtccccgcctccctctgcacccgcgtgcaccagggggctgctgggggtgcggggacgcggga

SEQ ID NO: 17475 - DNA, 725 bp, Artificial sequence
  DNA replication origin
ccccatttcgcccacgggccgcccgggcaagggggcgtcgtgtgggctttccgaccgcgggcgcgagggcacgggtctgcggacgcggactgggacgcccaccggccaggctcacgcgtcggggtccggcgcagggaggtccccgggggctggagaccccacagctgggcgcacttgccccgggacctggacccagacctcgggggcccgcagggggcgcaccccaccgaaactgcccccggcgcagcctgggtcttggggcgagccctgcgtcctgagccgggagggagccggaaggagcgccgcgccactccccggagacgccgaaccggccggcgggggcgccctcggggcccgccccgcgcatggtgacttgtgtgagtccggtccgggaggaagtttgtgcagaggcgccgccggggggctctcaggcccctccgggagccagcaggagccgggccgcccgcggctgtttgctgccctccggccggccgcgttatctgggggccagttcggcctcctttccctaggtcttttcggaggcggagtttagtatccaagtccgcgggtgtgagcgcgcgcgtgtgtgtgagtgtgtcgggggaggccgaggggagcaataaaaagcaaagagagtccgagaccagaaaagatgcggagattgagaaggagggaggagggacgagggaggagagagaggagcgcgccggggaggcgccggagcc

SEQ ID NO: 17476 - DNA, 1045 bp, Artificial sequence
  DNA replication origin
ttgtttacgaggaaactgaggcttggggatgacgtggaatctgcccaaggtcacagcaggaacatctgagccttgccctgctcaggtgctgtgatgcactgtggcagagcccttctgaagcgtgtgcagtcaaccctttggcttacatggggaaactgaggctcggagaggtatgttgcttgccctcagccacacagccagggccctgtgccctccaccacatccttcttcccaagtctgagggccctctagatcacctgctgaccctcttaattcataggaaaggccgaggggccagaaagggccagaggccagaattggaacctgggtctcctgactcccagccattgctgtgggatcctctccaactcccgggcagcctcagtccgggaagccgggatcgggccgtaggtgaggccagcggttgtcctggaaggaaaaggcggctggggacaaacagccggtggtttgtgaacccagcgcctggcgggtggcagtctcctcggatggcaccgggccacagggtcccccgctccggggtccagggagtgccccagcccaggctggacgcggcccccacccccaaccagtctgccccgccagtgccggacgcgtagagggatcgggagagggacgaagatggggcgacagactggcagccagtgggggagagacggagacggtgccagggaacagcgcggcggccaaggcgccccgggagccggaaaacagctttggggagaagcgggggcggggaacgggggtctgtctggagctgggggagcagaaaaagatggggacgcagaaaggggcggaggaggggcggccggcgggctcggcggggcggcgggaggggagcgcggcgtcgggcagtgtgggcgcctcccggtcagaagccacaatagcagctcgttcgccgcgcagattaaggactttgtcaattacctccgaaggccgctccgggcggattaaatgcttttaaaagtgctgctggtgggaaggggcaactaagaagccccctcctggcacaaatcccctcccggcg

SEQ ID NO: 17477 - DNA, 2070 bp, Artificial sequence
  DNA replication origin
cgccgcgctcccctcccgccgccccgccgagcccgccggccgcccctcctccgcccctttctgcgtccccatctttttctgctcccccagctccagacagacccccgttccccgcccccgcttctccccaaagctgttttccggctcccggggcgccttggccgccgcgctgttccctggcaccgtctccgtctctcccccactggctgccagtctgtcgccccatcttcgtccctctcccgatccctctacgcgtccggcactggcggggcagactggttgggggtgggggccgcgtccagcctgggctggggcactccctggaccccggagcgggggaccctgtggcccggtgccatccgaggagactgccacccgccaggcgctgggttcacaaaccaccggctgtttgtccccagccgccttttccttccaggacaaccgctggcctcacctacggcccgatcccggcttcccggactgaggctgcccgggagttggagaggatcccacagcaatggctgggagtcaggagacccaggttccaattctggcctctggccctttctggcccctcggcctttcctatgaattaagagggtcagcaggtgatctagagggccctcagacttgggaagaaggatgtggtggagggcacagggccctggctgtgtggctgagggcaagcaacatacctctccgagcctcagtttccccatgtaagccaaagggttgactgcacacgcttcagaagggctctgccacagtgcatcacagcacctgagcagggcaaggctcagatgttcctgctgtgaccttgggcagattccacgtcatccccaagcctcagtttcctcgtaaacaaggacttgcctattggtggggagtggcgaggtttgcaggcccttgtgcagttacaggcacaaagcgggcaggtggcggaaatgcaaggctctgactccacagtttggcgagaggatgtaaactccagacgcatttgtgcacagatgaaagatcaccctggggggtggagcgggggtggggggctgaactgagaacccacgggaggggtgctaaggaccaacggaggaggtcttggagatgtgctcagagtagtcagggaggcatcctgggatggaggggtgtgagcccgcccccaaggcccatgaaggcagcatccagaagtctgggtgctgaaggaaaggcatttccaatggcggggccgcagaagggaaggcggagctaggggagtgacccgggcgtacctgggcaggtgcaaaccggaggaccggaggacgctctggaggatcgcctcccgggcctgcagaagcgcggttggacaggtgagcgggggccacctagcggctcctgctgggagtgttggaggaggttggaggttgaatcatctcacctgctcagccacaggttcagcctgcgggagtgccttacgtgtgtgtcttcgggagcgggcctcactctgtcaccccctctgtgctgacgcctctgctcaacaccccaggagaagggtcagccgtgatgcaggactggcatgagcctgcaggcgtctgctcagcgctttacacactgcactcagcagacacacttaggacatcgttctggaagaagggagggccgcccccattcactggagcctccgaattggtggagaggaataaaatggaagtggatcccagaagccagtgctgacccacagccaagatctgtgcgagagaaagggcagccgaccccacagagcagacaggccctccaccctcggatttccctttgacaaggctgatgaccacagagcactgggggcgagctgggctgtgctcagcaggtgggacaggacagaatcagggctttccagccagcccaagactgagcattccttgtcagggacgagccagcacctcagggtgccagaacacaggaccgggaggctgcatggtattagactcgaggttgcctggtaacttgttcactctctgcgcatcccctcaccttcctctttctggctcaccaattctgcctgttcctactttgcctttccaaggccacctggatatg

SEQ ID NO: 17478 - DNA, 885 bp, Artificial sequence
  DNA replication origin
gagctgggcctgagccacccggtgagcgtgctgagccagcatgcagcagggcttagcggacgtgggcagaatagccaatgtgccagtctctcggggcctgggggactggctggccagaaggtcgggacctctggtccccatccactcagcctctgccccgcactgccaagggtactcagctctcgccataaagctgtttcaacttgactctgacagtcacatttatcattaaaaataaatgtatcttggcttctgtggcgtggaaaactactgtgcagtgattcaatgggcttgtcacccctcacggttaggcacggggagctgaatgactggatggtctccaacgccagctcctcattttctgcggctggagccagaaatgtacagtgggctgacatttaatttagaatccaacataccttgacataaacccataatacaaaggcgggggtgggggtgggggctgccaagcctggtcggggtcgggggggagtccaagtgacagggcgaatttctttctttctttctttttattttgctttgtcaacattgagtggtgatgacagacgagaggccgtgatcaaaggcgagaattagcacggagagaatgtgtgtgagtgtgtgtgtgtgtgtgtgtgcagcctgtgtgtcaattcatgggtgcatgggtggtgcgtctgtgccctgagcccactgggatgctgtgtgtggcatcttgcgatgtgtccgaggctgggctgtcaagactgaggctagaaccccggagcaggacaacgtggtcactccgggtgaggacagcacctgccagttctgtctttgtgtccctagcacttaccgaaggtcttctaacacagtcagtgctcaataaatgcagagcaggaaggg

SEQ ID NO: 17479 - DNA, 1397 bp, Artificial sequence
  DNA replication origin
gccagttctgtctttgtgtccctagcacttaccgaaggtcttctaacacagtcagtgctcaataaatgcagagcaggaaggggaaacgtgattttaaaagctggatgcagagttcctcttagggagaaaactggctttttttttttttcttttttcagcagaacatcctgatggactatttaggtgtgaaaagcagaggctcaggggctgacctgggaggagaagctgcaggaaacccagcaagaaatgcccaggtggaggggtggaggggtggaggggtggaagggtagagggctggaggggtggagggctggaggggtggaagagtggaggggtggaggggtggaggggtggaagggtggaagggtggaggggtggaagggtggaggggtggaagggtggaggggtggaagggtggaggggtggaggggtggaggggtggaggggtggaagggtggaggggtggaagggtggaggggtggaggggagagagcatgaggtggggggcagagtccccaggcagttgggattccggggagggaccacagtgctgggaaccacagcactgacgccatacacaccaggggatgtttgctcttgcatggaaagtgattttcagtgtcatgctgcagaatcccatacgttatccttcagtccttggtataaagtcctccctgctcagtagtcttgtgttggtgatggtttggggaaatgaaaagagtgggccctgccccacaccaaagtccaggaagggaagaaggagctgtccagcacaggtggggaggggagaagaggggtcctattgggacccagaattcagactgagcaggaaatccaaccaggggttgaggagggattacctgagcttgtatcacttcaacctgcattttagagacacattctaatctcacagatgcagaatttggggatccctggacagctaacacttggggtgcaaatgtttcttgttgaatgagaggaactgggtgtagtaaatgaaattcttgcatggaagtctgaatacaactggtggccgcatcccgaccaacagacaagaggacaaactttcaaaaatgctgtgtcttcttctcatccttcttttagagtctgtctaccagaattccaccatctgaagtccccggggtgcaaatcctgtttgctgttaattcttccagctctcacgtatggtggcttgttgtgtcacgtgttttgcaattttgcattgcgcgttccatctttgtcagagctttatccgtgggaatcggtgtgtctaggctgggagtccgtctctccctggggggtgagcttatacttccacgaggcaccagaagacactccaaacccaagactgcttgaagtttagttcccatcttgcatgtagaataaattcagatcca

SEQ ID NO: 17480 - DNA, 1869 bp, Artificial sequence
  DNA replication origin
aggtaggagggcaaagccgaccctacattgtcctggttctcttggggcctctggtgagaactgacttctttttcctggtgggcacctagggggtcggacgagctccctcacacgccatcttggtctgggcagtttagacctgagttgttccaggctagatgaaactctacatgaaaacttccagagttggacagagtcaaattctacttcaccttccattcaccatcatcatccctagaaccaatctccctctgggacctcaaaggatggggtgtccaggctctagggcaggattcctgggttcctggccaaaccatatccaacagtgcccagtcccaccccctctcccttgggtcctcccaggtggcccctgcttgcctgagacccatgggcacctttggggctggagctgaccagtttatcccgtccagctccttataagccttgcacttctgacatcaataatttatggggatatcgggatgcaggggggctggcagagtgataggtagggggtaccagaggcaaatctgggactaaattaggcaggtgctttgtgagcaggccccaaagggtgggcccgagctagatggctttggaacctggtcatcaagaaactgacagacactgggccctgtgggcaggtggggagtttccactccttgcatggctcaaggccccattcagattcagcccaggccccgaggagtccctgagggtctaggggagaatggggtcagggtgcaagagggggaaggagggcccttgagtaaaagtagtgggaggtgtgctagtgaaggtgatggtggtcacgctggtagtgctgggatggtagtcacagtgctgatgtgaggagtggtggtgatagtgatggtggtagtgatggtataatggtgatggtggtggtgatgatggtcgaggtggtgacagtgatggaagtggtggaagtgatggtgatggcagtgatggtggtggtggtggtggtgacagtggtggtgatggtggtgatggtggtggtggtggtggtggtgttggaggtggtgatggtgatggtggtggttgtggtgatggtgatggtggtggttctggtgatggtgatggtgatggtggtggtggtggtggtggtggtgatggtgatggcggtggtggtggtgatggcggtggtggtggtggtggtgatggcggtggtggtggtgatggtgatgacagtggtggtgatggtggtgatggtggtggtggtggtggtggtgttggaggtggtgatggtgatggtggtggtgctggtggtgatggtagtggtggtgatgatagcggtgatgataataacaacagcagtgaacatttattgagccactgcaggtgccatacctgtattgtggagttgatgtgcctaatctcattgcacctttgtggccacctaaggagatttgccttattgcgttactattatcatcctcatttacaaatgaagaaaccgagatttagagagttaaagtcacttgcccaaggtcagtgaataaatggcaagactgggacaagaatccacgtctgcctgcctacactgcaccattctaacctctcatatctggccctttctgcagggacacaaagtggcaggccggccaaagaaactcagtgcctcccgcctctgtccttcccaatcccctgggctgccttgcacccgcctgccctgtcagcatcatgagtctgtgactcctcactaagccttttgcaaaataacttcaagctgttgtcttctttgacctctgcaagggctctgaggggcaggctttattagaagacagggaaactaaggctggagaggggacgtgacttgatggaggtcactgagagcggttgagggggtga

SEQ ID NO: 17481 - DNA, 967 bp, Artificial sequence
  DNA replication origin
tgtgacttcatacagaaccacccccgtcccaagggttgggaggtggttattgaagggcccagggcaccctgctggcctcccattccccctccagcagcccctgccttcagcccccgcagaacctgagactgcagaacacatcttcaaatccctgacccagatggatgctctgtggattaacatcccaaacttctgcacatcggggaggcctcccttctcacacaacagattgacattggcccattccaactgggcccaggctcctggccagcctcgccggcgattctgactgggcccaggacagctgagccagggtccccagacatcaaggggggtggggggatgcaactagagtaaggggatgtgtctcttgaaggaaggggctcttccgaggatggaccctgggacacttggggctccatagtgctgctttggggtccagggaccaggccttgacccaatgcaggtcctcaatcaagggcaattggacaaatggcaccaagtgggggtggccaatctcatgcgtccctgctgacgctggtggtgcagggagtcctgaggcagaagggggccggcatccctgggcactgggagtgtcagtggggcttatatctgggttgggacaggggtgagtgggagggatttggtctcgtttcagagagaaccaggaacccactgacagattttaaatgggagccccacgtgatcagatggtacttggaagttcactctgatcctgaagggaaatggatcgaggggttggctggggctgcacagaggccaggagaggtgatgtggcttggaccagggttgggaggaggatgacaaagtcagcagggcctaagggctagaaacatgtttaggagagacaggcttcaaggagagcccctcggcgagtgtctggtccgggccttttgacaatgggatgctattcacctcagcagggaagcttgggtgaggaccaggc

SEQ ID NO: 17482 - DNA, 1561 bp, Artificial sequence
  DNA replication origin
tggggccaggctgcgggaggcagggagcagagctcacctgcaggtggacggctgcacctgcagagaaaggtcaccctgtgttcgcctccatggacctggtgctcgattgccttagtttaccctctgggtgcccacagaaccaggttaatcccttccacacagcacagccacaagggagtttaggcctgggcaaatagcacacagggccctggctgctgggggtgggctcagtgacccttggtgactgttccctcacaccatctcctcctactgcaaaggcaggacccacttactgctggtcgctgtcccagaggctggcagagacgtcagagaaggcagggctggcatctcacgaatgggaagtgggcataactgggtagcctcctctggttgggccctcagtgggctgtgtggctggggcagcctgaggtaccagccaaggccccagcccatctgctgagatttcaaaggcaaatgttctgagaaagaatggggcttaataagctcggagatcgattccactgaagggaaggagagagggagagatcagagagacctggagcaatacagagataacagcagagacagacagagggacagagacacagagacagagggacagagacacagagacagagggacagagacagagcacagagacagagggagcagagagacacagagacagagggacagagacacagacagagcacagagacagagggggcagagagacacagagacacagcacagagacagaggggacagagacacagagacagagggggcagagagacacagagacagtgggagcagaaagacacagagacacagcacagagacagaggggacagagacacagagtcacagcacagagacagaggggacagagacacagagtcacagcacagagacagagggcgcagagagacacaggcagacacacagagaaagagggaaggagagaaacagaagcagacacagagacagataaatacagagcttcacaacagagacacacagagagacacagaccacagagacagagacacatggagagacacagaccacagagagagacacataaagaccacagagacagagacacacagagagacacagaccacagagacagagacacacggacagacacagaccacagagagagacacataaagagacacagaccacagagacagagacacacagagagacacagaccacagagacagagacacatggacagatacagaccacagagacagggagacatggagagatacagaccacagagacagagagacacagaccacagaccatagagagagagacacacagacagacagacacggaccacagagacagagacacatggagagatacagaccacagagacatacggagagacacagagacacacacaccatggagacaaagagaatcagagccctgccctacacagaaacacagacacacacacagacagagacacagggagacacacaccacagggagaaagagaggccgggccctgcctcccgactacagaaacagagacatg

SEQ ID NO: 17483 - DNA, 962 bp, Artificial sequence
  DNA replication origin
tctcggtggtgcaggggccacaggctgggctacaaaggagataaacgtggttatctatccattcattcattcattcctttatccactggacagatgtttactcagcccacactctgggccctgggctggacacaggggacagagtgatgaataatgatgaaactgtccctgcactttagggatccaagaagctgttaataacaacacaaggctgtaagcaccaggcagtgagagtggagacctgatgcctaacacagtctggagagatcagggagggcttcctggaggaggtggagtctcagctgagacctggaggagaatggagtatccaggaaaaggggttggggaagagcatcccaggcagacagcagcatgtgaaaggctcagaagcggaggatgggggtgggaggatgggcatttgaggagtggggagggtggaaaaggggagccaagaagggcccaggacatcctgctggagagcctggacttcaccggggggccatggggagctgtgggaagattttctcttgggatgtgcagggagattggcccgctgggggtggtgtggaagcagaaatggtttggcagctgctgcagggacccgaggagaatgaggtggtagcctaaacaggagcagggaggagctggggtctgcaggacccgggaagcaaactgtggcccctgggcatgggggtatctgtgccagaaggcactggggacagaaaatcacccagttgggctggcggggtggtgagcaaagctgaggctggctctgggtctctggctgggccctgggtgggcgtgctgtgctcagacagggtcgccggtccaggagcaggcctgggggagatggggaagccgttgtcagtgctgaagttctgtgcccagaggaacccaggaggccagacttctcctggctcggcccctcccacgctgtgtgtccttgggcaggtcccttcccc

SEQ ID NO: 17484 - DNA, 906 bp, Artificial sequence
  DNA replication origin
cgctgggggtcggcggcgtcgcagcgctggcaatgagcccccgcgcccgcggcgcccacgtggggacagaagtcctcgggcgggctgccgcacgtgtgcgaggcctgggcgagccgcccaaacgccgcgttctcgaacaccggcaggcagcgctgcgggcgccctgcgccgtcatagcacgcgcccatgcccgcgccggccgcccgcggtgccagcagcgccagccccagcagaagcgcagccgccgccatggtcaagggcaccgacgccgcgcgctctgccggccccgctcggctagggtgggcgcggaccgcgcgctggccgccaggacccgccttcccctgcggggcggggaggctggagggaggggcgggcggcggcggccccaccccactaaaaataccagggaccgcgccgtccccgggcgcccactcccacctgctggacgtgcccggcagtgcgcggctcgggagtctgccccagaggcgacccgggcctctttgagcctcagtttcctcgtctgtggagtggggtcggtaaagatgcaggctcattctcgccattgggaggcttcaatggctgctcattaaacagaaactgttcagcagtgccttggagtcctgagataaaaggggacaagaggatctatctctaactgatcgctaccgtttgcgcatctcctcctagcaataaagtgtgccctggacagggttgtgagatggctccgcatagctcctgtcgcccttaaccctgaaaagcactcctgctgccggctgcgctctgtccccacagcaaagagattctaacctgacatttgtgacaagggtacctggtcttatcacaaatgtcacctcagagagggcttccttgtcttctgccccaacccccataaatgccccctttact

SEQ ID NO: 17485 - DNA, 2049 bp, Artificial sequence
  DNA replication origin
actgaggctcaaagaggcccgggtcgcctctggggcagactcccgagccgcgcactgccgggcacgtccagcaggtgggagtgggcgcccggggacggcgcggtccctggtatttttagtggggtggggccgccgccgcccgcccctccctccagcctccccgccccgcaggggaaggcgggtcctggcggccagcgcgcggtccgcgcccaccctagccgagcggggccggcagagcgcgcggcgtcggtgcccttgaccatggcggcggctgcgcttctgctggggctggcgctgctggcaccgcgggcggccggcgcgggcatgggcgcgtgctatgacggcgcagggcgcccgcagcgctgcctgccggtgttcgagaacgcggcgtttgggcggctcgcccaggcctcgcacacgtgcggcagcccgcccgaggacttctgtccccacgtgggcgccgcgggcgcgggggctcattgccagcgctgcgacgccgccgacccccagcgccaccacaacgcctcctacctcaccgacttccacagccaggacgagagcacctggtggcagagcccgtccatggccttcggcgtgcagtaccccacctcggtcaacatcaccctccgcctaggtaagcgcgggctgggggcaccgccaccgcaccccgtgtccccactccactgggggtctgaggctgaggcctgagctgctgtgcgcccaggttgggctgcaggacccagatatggtgttggatggaggggctcagaaataggaattaggctgggtgcggtggctcactcctgaaatcccagcactttgggaggccgagatgggagggtcgcttgagcccaggagttcaagatcagcctgggcaacgtagtgagatcccatctttacaaaaaataaagaaaaataggccgggcgcggtggctgacgtctgtaatcccagcactttgggaggccgaggcgggcggatcacctgaggtcaggagttcgagaccagcctggccaacatggtgaaaacccgtctctactaaaaatagaaaatttggccgggcgtggtggtaggtgcctgtagttccagctactcaggaggctggggcaggagaatcgcttgaacccgggaggtggaggttgccgtgagccgaggtcgcaccaccgttctccagcctgggcaacagagctaactccgtctcaaaaaaaaaaaaaaaaaaaaaaaaaagctgggcgtggtggtgcacacctatggtcccagctactcaagaggctgaggcaggaggatcacttaagactgagaggttgaggctgcatgaaatatgatagtgccactgtgctacagcctgggctacagagtgagaccttatctcttaataaaaagaaagaatgaaaaaaagaagaaaaaaaaacaggacctgtacccctagatagccagaaggatagactgaggggtgccccgtggggcgggagaggcagggagtcacttgctgagctttggttctaggttgcaattataatcccctgtaatggttttccatcctagaccagaactgttggggaggtgacacaccaaggactgaattggtcaccctctagggcaggggctcctgatcttgggtcttctggtcaacttcaggtattcagtggacccctgaagctgcctgcagtcctcgggtgggttctggaagatagaagctgtgatgttcatcactgcacaggcaaagtttaaccctctggggaggaggactaagtttcttcgtgctgctgggcagctgcgcccggtggcatggcctctctgccctgctcatgacttgccgaggtgcagaagcccttagatctccaggaatcagaatctggagtctggacccagccccggttctcagcccctgcccccactgcagggagctggaatgctctctcctccctccgtgttcagcccgattcccatgtcctctgtggccgggtaagcgccaagtgtctttcctgttgcagcctccactgccctttcaggaggggctggtatcactggttagactcccttatcttcga

SEQ ID NO: 17486 - DNA, 825 bp, Artificial sequence
  DNA replication origin
gaccatggagctgaggacatggtagaagcagtctggcctctgtgtccccaccatggagacagcagcaggctgggacagtggaagccagccagcacagcttccttggccccaggactctctggtggaggcaggccagcgagggcagctcctgcagacagtgccccaccctcagaacaagccgcccccggcccagccccagttctggtcgccagtggcccaggcccaagaggacagcggggtccagaggccaagctgcccgcccagcgagcctgtgagtgaagatgtgtctcctgccagcagcaccagcaccagctgggatctggcccccagcaacggcggctgtgcatggagagcctggaggaaaccaggctgtctggggacagggtggggcttgcagccagtgccccagccagaagggaagtcagtgggtccctgctcttggcctgtgtccctggagaagacatgatggcatcatcctctctccagcgcttctctgaggttaggtggtcaaagccacatcacatgggggctgggacaccaaagggctgcctgggggcccgtgggagaggctgggtgggccatcagcacccccttgcttgttgggtagcctggttccgattagcagctggggtgggagcggttaacacaaagaagcaagtcggggaccttccggccctcccaccacaggcgcctctgcatgggtagagttggtccagggaagctacttagtggaggagagactgaggcttaaatgcaccccctccccaggctccccttctgctcgtccttatctctgcagcagcacagagaccccgagctgccccc

SEQ ID NO: 17487 - DNA, 737 bp, Artificial sequence
  DNA replication origin
gtgtgactctcactattgtgtgaggtcactcaggggtacagaaagcacaagtcacctttcatttcccccattaaatcatttttaaaagtctgtgtgcaggactggctctgtcttggctcccagagtgagctcaggggtggatccatgaaaggtgcggacccatttacacctgccgccctcgtgctgcccacagcccagacggcaagcaagcaaaccccctgcaggtgcagggctgagacaggagaggctgggggctttgggagccgaaagaaggggcccctgcagctgtgctggggtggtgggacaaggcttccgagaggaagtcatggccgcgctgaatctgaaggctgagcagtgaggaataggccaggcagaggaagagggggcgggaagggcgtcgcagacaggaggcgaaagcccaggggataccccacatgcagagacagacgcgtggcctggtgcgggtgtgccatgaggctggctgcagacggcatgtcgtgtgatggcagggaaggaaggactttgtgcagtggggggcctgcagtgcaggggcagttgtgaagtcagaggctagcagagcttgctccagggaggctgggctgccgtggtcagtggacgttagctgggagcaaagggggagccgtgggaaggtttaagcagggaatagatgttactaaatttgtcctttagaaagtcttggcccagtgccatggctcacgcctgtgatcccagcactt

SEQ ID NO: 17488 - DNA, 868 bp, Artificial sequence
  DNA replication origin
gtggactccacatccccagcctccgaccctctccctttcctggcctcaattgccctgtgcccttcctctcccaggctccctacacctccagtgcgatgacacaggcacctgcgcctgcaagcccacggtgactggctggaagtgtgaccgctgtctgcccgggttccactcgctcagtgagggaggctgcaggtgagggcgaggggcggcccagtatggacacattgcactgaatgacaagaagcaggaggaacaggctgtcagcagtccctcccctccccatcccttcctgtctgcagctacctcgccctaatcctggtgaagactagagacactcagctcctggagaggccaagagacaaaaacagaccttaatgagaccaggctgagccctgtggaagctcagcggatcttgcaggtggagggcaggcttcctgtaggaggtgctgcataagtgcagggagaggggaaggacaggtgtttgaggtggggtggggggcacgggaggcctctggaggagccgtggatcagtgagaagcaggagtgggtgagggggaggctgcgtggaggctacagcaggaacgcctgggcagcctgcatgggggtttgactgtggagagggagagcagggcagattccagagcccagtgcaaggaggagctaataggacatggtgaccagggggtggaagaggaagaagaggtggaggctgaccttcggggttctctgggcctctggatagcagggcacgcagtgtggggagcggggtgggagaggctgagtgtcatctgggtgcaccgagtttggtacctagtgggacagctgaggggagagagggacaggggctcctggggtctggaccttaccc

SEQ ID NO: 17489 - DNA, 1853 bp, Artificial sequence
  DNA replication origin
ttaaactgagctaggagtgacttggtccctagatgtctgggcagaggtggagaggccgaagatgggggagctgctgctgcacagtgagtttggtgattggcgtctggtgtaagtgatgtcgagaatatggagttcttccaagacctctgggatagggtctgatgtccccctcccgcctccctccagtttctcagccgatggcacacagtcgtcctggtgcctgctcttggcactcagcctttatccactcaagccgtgggatccagctcagctcagtcccagcatccccgacgggtggagaactcgggcctgacatgttgtgactcacgcagtctgatcatgcctggtgcatgtgctgatctattctctggccccagaggtggggccgctgccgggtggaatgcggcagctgttgaacatctggctagcaatgcagtccagcagctgagcagaaggtggggtggcccctgccctgtaggatggctgactggagccaaccagcccaaccggccagggcaataggctgttggagcctggagagggaagtgcattatgagggctctgtcctaagtcagctcccatccaccaagggtggtaacgctaagcttttactctctgcttaaaccatccagcaagtcatcaaagttacaaaagcccctgcttagtgcgttctgggttacttcattgtgaagatcaggggactgaagctcagccagatcaagtgcctcgcctaaggtcatgcagcttggccaaatccaaacccttgggtgagtggacagaggagcgtcagctaggagaggtgggcgctggtcttactggggaggaggggcctgccccctggactgctgccctgacctcagccccatcccattctgcctagccccttgctgggcacttccctccccagggacagccacagaaaaatgatgatctcggctgggcgtggtggctcacgcctgtaatcccagcactttgggaggccgaggcaggtggatcaccttaggtcaggagttcgagacaaaccttgccaacatgatgaaaccccgtctctactaaaaatacaaacattagctgggcgtggtggtgtgtgcctgtagtcccggctacttgggaggctgaggcaggagaatcacttgaacccggaggcgaaggttgcagtgagccgagatcaagccgctgcactccagctctgggcaacagagcaagactctgcctcgaaaaaaataaataaataagaaagatgatctcagggtccctaccctaggagtcagatgcacggtggggccattcctagcgctgcctgccctggacagcgcctgtctatgcctgtggcccagcatcattatgaggagtgctcccttgactctggctgtcctgatttggacactagacttcatggtcaccctggccacaggtaccctatcctgcatcctgagctccgctcttcctggagtcatgggctggtctttcctcctggtggccttgcgccccagctccagcttcctgacttttctcttctggaaatgggaatgccaagtcctatttcatggagttttgagaatgaaatgactggtgtacggtgcaaagtgcctgtgagtgcccaagaaatctcttttattaacaagacacgaattcattccaattgatttgacgggccactgttgtcacagcagccgcactgccccaaaggcagcagtgatgtttgagcgccgactccccgacggcacttggtcctcacaaccaccccatggagttcatgctaagatcctcgcatttcatttgtgtggcagggacttgctgaggtccggggaggggcagagaggaggggtgcggccgccccgcgctttgcactt

SEQ ID NO: 17490 - DNA, 1668 bp, Artificial sequence
  DNA replication origin
gagccccgcgctcgccatgtcgggcgagctcagcaacaggttccaaggtaggcgccgccgtccccgagcagccacctgtgcgcgccgggcggaccgcggggtccaccgcgcgcgggaagcgggcggggacgggggcgcgtggcccgaagaggaccccgcttcccaggccgcctctttgtctcctccaggagggaaggcgttcggcttgctcaaagcccggcaggagaggaggctggccgagatcaaccgggtaagccccgcgcccagggcagcacgcgagtcccgagccgcgcgctgcgcgggtgccacctctccttccgcgaggccgtgcccgcctccagatctaccctcttccttcccttcccctgggcttccctcaggtgcctccctccgcccccagccccgtcgcctccgactccaggtaggtccgcctccgcctcccgcctccggtctcgggttgcaagttgttactcttgcaactggggactggggaggtggggccgggtcaggagctcggatgccagccggctcgtggctccccgcaagcccgcttgggagcagcccaaggatttggcgcgggaagggccctaggccagtgatctctccagctcagaacacaggctccgggtcatttgctggtctgtcgcccaggctggagttcggtggcccaatctcagctcattgcagcctccacctttgggattcaaacggtcctccctcctcatcctcccgagtagctgggactacaggcatgtgcccccacgcctggccttagctattgttgttataagggattcaaaagtacaaatagaagactctgatgggcgtagagatcctggcacttccccgtggtctccagcctcccgcctccctcaaacacaccactcctcttcactccaactttcaggaaagattgccttaagggattcaatgcttttcttgctggtcctggtggatttctcaaaagaaatctttcctgttgttgccaggcatccagtgagagctccataaatttacatagattctagaagataaggaaagatatcaggacctgtctgggttggccaaagctcaaaggcagcacagccagtggctttaaagttctgcaagacctgggctcagatctggcctccactgtgtgccagctctgtggtcctcagcaaagggcctctcatctccaagcagggcattgtgcaggctcagagagggaaggcccgtggcctgcatggcccagcacccagcattcaggaagcactcacagaactagcattatttcctgaggtggatgtctcccagtttccttcttaactggtggcagaggcacgcccgctgaaacaaggcttggcattccccctgcaggctcctctggtcccctggacacccagggtctaagcccagctgacagtctggaagtgggccgctggtgaggtcagcagagcccgagaaggctgtgggaggcgggtccgagcctggggccaggttgtggtattgcctcttgccagcagtgtgcagccttgattcccccttggttttcttggactgcttggatgtaggcagcctgtctgttttccatccgctggctacaggactcccattcggtccccagctacagggctctggggacctcagggttccccctccaggtaagctccggcctcctcaccgcca

SEQ ID NO: 17491 - DNA, 1058 bp, Artificial sequence
  DNA replication origin
cccccttggttttcttggactgcttggatgtaggcagcctgtctgttttccatccgctggctacaggactcccattcggtccccagctacagggctctggggacctcagggttccccctccaggtaagctccggcctcctcaccgccaccctcaccctgcttcctgggggcatcttgagcacaactggaaggttgcccggacatctggctggggtgctcaggggtctcggatccctgctgggctccttcccagatcactgtgtgcctgcccagcctggggcttggctgctctagccctctggacagaaggctggaaccccgacctcatatagccccctgggtcacttggccaggcgggttctgagctggctggagccacccacagccagcgggaccctgagccacagacagctggagatgggggtgaggtgaccatggttggacaagccagaagagctaagagggcggggccaacctagcccttggggaggtgggttgggggagggggcggctccagggttgttttgggaaaccgactagcttggcttagaaagaggagggactttaacagctgtcaggggctgatctgggcagcactgggactagggaaagtgagcaggaaggagctgtggtctaaccacctcaggacagcgcccagagagggcaagcagctgacccaaggccacgcagaagccagtgacagagcttgcagcccagcgtccttcccctgccaagacgctgtactgagacccaccatgacagcccagccgctgtagggctgctgaggcccaggatctggggccctgtaggaaggaggcgccaggatcacacgggaagcttgagctgcttcaccacagtggagcagggtggccccaccagtttagtcatgaggtacccacaagcactgatctgtgactctgggcaagccactcacctctctgagcctccttctccaaaaagataatggttgtgattttttcagtgagacaatctatgtaaagcacccaggagagctggctgcggccctgatagctatcaggacagtttctttgttcgtg

SEQ ID NO: 17492 - DNA, 894 bp, Artificial sequence
  DNA replication origin
actgcgaggagaagaagagagagcccagggctcatgaaatgcagcagaatccttatttataaacaggccgcggtagtgatatatgcaaccccagtctactcagtgagttttctatcctatggatatcggtcttgagagttgagattggagagcagcgccgtctgtactgggtcctgcagcctctgtcctttcaatgcctggttttttctgtgactgctggccttccctggagatcagagcgctcctgtatgccatgggctgtattcagagcatcggaggcaaagccagagtcttccgggaagggatcacggtgattgatgtgaaagcctccatcgaccccgtccccactagcatcgatgagtcctccagcgtggtgctccgctaccggacaccccacttccgggcctcggcccaggtggtcatgccgcccatccccaagaaggagacttgggtagttggctggatccaggcgtgcagccacatggagttctacaaccagtacggcgagcagggcatgtgagtacggccgagagccagctctgggaactgctagggatggccgagcttggaggcctggtggggggccgcggatagggggaaggtggagataccatgaagacaggacggaggccagagggaagctttaggcaggtatgcaggtggcctcattggcccggtggctccctgaaaagtttgcctgtggatccagattggagtcacggtcctgcaatctaccctgccactgttccccccgggttcctgtgtccttccctgcaagatgccgagaaagcagagagacattactcccagtgtttcctggcagagcaagtgtgccgtccgcctgaggagtgtctgtgccatcaggggtcaccagagaggctgcagggctgccct

SEQ ID NO: 17493 - DNA, 1053 bp, Artificial sequence
  DNA replication origin
ttcggcttaactttgaggctggccttgacgcgctgtcccttccacctcccaccaggtcctcggcggccgcggcgaagcaggcggcggcggccggagcgcagccccgggaccctgcacggcggccggcagcgacagcggcgaagggacgcggcgcccctgcgtggggacgtccggcccgcgcccgcgagtgggcgccgacggggacccgcgccgcgctcccccgtcaccggcgagcggccggagccctgagctcgcctcctggaagccgcgggtcggcgctcgccccgagggcgccgggacctcggccgggtgaacacaaactgctctgcaattgattcgaccgcgccgggcgggtgcgggtgcggggcccggagggagcgcgtgcggaaggccggagggcaggaagtcaggcttctgccgcgagggtggcgcggccgcgcggggacagagccttccttatttatgagtctgccggcgctcgcctgcttcctccgaagacttcagggagagtctgcgagctgccgtccccgcgtgtgaggcacagaagggctggatgtcagaaccgcataattattcattaaactacaaactttttttaacccaaagaatatcggtgatttttgtccactgcgaggagaagaagagagagcccagggctcatgaaatgcagcagaatccttatttataaacaggccgcggtagtgatatatgcaaccccagtctactcagtgagttttctatcctatggatatcggtcttgagagttgagattggagagcagcgccgtctgtactgggtcctgcagcctctgtcctttcaatgcctggttttttctgtgactgctggccttccctggagatcagagcgctcctgtatgccatgggctgtattcagagcatcggaggcaaagccagagtcttccgggaagggatcacggtgattgatgtgaaagcctccatcgaccccgtccccactagcatcgatgagtcctccagcgtggtgctccgctaccggacaccccacttccgggcctcggcccaggtggtcatgccg

SEQ ID NO: 17494 - DNA, 1623 bp, Artificial sequence
  DNA replication origin
ggggcgcccccacccccttccccgggcactgtcccttggctctactggagtctggggccggcgtgggcgcccccggcccccaccctcctcccggcttggggcttcgggggggcggccgggggcggagggctgaggctcggggctctctcgcccccaccccgcgcgcctcctttattttatgatcattgtgagcgcgctgtcgccgctcagccccgccgccgcgccgctgccgcctggcgcgccccgcgctgcctcgctctgctgcagcatcggaaaggcaaccgggtcaaactttgcagaaactcggcccctgcgccggcccggcccccgcgtccgctcgccgccgccgccggccgagcgcagccggcgcacgcagggaccgccgcccgctcgccggccccgcggggatgcaggtccgcaggcggcggcggcggcggcgggcgggcgccgcctcctcctccccgcccgcctggctctccaccctcgctccccgcacacagcccgccctccccctggtaatccctcgctccccctcgctccctgtctctgcagctgctcggggagctgagcctctccttgaacaaacgacatttcctttttggccagccccgggaattctgggtagtgtagttccgctgctgtctcggggccaggtgggctgctcccagtgccctttgaactctatggaccagaggctttctggggttcggagcacccgcagaagggctcccttgccctggggttcctgaccgcagggagacagtggcttggtggagacagcgcgggggctttgtaggctccaaggctgggaaggtcgcggggaggggagagcagtttggggagaggtgggtcccctcgagcaggtctgctggctgcctgttggaccccggctgtgtgatgagcgctgtacagagcatcatttcagccaccatcggcctccctgtggagggagactgatgatgtgcacttcacagagcaggcacccagagctgagaggctaggggatttgcccaaggtccttccccccgtccccccgcaggggtcccagtgcaggggctcaaaaggagcatgaggctgtacagccatgggagagctatgaaccccacccctaccttccagccagccgtagggaaagcccaagcaatttgtgacataagtacatctggcagctacattaaagccacgctcttcgtccccaccccatccccatgactctgacttccacaggtgcccacagccggcacagggcaggtgcttccagccagtcccagagccggagcacgctgagtgtgtgagggcagggctggagggaccgaggggctggccactcttggatctctcctttgaggggttaacaaccaggacatctcacagcagcaccggctcagccatggagcaggaagtggctggctagggtggcctccgcctctcacccagccacaccctcaccccagcactgctatggcccgtatccccagctaatgaggaggtggtccctttccagttcagctagtaggtggcttattcctagtcccactgactcgggccaaggcagggccacagagatggcccccttggcctgttggacacagtagaaccccagacagcacacagattacatca

SEQ ID NO: 17495 - DNA, 1065 bp, Artificial sequence
  DNA replication origin
cagcctcccctacaggtggggaacagaggcccagtgaagtcctccagggaggcttccttcactagaacccgggtcttctggccctgcactcagtgagagcgtcactctccactgagggccatggtgccgcatgggtatggcagggcatgggacaagggattgaaaccgctgcctgtgctggctgcaaatctggaggctggggccttttcagccgaagctcagaaccacatggcttatagggcaagttaggcttggggcacctgcccactgttccagctcattccttccccagtgtggaccggacacgtccgccgggccaggcactgagaagatatagcggaggagtcacagccaggcccagacaacagcactcacatccccttccctgagatgtcggggataatgccaggagccatgaatgagggtattgattatcatcaataataaataggtacagactgatgctcaaaatggttatgagtaagcatcgatggctataaatcaggaggtatgtcggtcagttgtttcgatgtgtgtgtctgctgctgagctggaggaagggtgcgtgcaccagggctgtgggttgtgaggctgtggggtgtgtgtgcagtgggatagggcgtgtgggggcatgtgcatctctgcgtgatgatgtgagtgtgcatctctgcgtgtgaggctatatttgacagttgttggtgactgtgggtgtgtatgagtgtgtccatcttgtaagtgtatgtgcctgcatgccatgtgggtgtgtgtccatgtgtgtatggggtgtgtaatggtgtgaatgagcatatgtggtatgggtgttgatgggcacgtgcgtgcaagttgtgtataaccgtgtgtgtattgtgtgaggggatgaaagtgggggtgtaaggatgtgtttaagtgtgtgttctggttgtgtgtttgggtccatgtgtgtctgtggatgaggccatgtgtctgtgtgtctgtgtgggtgtgggtgtgaactggattgtgtggtgagcacatctgtgggtgtgcatgagtgtgagtgtgcaagtgtgtctgcacatgcgggtg

SEQ ID NO: 17496 - DNA, 1283 bp, Artificial sequence
  DNA replication origin
cggcgcggcccggccgggctttgtctcccgcggccgccgccgggggcccgggggccctgcggccctgcccgacctttgtccgcgagcgcggccgccgccgcctccttcccgccgggcgcggggctgcggggctgggaggccgcggggcctgggggcggcgggcccgggcgcgctcgccattgttgtggcggcgccgcgcggcctcaggctcgggcggggtccaggggccgcgcgactccctcagggctcgcccgccacccccgtacccccgaggccgggccgggctgcagaggccggaggggcgggggtcccgggcccgcagccgggtctcggggttctggggccggcgtctttgctccccgccccgcccaattgacggagcagcgcgcccgaggcgggatcctgcggggtcgggccttgggtccggggcgctgagcggcgttcgcggggccgttcctggcgcggggtgggccgggccccggcggcgctaaagttggcggctgggggagggaggcgagcggccgcccagtctcggtgtgagtgcgggaaccagagggttattttcgaaatgctgaatgctccatgctaaaaatgtttaataataaacaggatgtcgccactcggggcctgccagatggggtttttttttttttcctcctcttttgcctcccctcaacccccaggagagaaattcagccctgttgaaactgtgggcctctgaagagtggatttgccttaagaggtggatttttttcctttttcttttttcctccttctaaatatcgtgggaggtcggagcccacctttaggcaagaattggaggtgttttcagtggtgagcttgaaggaagtgggagaaggggggctggggagtgtcttttgctaaatggcttcctgggagaaatctttaaatgcctttggtttacaggactgttaaactttccctaagattttttttttctttaaggtttagtgtgcatttgatgtggctttgtacagtgtcatccagtttggtttttgtaaccaattgtgtgcggtcttagcatggtttttccgaatctcgctgcagccatttagtcatgtctatgcacagcgctgtggtgtaaggtgggactggggaggcccaggcattggggtgcagatcctgcttctttcttccgtaaacctagtgactctggggctgtctgaggcttcatctgcataaatcggggcgtgcaccctccacctggcaggtttgggcagcggtgaagggcctagcagagggcctggcacagttagtggttc

SEQ ID NO: 17497 - DNA, 742 bp, Artificial sequence
  DNA replication origin
tcactgaggtcagcagttcgagatcagcctgacatggtgaaacccccatctctactaaaaatacaaaaattagccggtgggtggtgggcgcctgtaatcccagctactcgggaggctgaggcacgataattgcttgaacccaggagacagagaggttgcagtgagccgagattgcgccactgcactccagcctgggcaacagagcgaaactccatctcaaaaaaaaaaaaaaaaaagaattttggagttgggtcactagagggagtgaattgaaaaagccagaggtgacaactgagagggacactgagagttgagattatgcgagagccacagctactgggagcagccaagcctagacaggagtgcacagagcaggggcccatgtgaacaagggcaccagtggcgaggagggcacaaactgcatggacagggtccatggcacagagacccggggtcatctctgcagacatcaaaaccactaggaactggaacaggagagtggagacagactgcaagccagaccagacaaggagggtgaccttcaaaggtgccaaatactgcccacaggttgacggagaggaagatttctcagcagacactggatgtggtgatggcaccatagcagagtgaagggcttgtcaggcacagtctatggtgtgggcttcaaagctggcgtttcagggaggaaggaagaagaggagtctagaagcatcaacaactacacaaagaggactcttaaccc

SEQ ID NO: 17498 - DNA, 1428 bp, Artificial sequence
  DNA replication origin
tactgttttgcatcaagtggtggtaaaaacaagactgggctggattccagactgtgggggtcctttgaagcatgctgacaggagaacagggtagctgcagggcctaactaactagaacaagatatgcgaggtggggatgtgggcccagagactgtaaggacaggggaacaggatggggtaggggggctgggccacttttggtctctcagtcactgtcctcttcatctccctgctattgagtccacagtggagggtcagaaggatctattggaattacatcactgagacttgtggtggccagagccgcaaaacaccatgctcctccttggagcaccaaaatggtgcaggatgaaaatgatgggaagatgctgccatttatagagtgctgacttggggtatgatctgacttgcagggaggccaggtaggagtccctacaggagctggacagcatgcaggggtgtggaggggatgagacacagctggattctgaatccttttaaagccagagctgacaggcctgctgaagggtaagggggtgaggtgagggggagcagggagccaaggaggatgtggactggacaagcagaaggaccgggaggaaaatcgagttttgaatatgatgagtcttgagatgccataagacaccatagcagacatgctggaaagtccattggatttgagattcaattccagggacagatctgagctaaagatgtccatttgggagtgaggagaagatgaaggaatttagagccatgactcttgaaacacacccaaagcagggcccacgggcatgctgaccattacagactgggaaggagaggggacagcaaaggagactgaggaggaggcctgaggcagcaggaaagccaggagcgacggcctggaaactgggtgaagaaagtggttcgaggggtgtggggggcgggattacggggtcagcactgcagctcgtctgtgtactgacgggaagggatatctgatgcatgaaagagagggagatgtgctggggcagggccccccaggggcacaggcagcacctaggcagggatgtggccacaggggcttggagactgtcactgctcctgtttcctgggtgacacagaaagggaggtcatgggtgggaggcagcgaggggcaagatgcaagtctgaaaagctgctaggagggtgggggttgactgggagccacagcttggatgaaatgcaaaggccatgtggctcggcagatctgctgatggggaggaagaagccaggccaagggggaggatgacaaaaacatgggtggcagagactgggtgtggtggctaacacctgtaatcccagcactttgggaggccaaggtgggtggctcactgaggtcagcagttcgagatcagcctgacatggtgaaacccccatctctactaaaaatacaaaaattagccg

SEQ ID NO: 17499 - DNA, 1266 bp, Artificial sequence
  DNA replication origin
gcctctcctccgggaccggcgccctcgcccgctgcgcacgcgcgtcaccctctcccagtgcgcacgcgcgctgctgcccgtctggccccgcaggctcggtgaatcgaacgttgagcagggcggtgggtggtgcggagtgccgagcggcctcacccccaaccgtcggcccagtcggacggttccgaggcgttgccgggagccgggcgcggctctgtgtggactcggagaaacgcgggtacatttggggacaccggggacgagagcccagcccggacttgggggagtccgtcagtgccggacgcgggtccctggcttgcggacgggctggggccgggggcgtccccgtctttccggagctgggggcggggttcgggcccgggcagatgcggcgttcgggcggccgagccccgaagtaagaactccgtggcgcgtgcagccctagggaggaagggcgtgctgcgggtgcagtctcagggtgaggacggagctggggccgacgcagcctcgggagttggtggacgggacaggtgcggcctgtggggaagaagggccggccagggagatgcggtctgcaaggggagaggaggcactcccaggacagatgggaccttttgggacgaaggcgctcaaggcagatgcagctcagggagggaagggcgcgtccagggtagatggggcctgaggagaccagcggggcgccaacggccagatgcggctttggtgtgagacagggtgtcccaggcctgatgcagcctcaagagaagcggagctcaagggaagatgaagcctggaggagaacgtgggggcgcagggtgcaaatgcaccctccaggcgagaaagggagcacccggggatgatgtgccgctgggatagaaggcagggaggcactgggggcagatgcatccttgaggagagatgaggaggccccgaggctcggccaggttggggtccctgggctgtaagcagctgagatggcacccaggagctgcccagggtcaggtagctgtggccgcactgtgggcttctggtcgtcggggagggaggggagaaaccctggcgttccttagcagtgttctcgcgcccaagacgtgctcggcaggttttgtggaatgagttgttgaaaggagtgaatgtccagtcctgagatcccctgaattcccacccgagttcactgctagtgcccctcaccccacatgtctacctgaaccaaggctccaggaacttcggtctttctcagcagcccggctgtgctgtggttctcctcgt

SEQ ID NO: 17500 - DNA, 2198 bp, Artificial sequence
  DNA replication origin
gggcgctcctggtgtgccggcctcgggccctgcaccctcacgcatgcgcggcccccccccccccggtggactacaactcccggcgtgccccgcgcgcctcccggaagtgatcgctccggttgcctccgacctcggcgctgggcgggcgcgccgggcctggggaaggggcgggcgcggggacccgatgcgcgggagcggaggccgagatggcttcggcgggaggcgaagactgcgagagccccgcgccggaggccgaccgtccgcaccagcggcccttcctgataggggtgagcggcggcactgccagcgggaaggtaaggggccgagcgggccggggtctcgcctctcgccggtgcctacgggcggcccggtccagagaggagaccccagccccggccgaggggccccctgccaggcaggggcagggcgcgggagcgaaggggctgcaggccgcgatgggccggggcgggctggggcgggcgaggggttggggcgctgggcctcggggctcccccacagcctctccgccggccgggctcctcggagccccaagtccgtgctaaccccgttgggcccccgcggcccttccgctgagaccatccacacctgttggtgtcctcccgccttccgagcataccccccagggggcgggtgggtcagtgtctccagaagccggccccgtgcctgtcacaggacgagcggttccaggcgggaatcccgcttctgtgtctccagtcgaccgtgtgtgagaagatcatggagttgctgggacagaacgaggtggaacagcggcagcggaaggtggtcatcctgagccaggacaggttctacaaggtcctgacggcagagcagaaggccaaggccttgaaaggacagtacaattttgaccatccaggtaaatcgcgagcccaacgatgtggggagggcagaccccattctgggcggccgctaaccagctgcgcttgggcccaaggttggatggatgcagacccgcttgggctgttcccccaactcgccacgcagcctgcagtggagttggctgcacagtgaagtcaggggaactttgctgagttctctgggccctgagtgtccccccaggagcgtggttggagccagtcaggaagcctgttgcactgtggggagccctgccctgccctgccacaactgtgatcctggagaaatcctcccatcttcccttcccacgttggggcctttagggccctccacacacacctctgcccactgtgccctcccgtgctttggggcaaagtcctcagagaggccagtgtgggaggcggtaggtaaactagtgctggtggcttgaagctccgggccaggtaaacgggcagatgcggcagggagacacctgccactgctagaagattccaccctggctggctggcatggtcagccttttcccaaggacttgtgggaagaaggcctgcaaagccgcagtctaaccagttagtcccagaaagagagagaagcagaggcccagcctacccacctcccaggaagagctgatcagaaaacccctgtgttccggcatctcaggggcacagagcttgggcagtggcacagcccgagaacagcaaggacagggtcatcctgtggtctgcagggctgcagagggcactgttgctaccaaacatacactgccgtagtcctagtctacctgtgctagggttctcggtgtccccagcacccagctgtgctgaccccagagcagagagggttccctgctgtccgctgcacgagggcatctgcctgtcttgcctttgtctccaaccctgcagatgcctttgataatgatttgatgcacaggactctgaagaacatcgtggagggcaaaacggtggaggtgccgacctatgattttgtgacacactcaaggtaagcaggtggttctagggagggccgaggagaggggccagctaggacgtcccctcgggctcacacagacctgcctggcggcaggcctcccccggttggtttctgtgggtcccccaccccttcccacagtcagtgtccctgcaatggaagctgactgtgtgtgtggcctggagaccctgtgtctgcagcagagcccctttccccgtgcgcccctcaggttaccagagaccacggtggtctaccctgcggacgtggttctgtttgagggcatcttggtgttctacagccaggagatccgggacatg

SEQ ID NO: 17501 - DNA, 1246 bp, Artificial sequence
  DNA replication origin
ggaaaattaaaagaaagctagagacaccatgactctcgtctgtgcagctcacatccgtccggctgtggtgtccagttgcccaggtccccaccactcctctttgtctcatgctgactcgctggccttgcgggcactctcgtgtgccaccctgccttctctagtccggcgtggctgactcgccctcctaccccaacccctccagccctgcacagcgccgcggagtctccaccgagcccgtcctacccaggcaggcagggaggcaggtccggccgagcgcagggcgccagggagcgactgttgttgacccagccttgggcaaacaaggcggtcaattattaaccggccgcacggcaggcaccaggaaacctgagcccgcggcgcaagcggagccggcccgacggcaggcgccgggccagggagccgcgcagcccttgcagccgccgcgggctcggaccatggaggcaggagctggaggggcaggtgccggaggggcaggtgctggtgggacaggtactggcggggcaggtactggcggggcaggtactggcgaggcaggtactggaggggcaggtactggcggggcaggtgctggcggggcaggtgctggcggagcgggtgctggagggggtgtaaggggtagataccagagggtcggctgctggaggggcaggtgctggtggggcgggtgctggagggggtttagcgggtagataactgcgggccatgttctggagggtcagggatcggcagggcgggcccaggcccggggctgtggtgccccggaggccggcggtagcaagatgggggagaatgcccggcccaggacaccccatccggagccagggtggggagagccaggaagctgctgtggaaagttcaggagctctgggggcgcccctgcgggcaagccagggagggggcagcggcggttcattctctgagcattttgcccactcccgccccgtgtcccgcctctggcagctcagctcaccgccccggccaggctgaagtccttgcagcaggggagtgggcgaccctggccagggcggggtggagacagagcctgcagtagggagcacgacctgggaagagaccccacgggctaattcggggacggagagctggagacagggaccgagagaggtggggtgggggcagagctggagagaggcgcggacgcgggtgggatccggccaaggctgcgaccaactcgacgtcgcccacccccaggcgtcaggcgctggaa

SEQ ID NO: 17502 - DNA, 1395 bp, Artificial sequence
  DNA replication origin
gtgtcccgcctctggcagctcagctcaccgccccggccaggctgaagtccttgcagcaggggagtgggcgaccctggccagggcggggtggagacagagcctgcagtagggagcacgacctgggaagagaccccacgggctaattcggggacggagagctggagacagggaccgagagaggtggggtgggggcagagctggagagaggcgcggacgcgggtgggatccggccaaggctgcgaccaactcgacgtcgcccacccccaggcgtcaggcgctggaaggggcggggggcaaggaaccgagacctcgtccttgccctggggagtctctggctggctggaagcagtggggcggtggcagtgggacccctgcagagtctcgcgcactccccgccccctcatcccccagcgcgactgatcttgagagcccggggatggggcgcaccagtcccatctgcaagcagctccgggagatgctggagcgctggcccctccccgccgccccgccctccaggactcccccccagaccctcaagcacttgcccagcggggagcccggaccccccttcccagctggaatgcctggcggaggctccggtgtcaagagcctgagaacctgagaacccacccgaggcccccgccaggcagcgccgccagcagatttatttactctggggccctatctccgcgccatcgggccagatatttgccctggcgggatccagggaaactgcggtttttgttatgatagctggggcagggacaccatcccggagagacctgtttagagtggagagctgactcgctgagacccacgtttcttgctgggagtctcggttccctcattagtaaaatggggagcataaaaacaaaagcgcgcccgagatgacgcgggttacgaagcaaaagctctcagagcagagcctggcctcctgttcgcttttttttttttttttttttttttgagactgagtctcgttctattgcccaggctggagtgcagtggcacaatctcggctcactgcaacctccttttcccaggttcaagggattctccctcccaagtagctaggattacaggcgcccaatgtcaggcctccgagccaaagctaagccatcatatcccctgtgaactgcatgtacacatccagatggcgggttcctgccttaactgatgacattccaccacaaaagaagtggaaatggcctgttcctgccttaactgatgacattaccttgtgaaattccttctcctggctcatcctggctcaaaagctccctcactgagcaccttgtgactcccacccctgcccaccagaaaagaaccccctttgactgtaattttcctttacctacgcaaatcctataaaacggccccaccccatgtcccttc

SEQ ID NO: 17503 - DNA, 1087 bp, Artificial sequence
  DNA replication origin
cggttcaggcgtttgaagttcttgtgtcctggagatgtggttggggtttatctcacagtggaggcaaggaattgcaactcggaaatacactgctacttggctgcctctactctattattgtacaccttgaaggcaaggttaattaagtcctgttgtggggtttgagggccggaatttaatttggggggtttatttaatgtcgggagcggattgggtaataaaatgtatattgagaataagatggccttttgaccttttagggtctagggctgtaaagcatctcacagttgctgccaaacagccatgaactgggctggctttttcatatttgatgaaaaagagcctaaacactaactgatttgggagaggtcggataaagaaaagggagcattaaccttgactatgcctttagctccagccacctttttaagaggaaattgctgggcaggtgggggagggctagtcgcagaattaaactgtaagccagaccgggtgtgaggagggaaggtgataaaaggattatagggtggggaaatggaggctgaggaagaattcggacctagctcagcctggcgcagagcagcctggggaggaggggagaggtcagatgggtctgtagaaaaggaagattcaaaagactcagtgacgcttggggttgggactgaggggacaggcgggaaggaaagaaggaagatttgggacaagttgcattgggaacagagactagggagggaccgatgtgtaaaagaatgcctggatgtcaggcacctcagaccggttgcccattttacgacaagaattatctagattttgtaggatggaaaaatcgaaagtgccgtgttctggctatttggaaccactgtcgagtttgtattggggtcaagcggtgttgcagaagaaaataagacacttagattttaggtcaggcgagagttaaagaggttttaagttcttgagaacacaggctaagggagaagaaggaggaatagagggtggaaggttgcccatagtgaaggagacaagtttaaaaagaagggtagagatacggagagaaggggtgggggatgcttgccccccaggaaagtgg

SEQ ID NO: 17504 - DNA, 1202 bp, Artificial sequence
  DNA replication origin
ggcggcggccactcaccacggggaaggggaaggcggccccggcgggcggcgagaagagcgcgggcggcgtgggcgcggctgggtagagctgggcgggcggcgggaagagcgcagacggcgcgggctgcaggaccacgggcacctgcgggaagggcgggtacagcagcggcgcggccttggggtccggcggcgcgtagggcgggggctccccaacgaagccgatgtggggggcgccgccggccgccgccttggaaaccggcccggcctcgcccgccgcctgggccggggcgtcctccggggcgggctcgctgccccccgcggccccgtcctcgctgggcgccccgtcctcgtccagggtccgcgggcggcgcgggagctgcgggagcgcgggctgcgcgggcatctggggatcctcgggggcggcgggcttcgcggggctccgggggtcctcgggggtggcggggctgccgccccctttcgtgtcggaccctagaaagaaatggcagcggtcgtgagcaagaggccgccgggctaggtgggacgtcgctggtcccgcagttcccacgaaccaagctcccagccctctgcagctgggcctcataggatcgtgacgcaaagggactaaaaaacaggcccagaggggccacctgccttgctggagtcacacagactgagcgactcatctgggtgggaacccaggctgctgaccccgcccctccccgcactgtcccaccccctttccttggcagatggcctctattgggaggtagtttcacccccaactaaggcctttatgtcaaagctaattggaccagaaaaggataatccgcccagggaagcccctgattggctgtcctgagatacacctccaatgaaggggacgcctacctgaggagatgagctgaaccaattagattcttggcttggagttgtaggggaggggtgaggtgcccaggagctgccaaactgtagctagagtaacatggtggagccaggaggtcactaagggccatatgcacactgagaatggacaccagaatatacagggcccagcagcttgaagccagggctcagagcctcaaagctgcccagctgccttgctcccgacccaggccctggccttcagcacccaacgataggtcctggtggtgcctggtcaggtcccaacaaattcttaaggctgcacctcctgagagcatccc

SEQ ID NO: 17505 - DNA, 1568 bp, Artificial sequence
  DNA replication origin
cgcccccgaggatccccagatgcccgcgcagcccgcgctcccgcagctcccgcgccgcccgcggaccctggacgaggacggggcgcccagcgaggacggggccgcggggggcagcgagcccgccccggaggacgccccggcccaggcggcgggcgaggccgggccggtttccaaggcggcggccggcggcgccccccacatcggcttcgttggggagcccccgccctacgcgccgccggaccccaaggccgcgccgctgctgtacccgcccttcccgcaggtgcccgtggtcctgcagcccgcgccgtctgcgctcttcccgccgcccgcccagctctacccagccgcgcccacgccgcccgcgctcttctcgccgcccgccggggccgccttccccttccccgtggtgagtggccgccgccctgggcgcgctcccctccgtgctgtctgcgcgtggtcgggggcgcccgtgcggaggccgataggtcacttctgtccctgggggcgggcgagtccgggaggctccctggaggtgggggcatttgagcggggttttggaggatgaataggagggctaaggcaaagagaacgacgggcgccctggacagaggacaccgcacaggcgtggaggggccgagactgggcgttctggggatggtggaggcttgtttggcttggtagggagggcaggaaggtggaacccgtggggagggaccccagaaactttgggcaggaggtgacttgattagattttctttaaaaacaaaacagtccgggcacggtgcctcatacctgtaatcccagcactttgggaggccaagacaggcagatggcttgggcttaggagttccagaccagcctaggcaacatagtgagccctcatctctactaaacgtaaaaaaattagccgggcatggtagtgcgcgcctgtagccccagctattcttgaggctgaggcaggaggattgcttgagccagggaggttgaggctgcagtgagacgagatcacaccattgcactccgggctgagtgatagagcaagcctctgcctccaaaataaaaacaaaaataaaaataaaaataaaaataaacaaaagccctgggctgcctgtgggggaaagattggaggccccccagggaggggtggcgagcccagtgaggacgatagagatatcacagaggctggaccctcgactgagccaatggtagagggcaggactgagggctcagtgggactgagggctcagcggggctgagtggccaggggtgcaagagggagagggcagaggggcaccctgacccaacccctccgtgaattgcagcctcagtgggtggggacttgggggactgagtgagagagcttgcatggcctggctggccttctcactcactctgttgtccagaggctgggccagctccctcaccactgtggctctgcccccacagtacaatggcccgatggctggcgtgccaggccctgccacggtggagcacaggcccctgccaaaggactacatgatggagtcagtgctggtgaccctcttctgctgtctgctcaccggtctcat

SEQ ID NO: 17506 - DNA, 1492 bp, Artificial sequence
  DNA replication origin
cgtggcgagccagggccgaggcgagcggcgggcgcgccgcccctgtcgccccgcggcggcccggcccgggcccgatgagcggcggcctcggcctccggcgcagcccggaaatgtccggcaagatcgagaaagcaggtgaggcgcgggcgtggggcggctccctccggccgggcccggccctggggctccgccgctccccgggccgagcgcgggtcgcccgggatgtgcggccctccgtgcgccggggcggggtgaagccaccgaggcctcgccggggcgcctggcagcttctcctccaggcccattgcctgccgggcgcggggggaagcggccgctgcgggggcgccaggggccgggccgggcggggcccctgcaacccggggccgggcgcgctagccgctccgcggtccccgggaacttccgaaaatggctcgagccccaagcaggggaagaacagcccgggccgcgtgctgctgcggctgcagcgatcggtgcccggcctgggctcggcgctaggagggtgaacccagctgagctgtaaaatgtgtcatttctaacgagcttcgagtttaacgagaagcgtccacttcggttgcttcaaaggaagcaggctggatgagtgggggtattttgaggaggtagtcaagtttcccctccccaccccgatcaagctcagctctgcaaggagggcaggtgggggaccggtgggttggagtagatggtaaatcttgatgcagacctcgtctctttgtgtgttcctagaaatctgggggagttaccttccgagtccctgggtttgcctgtcctggaaatagagtctccaaagattcaatgactgtcgagcctgtggggccccaggctttattagcctgcagcaccttgcagggcaaatgcgaattcttgggtctaaggtgaagtgggcgggtgctcctgggctcctgtactgggagcatgccctgtggtcataaccccggtagcaggttagcttggcggctgaatgagggaaagcagatttttagggagctgcaaaggaggtctgtggctttgattgtggaagttgcttatgtttcctgggttgaatctgggatacttctgtggggtgcacccctgcagcggacccacaaggcaatatgacttttgcaggctgtggttgaagcacagaaggacatttttgtaggctttattgagggtttactatatatctaactcttagcacctaaaatgcattgcttcttaaatttttgaagctagtctgtgggaaagaatatggtcccagttttacaggctcagagaggttcagtgagttccggctgtccagacagcaagagggcggcaggcccctagtatattcattcctggccctctgaccagaagccagggtgcttttctcaggggcagggcgcttgggttcaggtgccatttcttgagtatttttctcactgaatttgagcccccacagccttgccgagtgaccatgagtcgccatcctgta

SEQ ID NO: 17507 - DNA, 805 bp, Artificial sequence
  DNA replication origin
taggcctcaggggacatttaggcctgagtagggccaaccccagcccgggacaggtggctctcgctggcagggtgactgagtcccacatgcagggctggggtggagaatgaatcctccgccttggcatagaccttgggccagcagagggctttcatgccagagtggactcattccccggctggagcctctgggctggcaggaggtgctatgaggccactcccaggccctggtgtggggtctccaattaagaagggggtgcgggcagggtgcagtggttcacacctgtaatcccagcactttgggaggccaaggtgggtggatcatgaggtcagaagatcgagaccagcctggccaacatggcgaaaccccgtttctactaaaaatacaaaaattagctgggcatggtggcatgtgcctgtaatcccagctactcaggaggctgaggcaggagaattgcttgaacccggcaggcagaggttgcagtgagtcgagatcgcgccactgctctccagcctggcgacaaagtgagactcggtctcaaaaacaaaaaacaaaacaaaaaagggggtgctgcatctctggtttgggggaggtcaggacaggctcccagccagcagagcttgttgagtcctggtgagagtgagttctaggccctggtgtggagcctctggcccacaggggatgctgggtccgggatgatgctagggtggggtgggcgtcagttccacgtcctggggtggaaaatctgacccaggagggttctctgtgtctctggtgagggggcaggccaggctcttgggcaacc

SEQ ID NO: 17508 - DNA, 1384 bp, Artificial sequence
  DNA replication origin
gtagctgggattacagacgcacgccaccatgaccggctaattttttgtatttttagtagagacagggtttcaccatgttggccaggctggtcttgaactcctgacctcaagtgatccacccaccttggcctcccaaagtgctgggattacaggcatgagccaccgcgcccggcctgaaaaaatttaaatacagaaaagcacggagaataacaaaacatttatgtatgtactaaatttgcagtttggaaaaaatttattaacaataaatagtatgagaaaaaaaatcaatgtcgtcaaccagaaacattggggaaaaaaaagacaacctaattgttttgcagaaacacctccagccacactccagttggaaaatatcatagaattgggcctgggcctcttcccaggtacctgtttctggccaggcagcggccacctcagtcacatcaggagaactgcatggattcccgatccaccaggacctctgaatctgaattcctggggaggcccagatgctgtcctttgcaaactctaggtcgttccgctgttttgcggggcttgtgaaccacctcctggggttctgagaaactgagtttgacacgcctttctctacccgatggtggctctgttctgtgctccttggtctagcgtgggtcatggtctgcgcctcaaggtctgagtgtgaaccaggtcccaagactctgcctatggctgcaccccaggagatggagctggggggcgacatggaaaagagggggatgggtgtgacttgctaggagaatcccaagtgaccatcacctccaacagtgcagcggaaagctgggttgcaggtggaagggaagtgccttcacctgttgtgcttattatccctgtgcttttgagggagagagtgtggctcaggccggctgagtgacttgtgcaaggtcacccagctagtcgtgtgtgcaggactgtgacctgagggcgtcccttaggggctgcagtctcctcttggccatctggaagggtgtgctcggggttctagggggcagatggggcagggtccctgcagccctgtctctgagatgatggactgtgcacgtggccacccccacagccccggagcctcccttgaactcttctctgcaccctgctgaagaagcatctcctggggacggtggcagccaggggagtggcagaggaagagaggacgggtaggccccatctccctgtcccaggtctggaaatgacgcccgcgccccaagcccttctctcctgcccagcttcgtctgtgtcgtctgtgtcgtagaaaggcctgctcagaattcacagcggctcaggggctcatgaattatgtacggctccagatcaatccgtcagcgctctgtcagggaggaatcaaaggccc

SEQ ID NO: 17509 - DNA, 1166 bp, Artificial sequence
  DNA replication origin
agagttcatcctctttacccccagttaacagtgaaccagccaggaaaccctgggctctgaatatatacccactatgcgctgaaaacctgccagtgggtaacacacaccctgatcagacgcgtgcatggacaaatagcactttcccaagatgtaggtgctaacagagcccgtcacagggggtgtatgagttggaaccaagttagttggtgagggacagaaggccccaaatcacggtgccttgaaccaggcagaggcttctctcttctgtctacacccgggggtgggtggggagggctagctgaggacccacggtgccttcagaccccccagtctgtcctatctgttctggaagggtgggctccacgcccaagacattccattcccacttcctggtccaagacactgctccatatcccacagcaggaagaaaagaaggacatccccttcaggtgtaactgtgtctccttggcggggcgagaccacatgcccatccctgggcctgccacagtgtgtatgtggtatgtgtgtgtgcatgtgtgtgtgtgcatgtgtgtatgtggtgtgtgtgtatgtggtgtgtgtgtgcgtgtgtatgtggtgtgtgtgcatttgtgtgcatatgtgtgtatgcggtgtatgtggtgtgtgtgtgcgtgtatgtggtgtgtgtgcatgtgtgtgcgtatgtggtgtgtgtgcgtgtatgtggtgtgtgtgcatgtgtgtgcatatgtggtgtgtgtgtgtgcatatgtatgtgtgagcatgtgtgtgtgcatatgtgtgtatgcggtgtgtgtgcatgtgtgtgtgtatgcggtgtgtgcgcgtgtgtgtatgcggtgtgtgtgtgcatgtgtgtggtgtgtgcatgtgtgtatgtggtatgtgtgtgcatatgtgtgtatgtggtgtgtgtgtgcatatgtgtatgtggtgtgtgtgtgcatgtgtgtgtatgtggtgtgcatgtgtgtgtgtgcgcgtgtgtgtgtgtgtgggtggctctgacgctaagactggcctggatctccttaccctggggtgcagtggggaggggtagtttgattcgagccaatctaatcaaaggatgtgaactgatgggacgctgaggacgggttccctcaaagcaaagtgagaccctgcatctctggcgtgagctcagc

SEQ ID NO: 17510 - DNA, 1209 bp, Artificial sequence
  DNA replication origin
gggcagaggcgcccctcacctcccggacggggcggctggccgggcggggggctgacccccccacctccctcccggacggggcggctggccgggcagaggggctcctcacttcccagtagggcggccgggcagaggcgcccctcacctcctggacggggcggctggccgagcggggggctgacccccccacctccctcccggacagggtggctgccgggcggagacgctcctcacttcccagaccgggtggctgccgggcggagagactcctcacttctcagacggggcggctgccgggcggaggggctcctcacttctcagacggggcggttgccaggcagagggtctcctcacttctcagatggggcagccgggcagagacgctcctcaccttccagacggggtcgcggccgggcagaggcgctcctcacatcccagacggggcggcggggcagaggcgctccccacatctcagacgatgggcggccgggcagagatgctcctcacttcctagatgtgatggcggccgggaagaggcgctcctcaattcctagatgggatggcggccgggcagagacgctcctcactttccagactgggcagccaggcagaggggctcctcacatcccagacgatgggcggccaggcagagacgctcctcacttcccagacggggtggcggccgggcagaggctgcaatctcggcactttggggggccaaggcaggcggctgggaggtggaggttgtagccagccgagatcacgccactgcactccagcctgggcaccattgagcactgagtgaacgaggctacgtctgcaatcccggcacctcggtaggcggaggctggcggatcactcacggttaggagatggagaccagcccggccaacacggcgaaaccccgtctccaccaaaaaaatacgaaaaccagtcaggcgtggcggcgcgtgcctgcagtcgcaggcactcgcaggctgaggcaggagaatcaggcagggaggttgcagtgagctgagatggcagcagtacagtccagcttcggctcggcatcagagggagaccgtggaaagagagggagagggagaccgtggggagagggagagggagagggagagcacgttaggcattcttagtcacaggatgagataggaggtcagcacaagtacaggtcacaaacaccttgctgataaaacaggttgtggtaaa

SEQ ID NO: 17511 - DNA, 1086 bp, Artificial sequence
  DNA replication origin
gggagcgcctctgccccgccgccccgtctgggatgtgaggagcgcctctgcccggccgcgaccccgtctggaaggtgaggagcgtctctgcccggctgccccatctgagaagtgaggagaccctctgcctggcaaccgccccgtctgagaagtgaggagcccctccgcccggcagccgccccgtctgagaagtgaggagtctctccgcccggcagccacccggtctgggaagtgaggagcgtctccgcccggcagccaccctgtccgggagggaggtgggggggtcagccccccgctcggccagccgccccgtccaggaggtgaggggcgcctctgcccggccgccctactgggaagtgaggagcccctctgcccggccagccgccccgtccgggagggaggtgggggggtcagccccccgcccggccagccgccccgtccgggaggtgaggggcgcctctgcccggccgcccatactgggaaatgaggagcccctctgcccggccaccaccccgtctgggaggtgtacccaacagctcattgagaacgggccagcatgacaatggcggttttgtggaatagaaagcggggaaaggtggggaaaagattgagaaatcggatgggtgccgtgtctgtgtagaaagaagtagacatgggagacttttcattttgttctgtactaagaaaaattcttctgccttgggatcctgttgatctgtgaccttacccccaacccagtgctctctgaaacatgtgctgtgtccactcagggttaaatggattaagggtggtgcaagatgtgctttgttaaaccgatgcttgaaggcagcatgctcgttaagagtcatcaccactccctaatctcaagtacccagggacacaaacactgcggaaggccgcagggtcctctgcctaggaaaaccagagacctttgttcacttgtttatctgctgaccttccctccactattgtcctatgacactgccaaatccccctctgcgagaaacacccaagaatgatcaattaaaaaaaaaaaaaaaaagaactttaataaaagaatgcctaacgtcctgggaatgcagccca

SEQ ID NO: 17512 - DNA, 1368 bp, Artificial sequence
  DNA replication origin
gagccggggcatccccccggcgcggcgcgggccagatggcgggcgcttcactgcccccctgcactccgctccaagttaatgccgaggctaaatcctcttgccatcactcacgatcaccatcggggcttttatctctcggtctgatccgggctgcgtaacttcctctgtgtggctttaacacaccatcccaccacggagcaacggtcttcttaaaggtgcaggaaggaaatattgcgcggctcgggggacgcgccacggcccggggaggggcgcggcgagcaggggcgtcccggcgggcccgtggccagggtggccccggcagcctctggggggtcgctgcctaaacatcgcctcccggcccgggggccagcgggtccctgcgcccagagcgcatcctcagccggctccggtcaggcgcagccgggctgcagcttcctcttccaaaacccgggggcctgccggggtgccagcgcccatgggtgtgggggctgccccatcggcacgagggaggggggccaagtgagtcagttcccccaccccccacagccaagggctcagggctgctcctcggtctctctctgtgaagtgctgccacccagaaggccccaagcagtgggtaccggggtgggtgggtggatttggggagatggggagggggagcgatctgagcgcacaaccagagcctgaataccagctgacacatcgccgcctccaccctgatgggccctgcttttgacgaagccaagccagctctgcagggagtgcagagtagtggggcaggaggggcctggctgaggggttctctgtctccctcccctgcaagcatgggaggcaggtgtgggagggctccggtagcagcagccccgggcagaggccaccgagttcacaatatcatatccggcagccctgggctctctgatccccaggaggtttcctgccagcctgcctcccagggcttctgggagagtttccacatcttccagaagcacatgtggttttcggacactcctggcctcctggggtgggctcactgcagccttgagcagccagcactgtcatttggatgcatcaagaacaaagggcctgaggacagacagagagagaggcagagagagagagaccagcccaaggtcacagagggtgttgggaatggagcaagacatggcacctcagtgccccgccctgctgccacccttcacctccaccttaacccttccctgttctcagctgccctgaaaactggagacggagttatactgctgaataatatttggaatcttgtgacaaaacaggaagaggatgcagaattaaagactgtcatctgctgtaataataataataatatatttattgaacacctgttttatg

SEQ ID NO: 17513 - DNA, 941 bp, Artificial sequence
  DNA replication origin
gggatgccccggctccccgacgagacgccgcgaagcccacccgggccgggggctgcccggcgcccgagcgcgggtcctccccgggccgcccaggggggccaaaaagtttgcacttgttagcggcgacctcccgctcagcccgggcgggcgatgcgggcggcgcgggcggccccctcccccggcccgcgtctccgggacggctgcgggcggcccccccggcggccggagggctccctggccccgatctgacggcggcggcggcggcggccacagcggcgggagcggcgcggggaaggagcagcggctcgcagccctcggcccgcgcccccacccagcgccagcccgaggggggaggcgcagcgccggagggtggcggtcctcggccctcccaggtctccgcgccgggaagccgctccgagccggggtaaggcgggcggggagagcccgggaggcgggcggggggagaggctgcagcttggccaggccggtttcatttttaaagggcttcggtgaccatgcaggcttgcccgggcccgggagccacttacagcggcccggcaaaggctcggatgcaaaagttgtttggtggcggctgctacgagctgagaactggagtcgccccagaggggtgtgtgagggtgcgttcttagcagcatcttaaaggggtagcttgtctttctggccagcttcccccgggtcctttccgtcgtgtgtgtgagagtgtgtgtgtgtgtgtgtgtgagagagagacagagtgtgtgtgtgtgtgtgtgtgtgtgtgtgtgtgtgtgtgtgtgtgtgtcggggagggatgttgcaaggatgctcggatgtgtctcggaaaaggaaactaaccctgctcccgcgcctctcccccaccccaattccaccgccaccgcttagagccacccccatcccgtgccctcccatctctctgcaaa

SEQ ID NO: 17514 - DNA, 1369 bp, Artificial sequence
  DNA replication origin
aggggggcctgtccctcaccccaccccggcactgaaaccctcacagccacttttttcctccctccgtgataaaatattcatggcggcagagtgggccctctttgggaaggctgcctgggtctagcttatgctctgcacaagcttttaaagagcagggcgctgttcctactctctaagcattttctaagtcctgaatcaataatgcactttcctgggcttctccggatgtagccctcttcctctcggtgcctttcccccgcccgcccccttatctttctttcccttttcttctctcccgttctttcatccttccatctctcctttcatttactttttaaaaaagtatgaaagtgttgagctgtttgggtggccagtgaagccctgagtagggagtgggcaggaagggaggcgccagactgagcccctgtgtgtgcagggaggaggaggaggagtgggaggaggaggaggagtgggaggaggaggaggagtgggaggaggaggaggagggaaaggaggaggagcagcagcggctgagcgctcccgctggccctgctagggaagtgtttgaggatcactgagctcctggtgtggggaaggaggagggcttagcctcacccggcctccctctctcctttttctaatcaattagaaagtgtttacagcatagccagagaaaaatagggaacctgggaccaagaaaaaatgcaaagcaccggccaaatttcagccccacactcgaaggagggagcagtggggtttcacctatctgccttctgtggtaatgaaacccctgtcgctagaggtatgcaagagaaggggagccttaccctgtctgagacagacgcccatgtgtctggtccattctgtcagtcgcctgtggggtgccccagggatgcacgggcactcttcaactgggatagaatttcctgccccaaacattcctggaaatctggctgtgggaagaatccacatatgcccagggcaaagcagaatgtgtcctttaagaaaacaataatacatttttaagttcctggagagattaacccttgtctagccagagccatggcaatgcctccccgcccaccacactctggtggttcggctgacggaggagatcagtcattcaggggtctgcggtcctgatgagcagtgggtgcccacaccaggcctggcatttcatccttgctttctgaccttggcttcccagttgaccctctcccgggcagctcgtccatcagggcagcccaatgccctcaggtcctccgaaaggatctcagggtgttctgtgggggcaacccgaattggtgtaagaagactaagcagtcgatctgctggaacagcatccccaaagcggagcgaagcccgcgga

SEQ ID NO: 17515 - DNA, 1173 bp, Artificial sequence
  DNA replication origin
aggacagcgacccctctagttgcccagagaggggaaggggctgacccaggccacaccagtgccagggcggggaaggtggggctgggacgtgtttgatcccaaggaaggaagccagagtcttctctccaggcctggccaccctgggaagtccccacctgccgtccagccgcgggctcacgtggacccagtgtggggagcatcccctggggagtgtggagatgctccctgcgaggccgggagagtgggggtccgagaagacggcgcccacacgtagccctgaccgcgcgcccgtgcccgtgtccgtccagagtgtaactgcaaccagataggctccgtgcacgaccggtgcaacgagaccggcttctgcgagtgccgcgagggcgcggcgggccccaagtgcgacgactgcctccccacgcactactggcgccagggctgctaccgtgagtgcgcgccgtcccccgtgggcggggcctgcggaaaggggacggggcaggaccgaggcagtgggcggggcctagtgggacggggcaggggcggtggactgggcctagcaagacggggcagggccggggaagtgggtggggcctagtgggacggggaagaggcggtgggcggggcctcgcgagacggggcagggccggggcagtgggtggggcctagtgagagcggggcagggttgggatagttggcaggggcctggtgagatggggccgacccgggggcggtggacggggcctagcgagacggagctggcaggtgggcggggacaggatgctgctgaggtccggggccgggccgaggggcgggtccaagagctcggggcggggcctgatgcgacctgaggcacggtggtgcctggtgggaactacgagaaagaccgagctggggttggttggaaaggtatttgcggggacagagggagggaggctgtccaagtcggcgttagccgcgggcacagggtgaaaggaggctccaggcgcgtggaacagcacgtgcacagctctggagactgcaggcgcgtctgaagaacagcaccgaggccagtggggcggggagagaggggcagcggtgggaggcagccgggggccagatctcgcccgggcgccgtcaccctccgaggggggacgtttcgcacccagcgcgcctggagcctcctacatccccggccca

SEQ ID NO: 17516 - DNA, 1155 bp, Artificial sequence
  DNA replication origin
gagatgggagaactgctggatcctctgaatcagaggccccaggggatgagccccgaatctaggagcttcctcaccactcccaagctgcccctgtcccctccagcaccccttcctaatcttgagaaggtagggaggacagggccggcacgtctggggtctctgcactgcccgcctctgcccacctggccatctgaaactctggaaggaggcggtggccgaattgtgggttcagcttcatctgatattggacttgaggctccggctgcaacaggtctgagatgacacatccatcggaggtggccaccgagacacagtataaatcagagcattggattcaacctctgctaggattctccctgagtcatttcccttggacttctgtagaaaagggccaatacactccggatttcttttttgggaaaggagggaggcagcctttcagtgtggggaggctcctaacaggtggggcacctgcagcctggccgcggggtggaaaactctgccagccaagcctgcggggagggggcactgcctgctggaatccacagaaaggcccagggaaatggtggccccagtagggaaaccgtttctttaaggctgtgttgtggattcctctgtaagccccacacctgcccaccgtccccaacacagaaagaaaacaggccgtggaggcagcagtgagcaaactctttactcctcggattctccaccatcggcccccgcggtgaccagtgctcccgccccgtcccccttgcaggggacagtgaatacaaacaaaaatagttctctacagaacgaagtttccaggccccccaccccttccttctctcctcctcccccagacggtgagttccgtggtcaccgggcctccggtgaggcctggggtctggtgggttgcaggaaaaataaagaatagaaaacaggaccaagtcagcgactggaattgtaggcaactggaggtcggggtccgccgccgcccgtgagcctggcacaggccagggggtgtcggccacagtcccgtgtgtgtaagtgtggtgggaggcaggacggggtgtggggcgagcagcgtttctcccgaccctctggctcaccgccagaaaaaaaaaaaaaaaaagagagagagagaaagacaaaaaaggaactgggcggcggata

SEQ ID NO: 17517 - DNA, 1561 bp, Artificial sequence
  DNA replication origin
gcggccaaggaagggtgggtttcagtctctctctggccttagagggctcagggggcccggatgccaatcaggcagggccaagaacttggaaagtgtgcatggaacagaaaacccaaattctagtgttttaatcacatcaccgtttattttttttctcacacagtaagacaggcaggtggtgcggtggctcatgcctgtaatctcagcacttcgggaggccaaggccggaggctcacttgagcctaggagtttgagaccagcctgggcaacatagtgagacctcaactctataaaaataagtagataaataaaagcagtgcagaggttgcagccaaggcaggtgtcccaggctctgcaacttccacccccggctccacccttcactatcctgagggtgacactgttatgctcagtgtctcaagaaggctccttccccatcctgctgactgaagagcagagggagggatgagagagaaaaaccagagccacaaacttggacaactgaggctttgtggggcgtggaggaagggatgacttttaagaactttctggaagcccacccatcagtcctgcttacatctcactgcccagagctgtgtcccctggccactcctatccacaagaagccccagagaggtgttttattttatctgggcactttgggtcccaggcagtggggttctgtgcgtaaggaagaatgtgagggtagagatgggccagctgcaggaggatgcagggcctgtcggaaggcacttccgggtcagcagggtgctgggggtgggagcagagagaggaggccaggaggggctggtgtgtgggctcgggacactgtgagtcctatgcagtgtcccgttgtgcctccccctccttttctgtgttgtaatctcctgctgtccccaaggccaagtttgttccacttggtcttagcttagctttggggactcaagggaaggacccaggtctaaacctcgcagctgggaaagaacaggtgtggtggcagaagccagtgctgggagcacctgcaggtggagcagtggcagcagttagcaaccaggaccggacccccggcactgctctgaaataaacataggtggacaggaggctggaccgagggggaagtgtggccccagggctggagacaccaagcggagatgggagaactgctggatcctctgaatcagaggccccaggggatgagccccgaatctaggagcttcctcaccactcccaagctgcccctgtcccctccagcaccccttcctaatcttgagaaggtagggaggacagggccggcacgtctggggtctctgcactgcccgcctctgcccacctggccatctgaaactctggaaggaggcggtggccgaattgtgggttcagcttcatctgatattggacttgaggctccggctgcaacaggtctgagatgacacatccatcggaggtggccaccgagacacagtataaatcagagcattggattcaacctctgctaggattctccctgagtcatttcccttggacttctgtagaaaagggccaatacactccggatttcttt

SEQ ID NO: 17518 - DNA, 922 bp, Artificial sequence
  DNA replication origin
ccggcgacagcgaaagcgcggtgggcgtggggtgctcaccttgacgatgagagggttctgaaacatggagtcccgcacgacccccagccgctcgttctccatgccggaacggatgtccgccacggtcaggggccgccgcgggggcgggcagacctggctgaccgtgcggcgcacaggctgctgctgcttcctccatcgcgtgaggtccgggccggagctcctggcctctggcatccttgaggtcgccggggagccggcccgcgggctggtttgggcgcgcttccccacgtcgggcacagcctggagctccgaagggcctgccgggcggcccgggccgcaccaccgggatcctgagggggaaactcagatgccaggacccctccggagccaggcgcgccccgctcgcgccggcccctcatcgcaaagagccccggagcaatgcaggagccccgcgggatcctcagggcgtctcctgggccccgcgttgcagactgggagaggaaagaaaaccaagaccacccctggaggacgaatgcaacggcccgtctccttggcgacgggacgccaacagagcccggctcggcttgtacttttctttcaagaaactcttggtggctaccagtgtggacttgtttggagttttcctgaatcgatacaggagaaccgagaatctccagtgggttgcgttcaaagcggcgtggctcatagagggtcatttacatttgtcttccaagtcgaagactccatcctctgctcacccccattccactcacaacccctccccacctctgctctttgcgccacacacacacctgagacagagcactaaatgcattccaagcctgatgctgatgctgacccactgggaggactcgggcaagtcaccctcttggatcctaagggctttttttctttttttcct

SEQ ID NO: 17519 - DNA, 1074 bp, Artificial sequence
  DNA replication origin
gcatctgagtttccccctcaggatcccggtggtgcggcccgggccgcccggcaggcccttcggagctccaggctgtgcccgacgtggggaagcgcgcccaaaccagcccgcgggccggctccccggcgacctcaaggatgccagaggccaggagctccggcccggacctcacgcgatggaggaagcagcagcagcctgtgcgccgcacggtcagccaggtctgcccgcccccgcggcggcccctgaccgtggcggacatccgttccggcatggagaacgagcggctgggggtcgtgcgggactccatgtttcagaaccctctcatcgtcaaggtgagcaccccacgcccaccgcgctttcgctgtcgccggctccgggcacctgcgccgccgggggtccccacccgcagcgccctggccccgcggcccggggtccgagcgcagcgtgggaagctccagctctggtccagacaggcctggacccccatgcaggtcgcgtcgcctctctcagcctcggtttccccatcctcacagtgggatgataatggcaccactaaagggactgattgggaagattgaatagggtaatttctgcgggacctcgggacagcgcctgacatggggtaaggctgcaatgggtgctgctgtggtttcccacagagtgaacccacagggtgacagataggtcgcacacgcccagtctaagtcgtggctgccagccctcccagggtaaaggccgcctctccggttccgctgcacgcctggggtacgtctatgcagcggtggctccgtgtctgtcctggaagcatcacgtcgaatgttcatttccgttcgatcatactaatttcttacccaaattacaaccctaagagaaaaaaagcataatctttggcctaggaggctccgcagacaagaatgagggagctgcggtttcgggctggatcactttcccttccattacacttccctcctccccacctttagcctcgcttcccgctgatgggaaaccaacactgctgtggcggccacaccttcccgggggccactggagaagtcaggctgaggcttgggggtc

SEQ ID NO: 17520 - DNA, 1021 bp, Artificial sequence
  DNA replication origin
caagtgggtggatggttgggtggatggatggataggtggatggatgggtgggcgggtgggtagatggatggatggatgagtgggtgggtggatgcatggatggatgggtgggtgggtagatggatggatggatgagtgggtgggtggatgcatggatgggtgggtgggtgggtagatggatggatggatgggtgggtagatggatgaatggatggatggatggatagatggatggatggatggatggatggatggatggatggatggatggttgggtgggtaggtggatgggcagatggatggatggatggatggatggatggatggatggatgagtgggtgggtggatgggtgggtgggtgggtagatggatgaatggatgggtggatggatggatggatgggtggatggatggatggatgggtggatagatggatggatggatggatggatgaatgggtgggtggatggatggatggatggatggatggatggatgggtgggtgggtggatgaatggatggatggatggatggataggtggatggatgggtgggtggatgggaggatgggtggatggatggatgaacgggtgggtggatgggtggatggatggactaacgaacgagtgaacgtagagttgagatctcattcatgaggtgcactgcccttctgctgtccccttcctccccctgaaatgtccttgggccctcaaatcctgtaccattccccctcccccaggttaatccactctgctacaccgcaacagtgtctggcatcatgccccctcccctctcctctcactcagaaaccatctctagtacattcataaagcctttcctctgctataactcctgcctcagccatttactcctcaatcttgtctttttagtttttcttttgaaacagccttattgaggtgtaatttccagacaatacaatgatccatgcacaatttgatgagttttgacaaatttatacacctgggtatccaatgaagatatagtacatttccaggccag

SEQ ID NO: 17521 - DNA, 958 bp, Artificial sequence
  DNA replication origin
ggttcctagaattgaatgcaggtaacttataaacttgaatgtacaatgggagattatctatgaaggggatttagatccatgggcaccaatgcattctgtgggctccattcaagtggatcagctctgtcccactctccatgactcaccagtatctggcatgatgcacaggatggagggtatgctaggaaggaagggaggaaggaaggaaggagggaaggggaggggagggatggagagaggaagggaaggaagaaggaaagaatggagggagaaaaaaaggaagggagggaagaaggaaagaagaaacagggagggagtgagtggggagggaaacaggaagaaaaggagggtgagaggaagaagagagaggaagagaggaaggaagaaagggagggaaggggcaggaagggagggaggaggagccaatgggaaggaagggagaaagggaagaggggaggaagacaggaaggaagggagggaggagaggagaaaggaagggagggaggtaggaagagagggaaggatgaaaagaggaaaagaaaaaatatgttcttttcctggtttcaggagctctatgaggttttaagctaaaacaaaacaaacaaacaaaaaaaaaacacataagaacagcatgaccttgaagcccacaaattgcccaaatccttgtccaactccactgtttgcagagcagagagatgacacccaggcctggcctgtatcattcgaatcctctgctcactttgccttaaaaactggttttggtaggaagaccctgggtaaaggtgggtgctgacttttctagagagggctgaggagacaagcctgaggactcaaacctgccagaggaaaaaggctctaggtattattaacagcagttgtactatgaattacataattgctattcttcgagcctgcagccaagtgccaagattcctcacacgaaccacgtgaagagggc

SEQ ID NO: 17522 - DNA, 1974 bp, Artificial sequence
  DNA replication origin
cgggggctcgccgtcgatctaagtgaggatctcggtgctccgaggaagatgagattcctcaggggatgcgggcgcaggcctgggaggagtgggtgatggggagggaagtggggtctccagagacgcccagagcaggagcaaggccaggctggggactggactggaagagccagggcagccggctctcctcgtgatttatgggcccctcctcatccaccaaactgaaatgagctgccggcccggaccgccgcgggaggtgcccactgcagtggccgccgccgatccagagcctgggcccccgccctcccgcctccccgacagcttgcagccgagccgggccactgtcccccgggagccgcccgtcctcacccccagcccggccggcggcggggccgcttccaatctgccggcgggcacagggggagagcgccgggagccgggcgcggggccaccgccgacctagcccgagggaggagaaagtttttgctcctcccgaccacgccaggctgcccccgggagaattctgcgtttagagggcatgcgggtgccttacgatttgctgcggtctcggtcgctgagcccgacgtaggagccggggtagtttcctgggggctgggggtggtggcaggggcgtgcaggccgggctggaaaggcctggcttcccgagcctgcggggggtaaaaggacgcctctgacccgcccgacctcgatgaaggcgtttgggctccgctctgtccgccctttccgccgcagacccgggttgcgatccctggggctgtgcagagaggatccaggcccgggacacagttcggatctgcccgcggtcctgggccccaacgccgggggctgaccctagaaaggcgctggactggagcccgtgacggggtgggaagggcgagggggcgcatgattcacaatgaaaaggccacgtttccagagttgccttgaaaatgcatccctggacgagctctggctctgcgtggaataagaagccgttagcaggcgtctacactcgcactcggaagctcttgcgtgggtcctgttcagaggtacaacagcaccggccccccaagaggtgcccatgggagaggccataagtggggggtgggcgggttactgccttctttgtcccttgagctgcctcccttgagccacacggatttctcgaggtctccctaacgcccctgacaagatcttcccaagtcctccaacctcgccctgaagtgaagccatcggtctcgtcacttcccaggaagacacctggctttccccactcccgccaggcccacagggtcccaagaggccagagagacaggactgcaaattgtcctacatgggaaacaccgagagcccaacagaaatgccgcaaacaacataacttgaattttcttccccacactagaaaaggggttctcgacgcgcgcgcgcacacacacacacacacacacacacacacacacacacacacacaccacacttcttcctccgctggttttagtccctttctgctgctggaggaagaaaaacgggggaaggaaaaaggatctacaatagacctgccgacgaataatttgaataactgtgggaaagggtcggggaacgctaaaaaaaaaaaaaaaaagcccagcgcacatcccagcccaccgcagcgcagtcggctcggccccctcccctccagccgtaccccccttggctaatcaccctcattaggagcttcgtcaccggcctaatgaaagcaaaccgtgtggaaatcgccggtaaacagttgggtctgtgctgtaattaattcggtgtctcttttaatcaaactgaaagggaatcgggcagcggcttgcggagccgtgacatcacccccaaaatcggccagagccaatcagcgtcatcactccggggacacgtgggcgagtccccttaaaaaaacacacacaacacaacgaaaaaaaagaaacaacaaaaaaaaacccagacccaaag

SEQ ID NO: 17523 - DNA, 1210 bp, Artificial sequence
  DNA replication origin
tgcgctccagctgcgccagctgatggtcggtgaaggccgtgcgcgccttgcgtggctttttcaggcgcaccgggggactgtccctggagctggagatctcgcggtcgccctcctccttcactgcggacacagcggcatgtcagggcccggcctcgcagccgccgccggtgccctcccgctcctgcccgtggcgtttgtgtaacctcggcttccgacagcggtggttccgcgacacccaagctcgcgggggccgctctcagacgggacctctggggccccgggaacaggacatgaaccctgaggggaacaggacggcggcgggagcgcccgaggccgagaccccccgggcagctccggggagaaagaacccgaagctggcgagaactccagtccctgcgccgcgctcggcgctctgcccgcgctccctggagggataaacggagccgcgacgatggaaccggacccagcctgccagcgtaggggaagggacccagggtttctggcggagtgagctccgcgtctgggccccagtttctccggctgcgtccgtgacaggaagggaggaagccgaaggctggggtctggggagagaaacctgcgtggagggacaaaaacctgctctctccggaatcactctttgtcctcaaggacagatcattgtgccccgcctggcgttgcccctatatggaaacgaattcgtagtgatgatttctcccgacactcgctacctacacagggcgctgggcggaaggctccgggtctgcgagcgccgagcactgggagaataagcgaccctgccactcgcttgccccttgggcgcagcgcgcattgcccaggtctgcgttccgttgtcattacattgcccgctaacgatggctcctgctacacctgcgtggcatcgtgtgtttacaccccacagtcgggacagaattacaccgggggcccagctcctgaggtcgaaggatagacctggcacaggtagtttctttatcccagacactttcgttcggctttgactgcacagaaaacacttaatcgaacaagctcaatgctcaccctccttctccctctaaagcgattatataaccagctagaccacttccccaaaattggcggctcagactggggctttcccccaacctactcccttttttctctgttttcttttatggtggagtttcattgtgcgtggcgtttgcagtgacggggt

SEQ ID NO: 17524 - DNA, 843 bp, Artificial sequence
  DNA replication origin
gctgcgggggtagaggcagaaagggaacttcccctttcctcacagctcctggaggggaccaggagtctacaggttggtgctaagggagggccccagagcctcccccattctgtaaaagtgggaaactgagtccctaaggggacaaggccttgcccaaagtccccacagcgagggacagagatgagactagacttggtgtccagcgtccagtcagccctcccccggatgggtggacagacacataggccactgaaaatccaagtcctgccccagctcagccggagtggggggaggtctgcctggagcccccacctgagccagcgtgggtcttggaagccccaggcccttggaggggtgacagtcttgatgcccaggaagcctgtgaagaggacggccaggcagtggcccttggggtgttgaagcctggcccagaccgggcagctgccgcaggggcctcagagtttctgtgaggctcttcaggcctccccagcctttctggtcccaaaacccgaggggggaactggccaagcccttgttccttggggacagggtgactgggaagtgggtgttggggcaccggacttgaactcgtttcctaatttccctcccgaacacactcaccagacgtagatgcaaatgtacaaacacagaggcatccacacactcaacccaaatagccacacaccgacacacacatcaatacaacttgcagtcacacacgcacgcacgctcagccccacagtcactcgcacgctcttagcagaggcaggaatggtgcttttcataaacaagcctcagaacacatcgccccattaataataaatactgattactgctccgggc

SEQ ID NO: 17525 - DNA, 1031 bp, Artificial sequence
  DNA replication origin
tagaaggggcgtgggagagagcgaagcctgggaatcagccgcacccgctcctggggagaaaggggttgcctaggggagccggcagaggctgggggtggggagtggcagagacgcgtatgtacacccggcgggtggggatggctcccggacagagcggccgcgagagaggacgccgaggggggctggggagacgcagtccggggtccgggcctcagtggacttggcatttggcccttcggggggcactgggctggggcgccagggagggccgggcagggccccctcccgggaaagggcgtcgaacctgcgccctcagaaaggcgggcggaaggggccacgccgagcccgcgggaggaggccccggagccgacgggcgcctcaccgaggctgcgcggcgcgtgggaggacgccggccagggggggcagcggcgggggcggctcgctggcgccctggagtccgtggatgaggatgcggggcaccagaggtctctggagagcaggcggcggcgcgctggggccgcggtacaggtagagcgccgcgccggggtccaggttggaaaccagactctgcgggtagaaataaggcgacgggaacatccgctggagcgctgagtaattgcctgcctccgccagcagctccaacccgacggccgtctgtcgcttccatttagtcctgggggccgaaataaacgcgtatggcgggatcagggctagggcatccagcgaccccagcccctccccactgcttggcccagagagcctgtagggaggccaagagggatcgtactcatttgttaataaataaccgagtgccaggcaccatcgcacgccttacgtgcatcctctccttttatcttccaccggccttccgtggctcttaccccactttacagagaggaaaactgaggtctgggccggttttcaaaaaggagcctgggttttaagccctgctgtctgaccccaaagcccggctctaactgcgccttaccctgcccaggagatcgcagaacgaacccttggagctgggtagg

SEQ ID NO: 17526 - DNA, 1284 bp, Artificial sequence
  DNA replication origin
atggggcagacgctgggatttggctcccctctgggtctcatttccaacctcctcccggggtaaaggggaggtgagaagatgtgggagtgggggtttacccgatgtggcgtctggttcgcagcgaaggcgcgcggagtcctgcctggtgcgggaggccgggaggcccgggccgccttggcgcccgcgagcgtcgggagcccgagcgcggccggacgctgggcggagggtgggagtgatggggggagcagcctcggagcccatctgtcggcccgcgcccggcgggccggtcaccagctgccggggcccttgtcgcggccagatgagtcggctcggcgagggccccgcagcccggcccgcagccgaccgaggccccgcgctgacccccgcctgttccggcacggacccccgccccggccctcgggaccgtctgggagccgctaggaaccagatggagacagaggaggaggaggggaacaacgagctggcctcgctgtagagatgggaagactgaggccagggaggggagacccgggccccagcgagtcccgtcggggcccccgcgcatgtccacagcaccggggaagagaagggggacaaaaatgtttcgttattgaggatggaaggaaaccgagtccccaggagagggatgggagaggggttgagtgcggacccagcgacgcgagcgcggacaggcgcctggtcatttgtaagaagtttatttcgacatttaaaaaagagagaacccgagaggcctggctgcccccggaccggggctgaggctgggggctggggtcggggtgggtgggcaagcccccttggccccttcctgccccgcctgggagtggggagggcacaggccacagactcactaatccacggacacggtcacgggctcatgggtcacgaataaataacttcatatacactttgcacacggtatgtacagctcagccgctggcccaggtgctcgaggggtagggagacggggctccgcactccccttctctccctggcgggggcgcggggagaggggctgttctccacctggagcgtagaaggggcgtgggagagagcgaagcctgggaatcagccgcacccgctcctggggagaaaggggttgcctaggggagccggcagaggctgggggtggggagtggcagagacgcgtatgtacacccggcgggtggggatggctcccggacagagcggccgcgagagaggacgccgaggggggctggggagacgcagtccggggtccgggcctcagtggacttggcatttggc

SEQ ID NO: 17527 - DNA, 1296 bp, Artificial sequence
  DNA replication origin
acatttttgtcccccttctcttccccggtgctgtggacatgcgcgggggccccgacgggactcgctggggcccgggtctcccctccctggcctcagtcttcccatctctacagcgaggccagctcgttgttcccctcctcctcctctgtctccatctggttcctagcggctcccagacggtcccgagggccggggcgggggtccgtgccggaacaggcgggggtcagcgcggggcctcggtcggctgcgggccgggctgcggggccctcgccgagccgactcatctggccgcgacaagggccccggcagctggtgaccggcccgccgggcgcgggccgacagatgggctccgaggctgctccccccatcactcccaccctccgcccagcgtccggccgcgctcgggctcccgacgctcgcgggcgccaaggcggcccgggcctcccggcctcccgcaccaggcaggactccgcgcgccttcgctgcgaaccagacgccacatcgggtaaacccccactcccacatcttctcacctcccctttaccccgggaggaggttggaaatgagacccagaggggagccaaatcccagcgtctgccccatctcttctggctgccccagaccgcagctctagcatctcaggggagaggggtttaagtcccgagtcagactcgaggcttccagttcacgtccaaagggccacggtcacctgagactgctccctctctggggaggtgggcgcaggtgctcccttcccacacaccacctgcagctcgctaaccctcagcgctgggaagttttgggggccggcaagccgtggcccctctagtttgggggcagggtttctctgaagacgggggctgtgttcagactataacccctctcgaaaaccatacccacagccaggtccgctactgtttcctccctgccccgaaacaccctcgcacagcagctttctttcctgggatggcgagggtattattctaattttgcaaaatgcacagcagctaattaagtcaaggagcccctcggctttcgagttcttttgcatgtgaatgggggttggtaaatccccagctctggctctggtggggggtgaggagagactgtccccaactcagggttaatgaagtgggaaaggagtctctcatagcctcctgcaaacaaaaccccccatgcaacaaaccctgcccaaatcctacatggattgacttaaacccaggggataagtgctttaaattaatctcattgaataagaatgagaccaaacaaaactctttaaaatcatattaaaaa

SEQ ID NO: 17528 - DNA, 1050 bp, Artificial sequence
  DNA replication origin
agcggacgcggccccggggcccagcgctgcattccgcctcatggtgactcggcgggagccggccgtgaagctgcagtatgcggtgagcggcctggaaccgctggcttggtccgaggaccaccgcgtgtctgtgtccacggcccgcagcatcgctgtgctggagctcatctgcgacgtgcacaacccgggccaggacctggttatccaccgcacctcggtgcccgcaccgctcaacagctgtctcctcaaagtaagtcatcccccgccatccctggggtcttcccctgtccccctctcgcggccgcatcatccgtcccaggggaatccgatcccacactctgtccggggatttccctcttcgcaccgagcgctggggatttattaagcagccagggttaccacagcttaaaaaaaaaaaaagaaaagctctgcagctgtctgcaccctgtttccccaggtcacccgccgccgcaaacacaggtacacacccagggggcttcccggagttgagtcccaggaacccctccttcgcccctccgtcgggcccgcacatggagcgggttactcgatggtgctttctgagactccaccccctgtagatccaacccggggcctgcctctgtcgttgctgctattgtttggggccgactttccgaggttcttggctggctttgtctactgtgtgtgtcctcctctcgcgcctctttagcttcagaaaagaaaaactggtcccatccattgtcttaattgtttcagtgactttattatgaatggtcctcgcctctccttgggcaaacgggtaaatactggatctcggggtttgtactttagtttttctttactagctaaacatctttgggatgttgaatgaaaataaagattcgaaacaactacctatcttaaacttcaagcgcaaggtcaagtagtaagccatagcgttccttttagttgcttagaggtgtaaaaactttccatatatccttgatagaggtgtacgcttacatgtgaactgtcagtgtatattcatacattcaatagatatttgaatac

SEQ ID NO: 17529 - DNA, 1501 bp, Artificial sequence
  DNA replication origin
gttggggaaagaacttgcccgagccgcagagcgcgtcagccggggaggtcggggcgggggcgacccgcgcgaccgaggatcgggtatctgggcccggcgcggagcctgcagggcggggccgcggcgcgtgctgatgacgcagtcggcgcggcggccctagcgacgcggttactagggagcggcgagccgagacggctacatggacgccactatcgccccgcaccgtatcccccccgagatgccccagtacggggaggagaaccacatcttcgagttgatgcaggtgaccggacacccctgcccgtcgcgacgctggcggcggctcgggagcctccactgcgacgtcgggtgcgcggccgggacccgcagctggggccgagtcgcgcgcccacgaagcagcccaactcgggatgtacgattcgtgtgtcgccgtgaccccgagggggccctcgagctggggacgctcctggtcctgcccgggtttgcctcaggcggacccagggggaggaagggggccactcgagccgggatttggtcctggctgtgccgccagcgggccttatggtctggaaccagtcctttccttttctcggtttccccacctgtgaaatgccaggttgcaagaggtggtctcccaggggctctcccggcgctgacaattaccatctgtcgaatttgtggggagcctctcggcccaggtttctgaggtgggcattgtccgagttcaagctggcatctccatcctcagagagggccgcctctgggacagcagcatctcccaccttggtccctcctcctcagggccagacgtccccggcagctccgaagctctcattctggctccaggcctgactgggcccccagctcaccgtgtgactttgggcgaggccccgtccccgccagggccccagttttcccttttgcacgtggtggaggtcaaggctttcaggagctggaggggaagaactctcagccactcaaaggttctgagaggcaaggggaagctggagctcagttttcagatcatttgtctgcttcccagggtacaccccatccccaggggcatggcatggagggcatagtggtgtctgtggtcatttgaggttctgccctgcacactagacagctgagcccagacgaagaaacccgtgtctgcacctccatcaaacacatttccctcggaaagtgttaactgatagagggagagcaagagattcctaaaactgcttgagtggccaatcacaaatcaaatagctagctgggttagaagtcagcaggtcagggcaggatgggggatcatctggagccctgttgtctgctctagagaacctggtgtgttttccacattgattgttggaggaattgcccaggaaagcttttattgattttgaaacagggtcttgcactgctgcccaggctggagtgcagtgatacaatcatggcttactgcagccttgaactcctgggctcaagcaatccttctgccttagtccctccagag

SEQ ID NO: 17530 - DNA, 1711 bp, Artificial sequence
  DNA replication origin
atcgtacatcccgagttgggctgcttcgtgggcgcgcgactcggccccagctgcgggtcccggccgcgcacccgacgtcgcagtggaggctcccgagccgccgccagcgtcgcgacgggcaggggtgtccggtcacctgcatcaactcgaagatgtggttctcctccccgtactggggcatctcgggggggatacggtgcggggcgatagtggcgtccatgtagccgtctcggctcgccgctccctagtaaccgcgtcgctagggccgccgcgccgactgcgtcatcagcacgcgccgcggccccgccctgcaggctccgcgccgggcccagatacccgatcctcggtcgcgcgggtcgcccccgccccgacctccccggctgacgcgctctgcggctcgggcaagttctttccccaaccccggcctcgcttttcccatttgcgcatcttagcgggggacaccctcaggtggcttccagctgggcctcctcgtatctgagacccccgacgaaacccagaaggggcaagtcggccctccgaggggacgggaggcagaacctgcttctggttctgtcagtgctccccggcccggctccctgtgcctcagtttacccatctttaaaacagacgcgggaataaatgtgggggagggtgtttgaagggggaggggcgtccatgagatgggccggaggttcgaggatcgggtggaaatcctcagcccaactcctagagtcgagccccggtagacccctcccagctccccggctctggccaagccgccaagtgacccgattgctatggcaccggcggtaacaatcacgcccgcggccccgccccttctcgcccgacgtccccacccaccctcgcctcccaagtcctggaacgggcctccccaccctccggggcaccgacactcacggagtcactccaacttctctgggtgctccgtggagcgaagagcgctctaggacaagcaagggtaaacagggatgagtgtgggtgggcccactcggaccccaccccggcctctgggtcagaaactggaagctggggtggaggatggaaagatggaggggtccggaggatggaggggcctgcacagctgtctcggggtgggggcgaggggaaggttcgcgctggagacggagctttttaagtcgtatgaattcccagtggtacggggcagcttgatattttattagtcgcaacactgaattgggatctctagctcttgtctgttgccgttaatcgtaggagctgtaagagtttgttgaactctttgtgctctcggcaaaattctgttgtctctgtaccttatggagagggaaaatggcacagtcaatgcagacagccccagcttcaagttctggctccgcttcttactgtgtgagcttggcaaactctctgcttgctccgtgcctcactttcctgccctgtgaagagggaactgctgaaggatttcaggagctaatgtattggagagtaattggcatgcagtaagcacacaatatatggggctactattagtagtagtatctcatttaatcgttccaacaatcctgtgaaataggcaccttcattcccattttacagatgagaagttggaggattagaacaatgaggagtggttggctgggtaactttgggtgagtcacttcccctttctgggcttcttttctcatcagttgttgatcatacagccttagaacca

SEQ ID NO: 17531 - DNA, 786 bp, Artificial sequence
  DNA replication origin
ccgtcggccttggccctttcacgacgggggaggtgctgtacgtccaagatggcggcgccctgtaggctggagggactgtgaggtaaacagctgagggggaggagacggtgggtgagtatgggggtgtctccccctcctttttatgggggcttcctggggcagccccggcaccatgactccagccggggaggctcggaggggctggagcaagagactcacttgcttggtagggatcccggggaaggggggttcggagagctctcccctccctcttattacacgctatctccggctggcccggccgggactggcgggtccctggggaggagaggcgagccggacggagcacttcgcccctccttggcccccgaggggacggctgcaccctgggcctcggtccctcgggcaggggcgaggtgggccccttcgtcagtccctcacttggtggggtgacaggttcacgctaggtgcggagggcagggtagagacgcttggcgggaggggaagggtcgcgagggtggggctggtcccagaacttaaagagaggggtcggggtataggggcgtggagaatgaatggaggtcgcctgtggggatcaaggactcgcctggattcggtgtctccgctgaaatttgcatgactcgctctgggtgtacttgtgggtgtttaattggtggtgaaagacagttaccttaaagtgggcaaaggggattcctaagagacagctatttgcagagcccctcctaggcgttcattcattcatttgaggaactggaggatgaagag

SEQ ID NO: 17532 - DNA, 1195 bp, Artificial sequence
  DNA replication origin
tgtctaatgggtacagagcttcagtttgggaaaagttctggtgttggctggtggtgatgattgcacaacaatgtgaatgtacccaatgccactgaactgtacacttagaaatagttaagaaggtaaaatttattaagtatattttagtaacccctccccccgcccccgccaaaaaaaaaaagcccatgtgcacagtggtctctgctgaatgaagacttgaaaaccagagcccagccctaaacagctcatgcatagtccaggcagagaaacagagcaggtaatgccccctcaactgatggcagacgggccagggagccctgctctgggctggagcagggaggcaccttcagggttgtgggagatctgcagggagagccacttctccctaggggtgggtgtctgagcaacagcaccagaatcccagcgacattctctccttcctccttccagactggctttgcctgcctctgaggctctgggaatgctgttccctccacttggaaggcagtttcctcacttcaccaattctttatcttcgtcatcccaaacccaacccacatgcaccccacaagaaaacctccccttgccagttatagactctcaaatcccccagaaattctgccctctgatgttgatcataattgtcatgaaatagctatttgtgtcattgtgtgacacgttctatgaaattctccattgcttccccagtactcattaaggaaatgctttttgtcagatggacagatggatggttgggtgagtggatggatggatgaatgatggatggatggatggttggatggatggatggaagcatggatagatggatggatgggtggatggatggatggtggatgtgtggatggatggatggatgaacagatgggtggatggatggatggatggatggatggatggttggatggatggatggatggatggtggatgtgtggatggatgaatggatgaacagatgggtggatggatggatggatggatgcatggatggatggatggatggatggacggatggacggatggatggacagatggatggatggatggatgggtgggtggatggatgataggtggatggatggatggatggatggatggtggttgggtggatggatggtggatgggtggatggatggacaatgggtggatggataggcaagcaaactgaagggtctac

SEQ ID NO: 17533 - DNA, 1389 bp, Artificial sequence
  DNA replication origin
agactccatctcaaaataaataaaataaataaaataaaataaaatgccaacgccaagcagcacaggtcgctctcctgagccggaagtccaacaaggcagaagaaatgagtctttcttgtgtcctactgcctgttgcagaccctcacagtcatgtcttacgctggcctcccctaatgctctgtgaggcctggcagcggggaggatccctttccaaccagcacctttggaacctcagtaatgacatgtgtctttacatgcttgtggatcaaaggtggatctgcctcccactgaaccccactcaacacaggtagaggacgacatggggccgctgtggtcaggggctgggttctgcagcccaacaggctgtggagggcgccctggactcagggagctgaaacttttctagctggctttaataagctgtcttagggatgctaggatcggggggccaggacaggggggaaggaaggatgggggtgccaggacgggggaggtgctaggttgggggcagggcaggaaggatgagggccaggccaggggtgggtaggaaggatgggccaggatgggggtggggcaggaaggatggggagccaggatagggggttggctgctcttactgtggctctaagacatcacagcagggaccagggaccacatgggtggaaaccaaggcaggtgggtgggcagctgacacttaccatgtaataggctatgaagggaagcaagaccttgagcttgtctgggtggacgctgatgttggccttgacagcatttcgggaccagatgggacggatgtcaaacagctggggaggccaagggcagaggctgagatgagcaccagcagcttccacccttcggccctgaactcccaacatgttctgggccccagcggcccctccagagaggagctggtagaggacaggggctggacacacagggcgtggccctaggacctcctgctctcactaattcatcccttccctcagaagcctgggctgcatgcccagcctgtgccaagtgcagttgtggggctgggtctctcaaacgataagagacatggtcgctgtcctcatagagcccacagcgcggtggggagtacggctcagggggcacatgctagagtcccagggtccccatgctgccccaatctacagaacaggtgcctgaggtgggacatcgtcagggctgaaggggacagcctggcccggggaggactgcaaaggtcagtgtggccggagtgtagagggccagggggctggggcagcgggcctcacgagccaattcaggtcaggaatgtgggctgtgcctggtgggcaataaggagccactgacagtgtgccccagtgactgctggaaatcaacaagacatccacgtggtctcccacaggc

SEQ ID NO: 17534 - DNA, 832 bp, Artificial sequence
  DNA replication origin
cgccgctctggctgatggctcgccggatgaggcccttgttgtagggggagagggtctacgggacccagaaatcccgtcaccaaggccgctccccactctgcccaccccacgctgggacaaggacaccccagcaccacagccccagctccacgctcctcctcccaccctccccttcccgtttgagcttcctctcaacctgtggggcaggccctccccacagggatcccgagacctgcagagagacgctggcacctccagcagactccccgaagagcgtgatgttgttggggtcccccccgaaggccgcgatattcctcttcacccaagcaatggccatgtgctgatcccgaaggccatagttacctgggggcagggcaggggagggggtgctagagaccagtggcccaggcctggcctccaggaggggagatcagcataggtggggtggaaatgccctcaacagagttggggccatggcagagccccagttggcaaatggtgggtccctaagaagctgggtcgggtagggtgctggagggggtgggtccccaggagactaggtcacgttggttgctggagtgggtgggtccccaggaggctgagtcgggtgcggtgctgtatggggtgggtccccaggaggttgggttggtgtggtgctggagggggtggtgtttgtcgggggcaggatggtcaggcccatgcacctctcctgcccctgccccagtccctcctgtctgtgtcctgccacttctgtgtccacagctgtctctgcctcaaggtattgttctctgtctctcactcagctctgctctcctggtttctctctgagcct

SEQ ID NO: 17535 - DNA, 1409 bp, Artificial sequence
  DNA replication origin
agggggggccccggagtcacccgtgggcggcacgggggcggtctcggagtcacccgtgggggtcacggggggggccccggagtcacccgtgggcggcacggggggggcgccggagtcacccgtgggcggcacgggggggggcccggcgtcacccgtgggcggcacggggggggcgccggagtcacccgtgggcggcacggggggggccccggagtcacccgtgggcggcacggggggggccccggagtcacccgtgggcggcacggggggggccccggagtcacccgtgggcggcacggggggggccccggagtcacccgtgggcggcacggggggggccccggagtcacccgtgggcggcacggggggggccccggagtcacccgtgggcggcacggggggggccccggagtcacccgtgggcggcacgggggcggtctcggagtcacccgtggggggcacgggagtggcctcggagtcccctgtggggggcacaggggtggcctcctggtcggtcactgtgggcagcgccagataggtgagggtccagtagcgcaggaagttggttctcaggctccgcttcatggagctgctgcccatcttcttggtgatctccaggtagccgctgttttccgtagtgtagggttcccagtgtgtgggcacagccgagtcgcccatgttggggtccctgcagagtgagaagaggctgtgcaggggctggggactcccagggggctgaagccctgctctccacctgcacgcctgagccatccccgccctctgagctggccctgggcaccatgcccctcactgcatactgggcactggctgtgcacgtgcatgggcttggggctctgccagtaactctcatcctcaaacacacatggattccgatgcagggggaggttaagtgacttgcccaaagtccctccactggcaaatgagggaacaaggcctcgtggtgggaggcccttctcggctgtggccctccgccctgcactcaacccacgtcttaccctgttttggcaaagttggtccagtaggcgatcatggccttagagactgtcctgtcttggggccggtagcccgtgggggtggcgaagggcttcccgaaaacgtactgaatgtcatctgcatggtcggcccccacccatttggggtagacgggcatccgagagggatgggaaaacaggtaggcgtaggtcttggcactcctggaggggagagaccacccaagtaggcagggtgctcactggggaccgatcagcccagagaccggacttggagggaggtcccgggcagtgggcagggaagtgtctggggaattcacatgaagagatggggcttcttacacccagggaagggaaagctgagaaccaaattcatggattcatgggttccacaatttc

SEQ ID NO: 17536 - DNA, 824 bp, Artificial sequence
  DNA replication origin
tccgtagtgtagggttcccagtgtgtgggcacagccgagtggcccatgttggggtccctgcagagtgagaagaggctgtgcaggggctggggactcccagggggctgaagccctgctctgcacctgcacgcctgagccatccccgccctctgagctggccctgggcaccatgcccctcactgcatactgggcactggctgtgcacgtgcacgggattggggctctgccagtaactctcatcctcaaacacacatggattccgatgcagggggaggttaagtgacttgcccaaagtccctccactggcaagtgagggaacaaggcctcatggtgggaggcccttcttggctgtggccctccgccctgcactcaacccacgtcttaccctgttttggcaaagttggtccagtaggcggtcatagccttagagactgtcctgtcttggggccggtagcccggagtggggtggcaaagggctccccaaagatgtactggatctcatctctatggtcggcccccacccatttggggtagacgggcatccgagagggatgggaaaacaggtaggcgtaggtcttggcactcctggaggggagagaccacccaagtaggcagggtgctcactggggaccgatcagcccagagaccggacttggagggaggtcccgggcagtgggcagggaagtgtctggggaattcacatgaagagatggggcttcttacacccagggaagggaaagctgagaaccaaattcatggattcatgggttccacaatttcagctgaatttatacttcacctccacaaaacattgtgaggcacct

SEQ ID NO: 17537 - DNA, 1095 bp, Artificial sequence
  DNA replication origin
cctgggcccacctcctccactcgaaagtgaggatggcaccatcaacgccccagagcctggggattgtgccaggtgatggggtcacaggttgggcccccacctggtgctgtaagggtaactgaggtccactccttcctgcagcttagccttgagagcaaagaaagacgccagacaggggaatgaggttttattcaggaagagctcaagatgggaggggagcccctggggttgcaccctctcggcctcttgagaccaaggctgatgggacactagaaactaatgactgcagcatctgagcttcctcggagtcatctgtgggggacacaggggcagcctcagtgtcacccaaggtgggcacgggcctcagagtcacccgtagggggtacgggggagcctcagagtcacctgagggggacacgggggcagcctcagagtcacttgtgaggggcacaggggcatcctgagagtcacccgttgcagggacgggggcagactcggagttgcctgtcgggggagacgggagtggcctcagagtcccctgtggagggcatggaactggcctcctggtcggtcactgtgggcagcgccagataggtgagggtccagtagcgcaggaagttggttctcaggctccgcttcatggagctgctgcccatcttcttggtgatctccaggtagccgctgttttccgtagtgtagggttcccagtgtgtgggcacagccgagtggcccatgttggggtccctgcagagtgagaagaggctgtgcaggggctggggactcccagggggctgaagccctgctctgcacctgcacgcctgagccatccccgccctctgagctggccctgggcaccatgcccctcactgcatactgggcactggctgtgcacgtgcacgggattggggctctgccagtaactctcatcctcaaacacacatggattccgatgcagggggaggttaagtgacttgcccaaagtccctccactggcaagtgagggaacaaggcctcatggtgggaggcccttcttggctgtggccctccgccctgcactcaacccacgtcttaccctgttttggcaaagttggtcca

SEQ ID NO: 17538 - DNA, 1211 bp, Artificial sequence
  DNA replication origin
gacccaggaggtagaggttgcaatgagtcgacatctggccactgcactccagcctgggtgactgaaactgtctccaaaaaaagaaaaaaacccctttggaaatagctgctcagtggaaacgggaatggggtcctgttgcaccaacatgaaggccccctccccagacctgcagagcgttagtgctctggggtaccctgtgtgctgcgttcaggcagtctggggtctttcagctctaaaataaaacggatttgcactcacacccctccctaccattcccagctttctctttccttctttgcccttctgacagggacagtttccggatctttcagaagctgtcagagatcttctcagatgagaacaactactcattgagccgggagctgctcatcaaggtggagtggcggcaggctggggcgggggctggggcgggggctggggcgggggctggggcgggggctggggctggggcgggggctggggcgggggctggggcgggggctggggcggcgggcggtggcattcgcttcttgctgggaaagttcctttcccgtgtgcgtgaagggggaagagggatctgtttggcccctgggtgtttgagggacagggccccagttaattggacacagtaagggtagcagtggaggttccaggaggagtagatgggcatcaggaccagcaggcctctggcttcctcgccggtccctcctgctgggtgggaaggggatgcggctcctgcccccacaccggcccagtctgtccccgggaggccaggctcctgacgctacctctgtctgctctacacacccaaggagagggcagcctgcctaccccagggacaggagctgcaggggatgccaggggccaggtggccagacctgggaggcagatttggaggccccatgtggcttccctaccctgccccgagaagagacactgaccagagaaccctgtagaattcttcccatggcaccccattagctgtggcggataccccagatgactgaggagaactttcagtgactaatggattcacgaggcctcagagggagtcaagtgtcactgcctggtgcccctggcatacccggtcagtgaaatggcatctagggcccccctcctgcgtggacacacacagagttccctacaggggagcatcgcagggggctcctgggacacctgtccctctccctccgtggcacagctccactggg

SEQ ID NO: 17539 - DNA, 1114 bp, Artificial sequence
  DNA replication origin
tggcttcatctgttctcaggttgtggtctgcagtccaaggccctgtacaggccccagtctacccttcccaggggcatgctggccttgactctcccagcccactgcctggatgctcacgtcttccttacactctttccttgggttgagctaaaatcctcctgtcacccccgggtcgcaggcgtgccctctggggactccctgggtgtctgtctcattaggaggggaggcttggccaagggggactgaggccaggcaagctgggagctccagccccacctcatgcctcctgctcttcccgccccaggagtgccggatcctcaagaacttctcgtcactgtatgccatcctctctgccctgcagagcaactccatccaccgtctgaagaagacgtgggaagacgtttccaggtgggcatgcctctgtaggagctcctggtgcaccagggacctcccacagggctggcatcacccccttagtgagcccatgggaggccacaaaccctgagggcagggacccttcactgacctgagttggcagcagctctgcctcagagctcggcttcctaagctgtcagatggtgggttgagccacatcagagattttcaggtattcgtgttgtagccacagaaccctcatccaattgaaatcaaaacctttgtgccaggcgcaatggctaacgcctgtaatcccagctacttgggaggctgaggcaggagaatttcttggacccaggaggtagaggttgcaatgagtcgacatctggccactgcactccagcctgggtgactgaaactgtctccaaaaaaagaaaaaaacccctttggaaatagctgctcagtggaaacgggaatggggtcctgttgcaccaacatgaaggccccctccccagacctgcagagcgttagtgctctggggtaccctgtgtgctgcgttcaggcagtctggggtctttcagctctaaaataaaacggatttgcactcacacccctccctaccattcccagctttctctttccttctttgcccttctgacagggacagtttccggatctttcagaagctgtcagagatcttctcagatgagaacaactactcattgagccgggagctgct

SEQ ID NO: 17540 - DNA, 1794 bp, Artificial sequence
  DNA replication origin
ccgggcgatcccagcgggccgcctccctcctctctcctccataggtgggggtcggggccttctgcagaaatcagccagcagggtgggcagtgggggctgccgccgcgccccgtccaacagtagggaccacggctggggttttgcgcccctcaataccgttccagggcctgctgtcaccaaggccgctgcagcccaggtggacctttttctgcggcactgtccctgtttacatcggtggcctgtgccttatttcactcagttcccacccagggcccgcagcgcgtcgttagcctttacgatgcaggtgtggaacaagtggtcgggaaggccaaatcctagaatcctcagaggtgatgagaccataggggccttccagacagaccctacttggggcagatgtggatctggtgaccagggacatcggggctgctcagagcggggtggggggggggtcgggggatggggtggagcagcaggcctccaacacgtgggaccagatgtcctggtggtgaggggaggagggtggcccaggcccagggcgggcaagacttgtttctgcttaactggaaagagtgccaacaccctgaatcggtaaggactgggtaggattcagagaagggagtggtgtacctgtgatggatggaggggagggtgactaggtgagggcgggggcttgtttctcgtgtgccctgggtctctgggtggtgccatctgcctcccacctgactgctgctgactacacagcagagggagtggaatccagagatgcccccctcgccctgctctgcctgggcacagggcctgcacagaggccattcctggatcgggggctcagggcccatcagagctttggctgggctgcagccttcacagtgaacctcctgagtccccgtgcggcatcgtgttgccttgctgcgtctccagtcgcttcatggctttagactgtggcgcgttgtgattgctggcgattgttagcctgagtctcgtgcctcttggtgtcccggtacctagacagggcctggatgcgacttgtttctccgcccagtgttgggcagagctcttggtgggggaacaccacacgcctgagagaccctttcctcctgagcttggcagatggccggaccagacgtgttccctcaaccctcatctatccagggctctggtcctcattggcggctggagagggacccctgggagggtgggggtgggaggctgacaccagcccagcgctcatctggctttcattacctctggcagcagctcgggctttgtgtgctgggagggtccggcggagcgctcacagtggccgtgcaggttccctctctccgtccctgaggaactgagggagaggcagagctgagccccacccctgcctgggggtcttgtcttccctctctctggccctggcgctccttgcccagcctcagcactgagatccagacctcgactgctatttagaaatcaaaggggaagcttctggctgggtcaggaaaaccaggatcctggcaggagaggaggccactgccggaaactgaacacaatgaccatttaccaagggcccaagggagggggcggggaagtccctgtccctcctgccaacaccccccgtcctggggctggtttcctggtgtctatgtggcctgccagagctgacgctgcgcacttggtccctgtcctctctggaaaccaccagacagtttctgccttcccccgcatccctgtttccctacctagcttccacccggtgcttccctctgggctgccagatctcctcacatctgggcttccgcttat

SEQ ID NO: 17541 - DNA, 1598 bp, Artificial sequence
  DNA replication origin
cgcgggtggggaggctccgacgcaccccccgcccgaccgccccagctcacccacctccgggcgcggcaggtcggggtctagctgcgtgaagctgtgcagcaccaccgggcagctgtcggggacgcccacctccaggcgcacggcgtcccacacgctgcggctccgccgggagcccggaaacagcggctcggcgccgccagcaggcccggccgcctcggcccacatgcgctgcaccatggaaggctcgcagcgcgggcgcggggccggcccggcgcgcggcgggggcggcggcgcggcccgcgcggctgggctttgccaccgctgtgagcccgcggcccggccctgctgatgtcaggctggggggcggggccggaggggaagagggtggggccggggaggggcggaaccggagagtccgagggacgcgtgcgtgcgcgcgcccgcggccccgccctcgccgaggtcagacccggggcgggaccgggagcctggaggggcggggtctgaacaaagagggcggggccggggaggtcgaggggtgcgcgttggctgggtctcccggaggaccggctgtcacgtgtgtcgtggggccttgggtaccccggttaggcaccgtttgcgtgtcacgctgctgcagtgcgtgtgttgcgtagggctgaaatgtgtacgtgctgatcatgtgtggggaagccgccctggagtcagctaccccgaattccagcaaagcctctccccaactctgtggccttccacaagttgcttaacccctctgagcctcactgtttcttcatctggaaaatctgggtagtgaaaatgacttcctcaaacagttgcggggaggatgacattacgtaatggacatgaagcactcagcactgagcacctgcacctgactacaggctcaggcggagtttggagaggctgaccatgtgttcagtgaccctgtcagtgcaattggaaatcctgagtgtggggctgtgtgtgcagtgggggaaagggtcagagagtggggccctacctttttggggcaaagccccacactatccccttacagacaccctcagaggaggggaagccagggaggtgggggagagcggaaggcaccaaggttggggctgagaggcatctgacaaggaggaaggcatcaagagtgacaacgctgggcagagcacatggctgcgtggcctgtcagctggggctgcttgtggcttggacatccctggtctcagggtggaagtggggctgctggggctgaaggggaagcagggacagggacatcctcaactactctttctggaagccagtgaggaaggaagacagcctggggcttaacagcagggccaggagaatggatgaatgaatgggacccttcctcatgcctcactcatcactgggcctgccctggcctcagccttcagtcttcatggaggccagcaattgctgccagcagccctggccatgccaacctccccaggtctggtccgtactattgggcctcagtttctccatctgtaaactgagagggcgggaccagacagcacattccacgagcacatcttgcccccttcccaagtgccaatcctcagacacccacgaaa

SEQ ID NO: 17542 - DNA, 904 bp, Artificial sequence
  DNA replication origin
cgcccacagagggccaccccaggacctaggcaggctaggaatggtgacgtcagtgttgggaaatgaccaaggagcgtgtccaggcctcacccttttcatgtcctccccaggctctaaatatagatcacaagagacagaaaggggtcagtgacctccacctgcccaacaggaggtgacaggttttccaccagggcctgacctgagtcagggtacctggctgccattcctcccggccttggccaagcccaggttggaaaaggtgatggccaaaggccacagtcacccagtcactgccctgtgcccagttcccgctctgaactgctgtgtgtccggcagcccccagaactgcaccccaggcccaaagcccactgtctggggccctgcgttaaggcaggcctgggtcccgacttgaaggtccacaggggcagcttttatgatctgcctctcaggtaccggccaaggatgtactggccaaggaatgggtggaaggagggacgcaccagccagacagaaggggcggcatgaagaaggagctgcagcagttctgctgagagggaacctggagtggggagctggggccacaccaagccagtggtcttctgcctgagggcagtggggggctttgcgggatcaagaccccactggccgcggtgtctgggtatgggagcagggagaagagggaccacagagattcagcctgaacacaccttttccctaaacgagacagctgctcaggggccagagagtgacttaagatgcccaaggaatcgctcctcgcctccgtctgcctgctgcctccctctcccgctgtccctcgctgtggtcctcaggctcactcttggttcttgggctcagtttccatctgtgtgtccccctccgtctcttcctcctctgcttccctcca

SEQ ID NO: 17543 - DNA, 1162 bp, Artificial sequence
  DNA replication origin
cttgcgcacagtgactcaaccttgaccttcgaggaacagtagagccaaccaggctgtgaattggtcagcccaggactgaaattctgatccccagggactctggaaccctgggccaatgatttagcatctctgggccttagtttgctccttataaaatgggcacaagggcgctggaggattccacaagaactcagcatgggctcggctcatggccgtgcttggcggatgtgcaatgatcatttccagtggggattgaggagttcaggtgccaaagggttacatgcctgccccggtgccaggcacataacagacatttgatcaatgttggtggatgctgcccctgtgccaggagtgccatagcctgactccatccctggcagcaaggtccagatggcagtccggggtctgcccagtgctcagagtgtggcttgtaactggatcctagcagatagcttggaaatgtttgctgatgtagaagcacacacagatgggtactgcaaggcaggcccggtcccgggagaggggaccagcgaagaggtcactgtctgggtacacactattaacgggagagacgccctgtgcagacaggcaggatctgggtgaggcaggcggcaggggttggtatccgagcagggatccgaggctgtccccagcctcggcctctcaccccggtgttgctgactgcctggccatgtgactgtgggcattgtgtggtgtggttcggctgccactccaggtttaacagggagcttaccacgtggtttgagggggtggggagggctttccctgagcctcggtttccttgtctgcaaagtgtgacctcgcagcctagccccgtagaagggctcagtggccgagaaggtgtttcctacagtgtgcgcatgtttggttgggtggggggcttaaagaggccctggaaagaagcgctcaactttctttttttcttttttttttgtttgagacggagtctcgctctgtcacccaggctggagtgcagtggcgccatctcggctcactgcaacctccgactcccgggttcaagcgagtctcctgtctcagcctcccgagtagctgggataacaggcatgcggcaccacgcccagctaatttttgtatttttagtagagatggggttttacatgttggccaggatggtctcaaa

SEQ ID NO: 17544 - DNA, 1115 bp, Artificial sequence
  DNA replication origin
gtgggatgggagccctggcttggcctcaggggacccagacaagtgggttccttaactcctctgtacccccattgcctcctctgtgggcctacggatgtgggggagtatgagatgttcctgaggcccctggcaccgcatgggcaggccctccgcagatggcagccaatgtctgctccgcttcgcagaagggagatggccgatggcccaccagctcccgctgcccttggggagccagggtgtgggtggagggcagggacacttgcaggccctaagttgaatccacaggtttttttcaggtaggggaactacggccccgaggaggcgagtaagttgcccaggccacgcatcccactctcccccgacccccttcttccctgaggccaagttccaggccctgctgcccagttgacaggactggagttcaagggtgaagcagtccacctggccccaggccctgggtggctggggaggtgacagctgggggtagtgggcaggtgggtagtgcccagtgtggaaggtctcagctggcggcaccgcctgcctggtccccctgccccctcgaaatagccgcttgccgttcttcaggactccatgaggtgtttccttcccagcttctggggtcggggagtccctgcatggagccctgcctcctcccctctccgcagccctgaggagattgctgtctggcagatatgcagggagcagggtgtgtatccagggcctctgggcctgcaggggcagcggctgtgtgctgtgggatgcggtggggcacatgtgcattctagcacgtgtgttgggggcaggtgcatctctctgcctttgggtgaccctgtatgtctgcagcatgcatgtgctcagatgtgacaagcttgacagtggctgagggagcacatatatgaaggggtatgtgtggctgcgtgtggggacacatggctggtgcctggggagggacagcacgttgccacagtgagtgtgggagggagtgggggtttgcattttgcctttttaaagcactagacctggacaggtgcggtggctcatgcctgtactcccagcattttggaagtcgaggcaggtggatcacctgaggtcaggagtttgaggccagcctggct

SEQ ID NO: 17545 - DNA, 762 bp, Artificial sequence
  DNA replication origin
aatccagtatgacctcatccggattctatccgcacagaccctatttccaaataagatctcattcacgggtaccagagatctttttgttcagggacacagttcaacccgtaacaggagtattgggaatgatccccctcccaaaggccgggtacccgcgtgcctacggggactaggggagcagcggggagtcggaagacatcgcaggaacccagcccccagccagggggtgtgggggcgtgagcggagcccgcctgctcctcagcttggcgcgctctggcggcagcaccagcaggtggcgctgtgccctcccgtgcggccgcccagcccggcgcggagctgccgcagacaaaggtctcgctttcgggtcgcgaggagcttgcgcacagctgtaaacaggccaggggcacggccacctcatgggtgacacacacgggaggaaatcaaaccaggcggggccgaggcggggtgactgggtggcgactttgcgtcggaggccggcggggggcggaggaggaggtgacaggggtggcgaggaggaccatggtttgcagaccgtggtgtcagcggggcggaaaggaaggcagggaggagggataggggacctgcgaggctgcaggggccaggagtttgcctttcgtttggttcctcgcctgcaagctgagccggcctttctcaggcctctccagaggccgtgcggctgatgacactgcggtttgcagatagctctcctgttactgcaggcccaggtctgcgggtgctcgg

SEQ ID NO: 17546 - DNA, 957 bp, Artificial sequence
  DNA replication origin
atggacagggcacaaaagcaaacaggcacagaaaggaaaaagcagtgctgcagcgaaaataatgccggggctgccatggagggctggggcctgctgggtggggatctgagaggtctcgctaaggggacatctgtgctgtgaccagaagacaaagcatgggccagccctgcacgagtctggacagtgtgatggagaaggctcagcaggcagggctgggaggcagaaatgagtttggccagagaggagtgagaaaggaggccagtgtggcccaagtgagctgggggtgggaggggcagcccaggggcctgtggacagctatgtgacaacactaccctaatgtacagcttccagcaacagacattgatcatcacacagtttctgtggacccagatccagggcagctcagctgggtgcctctgcccccaggtctcaagggaggctgggactggggtctcatccatggctggactgggcaggacccgcccccaggccattctcatgttattggcaggattcagttttgactgagggcatcagttcttctgtgactgttggtgggggccctcccttggttcactgccatgtgggtctctctgtagggcaggcagctcacggcatcagaactcacttccccagagtgaggggtgaaggtggggaggaaaacaagagcaaacaagcaagacagaagtcatagttttttgtaaatcttggaagtgacctcacatcacctgtgctgtgttctgttggtgagaagccagtcactaaatccaatcaccctcggaggaaggggatcactcagcaacttatgtaccaggaggcagggatctctggggccagtgtggaggctgcctgggacagtgtctgagaggaggcagtcaggcctgattctaaacataacggaggctgggcgcggtggctcacacctgtaatctcagcattttgggaggccgaggcggg

SEQ ID NO: 17547 - DNA, 967 bp, Artificial sequence
  DNA replication origin
ttcttatttggaagtggggccagagccgttgccctggttggagtgaggaggcctcacgagtgaactggacaccccaggaccagcagagggaaagaggggagcaaatgaagcttctgaggcgccttgaattacccctggagcctgcaggttctgctcctttgaccccctgggactcaggagagctgctaccttgacaacacccaaacaaaggtgtgtgttttgttttctgggttttctgcctgaggctgctgctgctgtgctagtgccggccaccagggggaggcagtgcccactgtactcattggagcaactggagtcagggagagcccggcagggtccctctgggggaccccggcctctacccaatgcacaccccccattactagcatccctctccacaatgttagctgctcagaggcgggagggggctccaagagcttcctctttcccttcagcaggtgtgcccaagcactcaccctgggttgtgggggggcagcgttgggcttgggtgtggctctgaaagtgacccaggggggcctgccctccagagctggcagtctggagggggcgatggacagggcacaaaagcaaacaggcacagaaaggaaaaagcagtgctgcagcgaaaataatgccggggctgccatggagggctggggcctgctgggtggggatctgagaggtctcgctaaggggacatctgtgctgtgaccagaagacaaagcatgggccagccctgcacgagtctggacagtgtgatggagaaggctcagcaggcagggctgggaggcagaaatgagtttggccagagaggagtgagaaaggaggccagtgtggcccaagtgagctgggggtgggaggggcagcccaggggcctgtggacagctatgtgacaacactaccctaatgtacagcttccagcaacagacattgatcatcacacagtttctgtggacccagatccagg

SEQ ID NO: 17548 - DNA, 1847 bp, Artificial sequence
  DNA replication origin
cgcgtccccgagctcacgcggcggggcgcgcccctcgcacctgcgggcgggctggggcggggccgcggctgtccccgcccacccgggcccgagcccggggagccggggcggaaccgagcggcgaggcccgagcggccggagcgcggcgcggcgcagacaatgggagcggcgctggcggctgccggggcggccccgagggccgcagagtcctgggcccggcggggaccggaggccgcgccatgagccccgcagccgggcgcacccctgcgccgcgcgcgggcccaggcgagcggcctctgcgagccccgggtcccgccctggggccggcgatgtgccaccgaggctgaggatgatggtagattgccaggtgagtgcgcgccgtccccagcctcgcgtcgcgggtggagggaggaccgtatgccccagcccacacccaccggggggagggagcccggcgccgcgtccacgctgagcgtgcgcttacgcagctccgcgtccaaccccgcccgggacagtagggaaactgaggacaggagaggggcagggactcgcccggggcacacgaagttggcggagtccagagatgaagggagggttccggcctcttaggccaggaagggctcggctcacccttcccgtggggtttgctttgggaatgacagcctctaagatcctggggacccctgcccatctcccatgtgggctcatttgcctgggcttctccgcgcacgtacaggcgcaggcctgcgcatacatgctcacacacacgcagacacacacaccacacacttcctggggctcagagtaggacgggacgctggggaagtgactgggggaaagaagaaagagggcgggggctactctgccacgggcaggggcatccagtacccagcaacatgcctggggccatggcacggggtggggggcaaggggaggacacgccagcttgatgggcggggattctccaaggttcccaggatctgtctgggctggggcagcctggagaggacagattgtggggttctgtgttcaccgctgtgatcacctggaagcaggaaaagaccccttcagtgtggacggggctgtaggaaaggaagcctcaaattcctgctctataaattggaatgtttggcctgggtgactccaagggtcccacaggctcgtagacgtgtctgtcggccttaggtctccactggggatgcccccactacccaccgaggtctgtggaaaatgccttcttcttggaggttcttctgagcaagagaagccgggggggctgaagggctgagggcctggggtggtgcagagcgtggccaagcactggacaactcttgtgggacaagactgtccttgttggagcctcagggttcttatttggaagtggggccagagccgttgccctggttggagtgaggaggcctcacgagtgaactggacaccccaggaccagcagagggaaagaggggagcaaatgaagcttctgaggcgccttgaattacccctggagcctgcaggttctgctcctttgaccccctgggactcaggagagctgctaccttgacaacacccaaacaaaggtgtgtgttttgttttctgggttttctgcctgaggctgctgctgctgtgctagtgccggccaccagggggaggcagtgcccactgtactcattggagcaactggagtcagggagagcccggcagggtccctctgggggaccccggcctctacccaatgcacaccccccattactagcatccctctccacaatgttagctgctcagaggcgggagggggctccaagagcttcctctttcccttcagcaggtgtgcccaagcactcaccctg

SEQ ID NO: 17549 - DNA, 937 bp, Artificial sequence
  DNA replication origin
cccattgtctgcgccgcgccgcgctccggccgctcgggcctcgccgctcggttccgccccggctccccgggctcgggcccgggtgggcggggacagccgcggccccgccccagcccgcccgcaggtgcgaggggcgcgccccgccgcgtgagctcggggacgcgctcgggggcgcgctcaggcctccctcccgcgggccgacgcgggtgttccccccgcggggcagccgggcctgttgtccaaggccgggcgcgcacacggggcctgcgcgggaccgcagacagcgcgtgcacgtcactccgcttcgccgcgcgcacgcgccacgctcccagcgccatgtgcggccgatctcacgtgtccgtccgccccagccgcctgctcagtactccccaccccgctaggacctagggccaacctcgccccagccaggcgggggccgctgagtcggcgcgccggcgtcaccaaatatacacgttcaccctggcgcccagcaccccgatgccacctgctggactcggctcggcggatggctgggagctgggggacccgaggtgacagcgaactcagcctgggcagggagaaagtcaggtctccccttcccctcctcttccccacctccctccttgtcttccctgacagcacccgggaccacaaggtccagctgcagcttcagctggtgtaagatggggctcaagggagcctgggggaaggaggcctcacactggggttgagcgactgttgggggtagtcagtgttattagggctaactgatttcgtccctttttattttttatttacttttgtttttgagatggagtctcgtttgtttgttttttgagacgaagtctcactcttgtcccccaggctggagtgcaatggcgcgatctcggctcactgcaacctccacgtcccaggttcaagcaattctcctgcctca

SEQ ID NO: 17550 - DNA, 838 bp, Artificial sequence
  DNA replication origin
acagtggctcacgcctgtaattgcggcactttgggaggccaaggcaggaggatctctggagcccaagagttccaaaccagcctgggcaacatagtgagacttcatctctacatagtttttttaaaaataaaaaaggccgggcacagtggctcacgcctgtaatcccagcactttgggaggccaaggtgggcagattacgaggtcagaagttccagaccagcctggccaacatagtgaaaccccgcctctactaaaaatacaaaaattagccgggtgtgatggcacatgcctgtagtcccagctactcgggaggctgagacgggagaatcacttgaacctgggaggtggaggttgcagtgagctgagactgtgccattgcactccagtctgggtgacagagtgagactctgtctcaaaaaaataaaataaataaataaatcaaaagggttggccaggcaaagtggctcacgcctgtaatcccaacactttgggaggccgaggagggcagatcacctgaggtcagaagttcgagaccagcctggccaatatggtgaaactctgtctctactaaaaacacaaaaattagtcgggcgtggtggtggcagcgtgcacctgtaatcccagctacttgggaggctgagacaggagaatcgcttgaacccaggaggcagaggttgcaataagccgtgatctagccactgcattccagcctggtcgacaagaaggagactgcggctggtgcagtggctcatgcctgtaatcccagcactttgggaggccaaggtgggaggatcacctgacgtctggagtttgagaccagcctggccaacatggtgaa

SEQ ID NO: 17551 - DNA, 1031 bp, Artificial sequence
  DNA replication origin
tggaaaagctggggccagccctgagttcattcttccttcacctgtggtttggctggcgagcagggacagacccgaagagcgtggacagatggagtgaccagttggaggagacagactgggctggagaggcctggagtcttgaaggggcactgagtgcctcctgggcagaggggcaggaatggaaccatggcctctgtgtccctcatagggagcacctgctccaggggaggggttctgtgctgaaggagtaggccctgcctccgaggagcttctgttgaaagcacagagagggccatggagcgctggactcagctgggtggatggctgggagatgggggacctgaggtgacagcagactctgaggcctgggcagctccacctagcaggggagaagtcccccatacccccctcaccccacttacacccagctttacccctggcacaccctcccgggtgggagtccctgactcattttcagtagaggaaactgagactctgagaggtcaccatgagcttgcctgtgatgtggctcagctgcaggtttgaacccaggtcatctgggttcaagactgtgctctgcacagggtgggaggagtgcagctctgaaggtgagtgcattgtggaggaggatacagggaggggcagtgctggcagggggctctgagaggggcaggggcttgatggggtccctgggtcaggatggccccaggaggctagagttggggtatagggaccaggtcacacagggttctgaatgccaggctaggaggcaggggtcaccgcaggcctgtcccagcagggggatcaatatatatggggcccaagcgctggactcaggggatacctggccagcgaggccccaacacaggatgaggcctctgatgaccagctcggggatgagtgacggggaagagccatgaagtgggggtcaccacgcacagcagggcctggccacttacagctgagtggcctgcagtgctggtgccttggctctggtataaaattgaatgaagccgggcacagtggctcac

SEQ ID NO: 17552 - DNA, 850 bp, Artificial sequence
  DNA replication origin
tgggtgaagtggagcatgctggcagagccaccacactcccaactgtgtagaggggtatggagcccagcagccggacaaccctgggagctcccgtatccagggtcactgcagccctgtgaggtcaccagtgggcgtgggactctgagccaatggtgcaggccaggattagagggcatgggaagatgacctctccagtctggatccagaaggacttcagaggcctacagtgtggttctgtctgcctggccacgcagagatggggtggggtatgggttcagggcttggcggcctggtgctcaccgccctggagacagcagcatctttttcatggaaggagaagacagaaaggagggtggggtagactctggtcatactggaacgggcaggcacccacccacttggtcacccgtggaaaagctggggccagccctgagttcattcttccttcacctgtggtttggctggcgagcagggacagacccgaagagcgtggacagatggagtgaccagttggaggagacagactgggctggagaggcctggagtcttgaaggggcactgagtgcctcctgggcagaggggcaggaatggaaccatggcctctgtgtccctcatagggagcacctgctccaggggaggggttctgtgctgaaggagtaggccctgcctccgaggagcttctgttgaaagcacagagagggccatggagcgctggactcagctgggtggatggctgggagatgggggacctgaggtgacagcagactctgaggcctgggcagctccacctagcaggggagaagtcccccatacccccctcaccccacttacacccagctttacccctggc

SEQ ID NO: 17553 - DNA, 1729 bp, Artificial sequence
  DNA replication origin
tggaggtgctaacatcagggtggccttggggcccagagagttagggactgtggaaagacacagggctgggagtcagggacctgggctgtgtgaccctgggcagcgtacccaactgctctgagctttttctgtgcaggtggatagtagtgcctagctcactggagtttggaggagcagatgagaggtattgtaacatctgcaccgtgcttgcactcaggaggtgctcaggccattgttcataacaacgtggtcttgccctttttaatgaccctcatttattaggggcttggcacatatgaataatgccaggcttctccttggtgtgcgttaactcctggtactcccaaccctgctgggaggtggctatcattatccccactttccatatgaggaaagggaggcccagagatggggacgaagctgccccgggtcacacagtgtgagagccagggctgggatgagacttaggctttcacaggggagggtctcagtgcccacggcccccctgctgccaggcccacacagctgctgacactcacaccctggttggcgcccatcgtctccgagggaaccttcaacccagagcttctgcagcacatctaccagccactgaacctgaccattggggtcacggtgtttgccgtggggaagtgagtagtgggctggggaaggggagggaggtctccctgagccacaggagtttatagttgggaagagaccagaccagacgtgcacacaggaccctgctgggcacccgggaggctcggaaccaggtgccaagcagatagaaagtacagtgtagggtgtgatagtgggatgggagcttcctggagtaggggatctggctctagcatagacaggatgcagagtccaggtgaggggacagcaggagcctttgtcaggaggcccccttgcccctccctgtttcatctagacccctcctctgcccttgtctctcccatgaccccacctggccttcctttaggagctgccgcttggcagccttcctctgggcctctgggactccttcctggaacttcctggggccctaaagcatgaccagatgatgaatggtccacctagggtcaggtgacccccttgtccaatgagttttggcctgggggcagggctgtgtcaaccacacccccctccatgcccccagcatctagctcaacttgccttcccttgattcgtccacttacctgcttcttcactactttcttctctgtgatcctcaatgttcctgcctgtaaaatgggcatgcttatgcagatcaaagatcataagaattcttagaacgtcgctgggcacttagaaattgctcagtaaaagttcacctggcctaggagcataagaatctctaccaggaacatgcttacaacagccgtaagaggctggtactagcattttgggaattggacaaatgaggacccagagggccagagcagagtgacatcttgagatggggagctggtaagtggaccccagcctggctgaccccagcacacagtggggaccctggcaggctgctggtgtagcagtgggtgaccgggtgatcatcactaggtacactcatttcatccagtccttcctggagtcagccgaggagttcttcatgcgtgggtaccgggtgcactactacatcttcactgacaaccctgcagccgttcccggggtcccgctgggtccccaccggcttctcagctccatccccatccagggtcactcc

SEQ ID NO: 17554 - DNA, 1984 bp, Artificial sequence
  DNA replication origin
acataaatactattgcatttatcagaaacatgaacttaggaatcaggaaccggcagatgaagtgaacttaaatactctcctgtctccccaactgtgagcagccctcagggcccccagttctcctagccacacccatacttacaagatctctgggcaggggagataataggggacataggagactggcagccagttctcaagatacaccctgtgaataaaaaaaagaaaaaaaatctgttgatccactctgcaccagaggctgaaaacgcacctcatgcacgtcattgggagtgcaggtctcccacagtgcattaggaggccaggtcccctgtcattctgtaggtctggctgaccttggaggacaaagcctgctggtattcctggcatgtgtcacagggcctgccatgcagtcattcattcacccatagagtcattcattcctagggagtgtatattcttgatgccaggccccccacacaaacagcagggtgaggggcagccccaggagcttcatggaaggacagaaacagagggtgaatttgggagcgtgaacggggattccccatcaacattggttgaaggatgatccaggcagagaaaagagcaagtcaaaggccaggaggccagtacaaggcagaattcagaagccggagacactagttgggtcttgttggggctggggttggagaacaggtgagtcaggaggggttggtgggatctggaatcctatgaggagatcaaggttttggggttgatctgcagagacagggggagtcctgggtggggatagagacagggagagtcctgggtggggatagagacaggggaagtcctgggtggggatagagacagggggagtcctgggtggggatagagacagggggagtcctgggtggggatagagacagggggagtcctgggtggggatagagacagggggagtcctgggtggggatagagacagggggagtcctgggtggggatagagacagggggagctccgtggggcagactcaccacaggacactgaggcttgtgcccgccaacaggcagaaccccagacccagggccagtctccggcgatgcattgctgggggctgcacctgagcctgggcacttgtagagacccccactggcctgggcggatgaggctgtcccctcgcagggatgtcaggctctgagcctggtctctgaggtcccaggaacacctgcaaaggaacacttttgttgttttgagatagagtttcactcttgtcaactgggctggagtgcagtggcgcaatctccattcactgcaacctcttctcttgggttcaagcgattctcttgtctcagcctcctgagtagctgggattacaggcacaagccaccatgcccagctaatttttgtatttttagtagagaagaggtttctccatgttggtcaggctggtgtcctgacctcaggtgatccacccgcctcggcctcccaaagtgctgggatgacaggcttgagccactgcaccgggccaggaatgctctttatggggagacggtgaccccagccctgcagccctgccctccctcggtcacccactgcggtcatgtggactctaggtcccgctggaccccgggctcagctctggcagctctgggaggcgcacggtggcagtggctcggtgctcagctgttgcttccagctgtcctttgggagaggggctgggaccgacttcgcagaggccgcgaaggcggatccctgccttggctcccgcgtctccgtactaggtccattgtcagaggtgagccgaggccgccgggaggggtgcatgggccagtccaccgtccgctggaaatcaagcaccgaggcacagcgaggacacatgcagtcccagcgcaggatgcgcgggaaggggcgcccaggattccccgaggggagcgaggtggccgctgtccacctctccgggaggcagggcccgggttctccacggaacgatgggaacgcgcc

SEQ ID NO: 17555 - DNA, 778 bp, Artificial sequence
  DNA replication origin
cgaagaggaagctctcagccagagctgagtgagagcccgcgggcgggagggggccgggcgcgcgggagccttccctgcaaaccccgggcgttccaggagcagggaggcacacggatggaggacaggagaccaagaatggcataaaatttctccgagcagaaggaacgccgcagagtgtgagcgtgagattgctagcgctcacaaattcaggcaaggcaggtgaggagagacacaggcctgcgcatcctggaaagctcttggacttaaaagatgaaaataaatgatcctggaaagatctcgaaagatcaagaatataaagcgcttttgtttgtttgtttttaataaaacgaacccctaaacgcacacagaaaggaagaacaagcatccatggattgttcggagaaaaaggttgatatccaagaatgcggtaccaggccaggaacggaagaaagtgaagtgacctggggggaggcgagcgctgatccgaggagaggagccaatgagaggcactcaccaggcaagcgggtgggcgggggcctggcgctgagcacagacaagtccaagggaagatgcataggagctgatcgtgcagagatggcagcaagtggcaacggaatccccctgcattgacaataaacctccaggaatccccctgcattgagagaataaacctcccggctctggttctgttccgtgtctgttagcggggtttaggggtgagttagggagagggcactgccaccagccctcggatatatttctcctgctgttcactatg

SEQ ID NO: 17556 - DNA, 897 bp, Artificial sequence
  DNA replication origin
gtgcccattgccccatccacgtttcgggtgttgggaagagtcaccccctgccttggagggaaacagcctgggcatcctgaagctcggtggggtggggggcagtggaattttcaggttgccgggtcagggccatgcaccaggtgagctgaggatgggccatgggtgtcctgggagccgctgcccgcgtgtctcctgttttccaggagggaggataggtgcatccagaagaaaatcctgatgcggaagacggaggagcctggcaaatacagcgcctgtgagcccctcccccactcccacccccaccctcccccaccgccaaccccagtgcaccagcctccacaggtagagagtgcccaggctgcccttttgccagggccccagctctgcccacctccaaggaggggctggcctctccttcctggggggctggtggccctgacatcagacaccgggtgtgacaggcttgtccgcagtcgagatggaccagatcacgcctgccctctgggaggccctagccattgacacattgaggaagctgaggattgggacaaggaggccaaggattaggtacggggaggctgagggttagggatggggaagctgagggttaaggatggggaagctgagggttaaggatggggaggctgagggttagggacgggggccaagggttagggatcgggaagctgagggttagggatgaggaggccgagggttagggatggggaggccgagggttagtgctgcggaagctgaggattagagatggggaggctgagggggaagatgagggttagggacagggaagtggggcaggagcagctgctggagctgggaaggccggactctagtcctggacgtgctctggccttgtggctccattacttgcattgggac

SEQ ID NO: 17557 - DNA, 1521 bp, Artificial sequence
  DNA replication origin
aggcccaggagacatgagccagggccattttaactgtcagtaatggccacaaagacccctaaatagccaaagcaatcttaagcaaaaagaacaaagctggagacaatacactacctaacttcaagatatactataaagctataataatcaaaacatcatggtattggcataaaaacaaacagaccaatgaaacagaatagagagcccggaagtgaatccatgcatttacggtcaactgatttttgacagaaatgccaagaaacacaatgtggaaacgacagtctgttcaataaatgatgttggggccaggtgcagtggctcatgcttataatcctagcactttgggatgccgaggtggaaggaccacttgaggcctccctccaggctccggaagagacctcctccatgatcccttgtctaaggggaaggttcctcaggaccttaccgtgggggctgaaggtggccacccctccaggaacttatgccccaggcgctgaatttgggctgcctaagtctgtgtgcgtgagtctgtgtttgtgtgcatgtctgcatgtctgtgtgtttgcatgcatgtctgtgtgtctgtgtggtctatgtgtctgtgtgtacacttctgtatgtctttctctgtgcatttttgcatgtgtctccatgtgtctctgtgcatgtctgtgtgtctatatgtctgtgtctttgtatctgtgtatctgtgtctgtgtgtctttgcgtgtctggtgtatgtctgtgtgtgtgtgtatgtctgtgtatgtaacggtgtgtctctgtggcggggggtgtgtgtgtgattgtgtgtgtgtgtgtgtctgtgtatgtaatggtgtgtctctgtggcggggaggggctgtgtgtgtctttctgtgtatgtgtgtgtaacggtgtgtctctatggccgggagggggtatctgtgattgtgtgtctgtgtgtgtctgtgtatgtaatggtgtgtctctgtggcggggaggggctgtgtgtgattgtgtgtctgtgtgtgtctgtgtatgtaatggtgtgtctctgtggcggggagggtgtgtgtgtgattttgtgtctgtgtgtgtctttctgtgtgtgtctgtgtatgtaatggtgtgtctctgtggcggggaggggctgcgtgtgattgtgtgtctgtgtgtgtctttctgtgtatgtgtgtgtaatggtgtgtttctgtggccggaagggcgtatctgcgattgcgtgtctgtgtatgtaatggtgtgtctctgtggcggggagggtgtgtgtgtgattttgtgtctgtgtctttctgtgtgtgtctgtgtatgtaatggtgtctctgtggcggggagggtgtgtgtgtgattttgtgtctgtgtgtgtctttctgtgtgtgtctgtgtatgtaatggtgtctctgtggtggggagggggtgtgtgtgatttgaggtggggacggggcctaggcttcagttactcacaacaggacggacaaaggaaacagagtttacccgttctgctaaaaccaagggcgggag

SEQ ID NO: 17558 - DNA, 1753 bp, Artificial sequence
  DNA replication origin
cagggccccaaggtaccagggccacgaggggcgcgcgggtcccttggggatgcgcgcgaggaggcgccgtcccttcctagcaggggtccctggggacccgcggccgcctcccgcgcccctctgtcccctcccgtgttcggcctcgggaagtcggggcggcgggcggcgcgggccgggagggggcgcctcgggctcaccccgccccagggccgccgggcggaaggcggaggccgagaccagacgcggagccatggccgaggtgttgcggacgctggccggtgagtgcaggcctcggccccgggtgcccgcgagggagccgctaccgcagggaatgcggggtgcacccgacagccgggccggggtgggggcgctcagggctgcgaggcttcgggccggccgccgccccagcctccgagaccctgcgtcctggggagccggcgggcaggtgggctcggccgcgctgtgggtgcctgggacccgcagggaggatgggcgcggtggcgcggcctggcggggggctcgtctccggggtccccgggtcctggtgagagcggggtccctcgacgccgtggcggtctccagcctctcctcgcccctccacgctccccgccttccatgagctgctattttcagcacctaccgcccgaccctggactaggacaaggctctgggctgccctgcccgccccccagcccttccctcgggcacggcggccaggcgcccgggttgaccgggaacagcctccataccccaaacgcggaggcgcctcgggaaggcgaggtgggcaagttcaatgccaagcgtgacgggggaactgtgccccgggccctcaggtgatataggagttaagaagaaattattgaggcaaccagatgcggtgactcaggcctgtaaccccagcactttgggaggccgagggtggatcacctgtccttaattttcttggcgccagaagatgaattgagtatttacccagacaacaacgtcgcttcagagggagggatgcagaacgcagggccacggggtgcaggctgcaggccagtgaaccccaacgccaaaggccagggagagccgggtggggtacccagagccagcacacagccctttaatttagaggagtgctgtgtacacatctggggagagatgttttactttgatttggaatcaggtggcggataaggcatactgaggcctgacttggtgagggctcctgccccggaggtgcagccctggaggagcgggaggcagaggagtggaaaattcatgaagaaaaccgggtatggtgtaggtcgaggccctgccctcagtaatgctcaccatttgtcagtgtttactgtgaggcagcactgtgttcagtatcgctgagttctcaggaaggaacggtaaatacttcccgggtcattctttcacccacgggaaaacaggtttggagagatctgggacagtgctctggtcctaggcaggaagggctgagtggggcctgggactcaggtctgactgcaaacacctgcctcctccctgtgctgccagcgccttccgggttcttccctgtccctcctttgtggtctttgttttcccttttttgtcttaatatgtttcaacggatgtatacaataaaccgcacatgaaaggtacagctggatacatcttgacccagtcaagatgatgaacacagctgccaccccaggagtctgtcctgccccacgggttatgctgtcttagttggtctcatgtcagggagccttggaggacc

SEQ ID NO: 17559 - DNA, 1117 bp, Artificial sequence
  DNA replication origin
gcgcgcccctcgtggccctggtaccttggggccctgtccccgcatcccgccctggggccgagcggctccgggtgcccctgaagccccgtccccgggggccccttgacaccctgtctcccgggcgggggcgaccccctgacatcctgctcccccggggaggcgggggagacgaacccgtgaagctgcggccccagaacccacgatccccggccttccggctcgcgcgcgccgcagcctgtagccctccagccccgcaggaccctgtgccccgcgcccgcgacgtccccctaggcagagtcgcttccccggccccggctcgcggccccacggagctctgcgtcccgcagactgaggaaccttcgcgttccccctgcgagcgagtccccctccggcgcccgcgccgggccctgaggcctcttcgcgcggtccgtggacaaagccccgctccgccccgctacgacccccgcccttgcctggcgtccgctcgaggaagctcaggagagggcggcggcggctgcagggactgggagagcgcgccccgctgcgaagaggagttacctcccgaagggtcccagaggcttcttcctgcttttcctgatatctctcagaggagtttacactgataccccgttcacaggaccctgatcccgtcccgccctcccggggcaccgttctcatctccgtgaaagctgggggcatctttaatgcttcctttccctcccaccccaagtccagttcgccagctccgagacgtgtccctaaacatcacacagaattaccgtacgaggccgggcgcggtggctcatgcctacaatcctagcactttcagaggccgaggcgggcggatcacttgaggtcagaagttcgagaccagcctggccaacatggtgaatcctccatctccactaaaaatacaaaaattagccggtcgtggtggctcgagtctgtaaccccagctacttgggacgctgaggcaggagaatcgcttgaacttgggaggtggaggttgcagtgaaccaaaatcgcaccactgcactccagcctgggcaacatagcaagactccttctcaaaaaataaaaataaaaataaaaatattattaccgtatgagctggcaa

SEQ ID NO: 17560 - DNA, 1495 bp, Artificial sequence
  DNA replication origin
agtgcagggctggcatgagctgatgtcataccttcctcccaggtggaggtgagcgaagacgagccggccagcaaggcgcagcgcagaaaagagaagaggcagagggtgaaggggaacctcacgccgctgaccgggaggaactaccggcagctgctggagcgcctgcaggcacggcagagccggctggacgagctgcgcggccaggatgaggggaaggcgcaggagctggaggcgaagatgaagtggaccaacctcctctacaaggcggagggcgtgaagatccgtgacgacgaacgcctgctgcaggaggccctgaagcgcaaggagaagcgcagggcgcagcggcagcgccggtgggagaagcgcacggccggcgtggtggagaagatgcagcagcgccaggaccggcggcggcagaacctgcgcaggaagaaggcggcccgcgccgagcgccgcctgctcagagcccgcaagaagggccgcatcctgccgcaggacctggagcgcgcaggcctggtctgagtctttcccacctggggccgccgtcttccgtcctaggagactccaggacaccctctgagtccttgacgctggctctgtcccaggatctccacagacctcggcctctccatgtgagggggacacagtggtgctctgctgagttgtgagggcccagatcacagatcccatgtgagaaagagagagtttcagcgtcatccttgaacgcaggatccgggaccttcagacccagggaaagggtgagggagactggggcctggtctgctttcccgggcctgaaagcttccccgaggtttgcagggtcagggaggaggaacggtgggggtgggcagtcactgcctgttccccactgcctgtgttcgcaggagccacgggacagaagacggtggcctctgctgccgggccacgttagtccgcagctcacccgaacagaggacaaccctgaggtgtggcatatgggcacctggcactgggagtcgggggagcacgtccaggcgtggtgcatcctggggcagaacgccatggctcctccccgctctcttggcttctgcctgttggggtctcattcctttctgttccccagtgccccggggcggcattttactgctcagaatttggagggagggagcagtaccttcccggagtccacgcatgtgagttgggtcaagtgcattggacctagggaaagagaaagaaagaataaaagctggagagagagtgaagtgaatgcaagatacaaagtgggatggaagaattaaatccagagttccaggcaatcaaaatgagtgcaggttgaaagaaaacaggtgaattttagtggcatatggatgataaagctgtaaataaaattcttttgatgaaactctccggttatgagacaaagactgtaactgaacaggagctggtgtgactgttaccagacagaggcaactgatgaaaaagccctgtgaaagataggatgtgaggtgagcatgag

SEQ ID NO: 17561 - DNA, 1073 bp, Artificial sequence
  DNA replication origin
ctgcatgagaagatccaggaggcccggggccaggtaggcgggcaggtttgctggagtgccgtcactgctctgcctgtgttctccctggggtcagctgtcagcgaggggccgtagcccctgttctcccctctgcagcgagtctggcagggccccagcaggtgtgctctgggagagcagttattttcttggagaacctcagtccccaagctcatcagcctccttccttctgggaagctgcctttgctgaactgacactgggatgggcacctcctgtgtctgtttctctgaatgtcgtaatagtcctgtgagttgagtagggacttgagctgagtggccaggcacaggaagcaccaatgcagctctttgtgctgaatggtactgtctcccctgtgttggcccctacccacccttttcctggggcccttccttaaggcctcgtgctgtgtgggggacagtccccagctactctcctccgccatcccgaggtacagtgtgtggttcctaagaggtgagcaaggctctgggcccttgttcctgaagcacaggtctcgtttgggctggtgtagggctcttgttggcccggggatgggaaaggccattggggagggcttcgttgggtacctcgtgaacagaatgggcagcggtcaggacaggtgttcagacgccaactccaagttctaggcagtggtcttgaccctcctcatctataaaacgatgtatgacatttgaaaccatgtgcgtaatgtatcctggcacggggtaagcacccgggaattggaagctgtgattcttatttgggggtcccttctctcttttggggtcatttgctttttggggaacatcatggtggaacattgaactccgcgggccccttgtttgcgtgaggattttctcacctgccttccagccctgattcttctcgactatgggccaggctgggggaccctgggatcgagagaactttaatgagtgggtgcctctttcccccagggcagtgccaaggagctgtcccctgccgccttggagaaaaggcggcggagaaagcaggaacgggaccggaagaagaggaagcg

SEQ ID NO: 17562 - DNA, 1032 bp, Artificial sequence
  DNA replication origin
ccgggccctccctgagcaccgcgcgcaaaggcccggccccagggccaggcaactccagcgccgaggccgtccagtgcggctggagggcagaggccgagaggcgcggcgcggaacttgagccccttgtcccggcgcaccggggaaccatgagggatgttaagcgagggagtggaattaccccccttttttttttcttttggagacgtagtctccccctgtcgcccaggctggagtgcagtggcgcgatctcggctcactgcgacctgtgcttcccgggttcaagcgattctcctgcctcagcctcccgagtagctgggattacaggcgcctgccatcacgcccggctaatttttgtatttttagtagagttggggtttcaccatgttggtcaggctagtctcaaactcctgacctcaggtgatccctgcctcggcctcccaaagtgctgggattacaggcgtgagccaccgcgcccggttggaatgaccactttttaggacctcttccctgccgcgcagagactggagggagcggggcccgcagtgcagggatgaggtctggagcggggcagcctgagtgggagtggaaggaaagcgtggatgtaggcggtgcagaggggtcgaattggaaggactcttcggatgggagggcgtggcgaaggtggcggcgggctaagaagttaagccaagggctggggacggggagctggtgttgagtttgcagggctccctgggacacgctgtgggcctggacgtgaagtctggactggagccctggacagggcttggagggctggccaggagttccaggatgagcttgctctggcaaaggcggggccagtcctggcaccccctgcggtgtctgctgatggaatgagttcatctgtgtttcagtgattgactttatttggcagaaagggaatccccagaaatctgcgtgttctgctaaggttggggcatagagggtggctggggtagactctgcctgcactcagaggtctgtgctgcactctaggtcccaggtctccccgct

SEQ ID NO: 17563 - DNA, 874 bp, Artificial sequence
  DNA replication origin
cctcccctcagcccctcatcccaactgcgcccttctccgccactccgttcccctcccgcgctgcgaaccttgcgggcgtccgtctggagccgcaggctcgggtgctcccgcagaaacgcccgcacgtcgcccggcaactcgctcatggccgacgcgcccgcggagcagcccggcggaagccgctcgcagaacctggagccgggggcggggctctgggcgggactcagcggcgccccggatgcagatgcttcctgcgtcccggaagcgcccgcggggccgggtgcgatggcggcggtggctgcgttgcagctggggctgcgggcggcggggctgggacgggtgagcgccgggtgcggggtgcggggtgcggggcgcggggaggggtcccggagctcagcccgcccgtccgtgtccgcaggccccggccagcgccgcctggaggagcgtcctcagggtctccccgcgcccaggtgagggctgcaggccgggctgtgatccaggcgcctgggcagagccacctgctgtctgccctgcactttgaagggttgtcgtggggattgaaatgaaccaactgccggctgagcggaggctccctgggagtgacaagttccgtattaaaatgctttcagtggaattgtggtcgtgtgccgggcatgtagcgagcgctttgtcctcacaacgcgagaggtagctccttggtcgttcccctgttacagagaaggctcgagagttacttccgaacgtcccatccagctaatgggtggccagcccaggctgaaagcccagggctctgaaagtaaagcgtatctaaccaccgcggcttacgtgttcctctcagtgtgcagcacagggctgttttgccgtgtgtagagtg

SEQ ID NO: 17564 - DNA, 1063 bp, Artificial sequence
  DNA replication origin
cgcgggaggggaacggagtggcggagaagggcgcagttgggatgaggggctgaggggagggcaggggagaggagagggcaggggagaggggagaggggagagcaggagagaggggagggcaggggagagggcgcggcgggatcaggggaggagagggaagggggcgcggcaggagggggcaccagggagcggagccctggccctcctgacgtcctgcccgcccacgcgtccgcaggtgaggtgcatcctgacaggtcacgagctgccctgccgcctgccggagctccaggtctacacccgcggcaaaaagtaccagcggctggtccgcgcctccccggccttcgactatgcagagttcgagccgcacatcgtgcccagcaccaagaacccgtaggtggtccgcggcggcgcggggaggcccagggcaattaggacagcccctccgctggactccgccagtgctgcagcccctactctttcagagttgggagccctgggacccaggtgggcgcccgggtgctggaatcacctgcggtcccagcggcgaggcctcttggtgagctcgtttgctcacctgaggtttgtcctgtggggtgtggctgcttcccagatgagtagaggcttgtgatttgtcacctgaggttgtgaacagcgttgggttcttcccttaaccccagaaggggtctttgatttagctgggagctaggctttgtaataatcgtcaaaacagagataggatgtttccattcattgagcccttgctccaggtggagccatcctcttgcatgaactcatcctggagcagtcagtgaggctgccatgcgtgcttttccggtaaacattaagaggctgcagtcggcctgggtcagacggttccccacccagcttcagagtggaattgctccgggagcctttaaaagcccgatgtccaagccgcatggtagactgtccagggatgagtccaagacacagccaccagtctgaatccttgctgtgaactgtccctacaaatttggtctctctgctctgtaggcaccagttgttctgcaaactcaccctgcgg

SEQ ID NO: 17565 - DNA, 1252 bp, Artificial sequence
  DNA replication origin
ctaggctttgtaataatcgtcaaaacagagataggatgtttccattcattgagcccttgctccaggtggagccatcctcttgcatgaactcatcctggagcagtcagtgaggctgccatgcgtgcttttccggtaaacattaagaggctgcagtcggcctgggtcagacggttccccacccagcttcagagtggaattgctccgggagcctttaaaagcccgatgtccaagccgcatggtagactgtccagggatgagtccaagacacagccaccagtctgaatccttgctgtgaactgtccctacaaatttggtctctctgctctgtaggcaccagttgttctgcaaactcaccctgcggcacatcaacaagtgcccagaacacgtgctgaggcacacccagggccggcggtaccagcgagctctgtgtaaatgtaagtcccagtggacccccatcagtgcatcgccatctgagtgcatgcccgccttgccccagatggagcgtgcttgaaggcaggtcgtccttcagcgatccgtgttgatgcatcaggcctgttttttggcacagtgaagagagggatgatggcccctgaccccacagcttttagtgcaggcaggcacagagccagaagcaggctcgggagtgagtgagtgtgcgtggcaatgcgaggtgtgaaagaaactgggcgagggatgtggggtgggcttgcggagacaggagggctggggagactcgctgagggattcgctcgaggctgaggctggagggatgtggtggcagtggggtcgggggaacagcaccccagggagaagccagggtccatggaagtctgaggcaaaaatgtgttggctgaggtaggctccaaaggactggctgggctagtgtgcacagcccggatgacccagagaccaggccaggagcactgcagtgggtgtgtggagagggttgggtgggggctgcatggacagtgtgcatggttgagaagggaggactccttgactgcggtcatccaggaaaagacggtgggttttggggggagaattcagagtccctttgaaggttttaagcttgagctgtattaggaaaggtgtgtattagggaagtatcgggcttttgaaacagggacacccgtgctggatgaaggagatggttgcaccgtggatctgggtgagcacccggcgagagtttagagaagggagagaggcctggtcctgagccccaggaagaggctggaagtcctcccgtggtact

SEQ ID NO: 17566 - DNA, 1252 bp, Artificial sequence
  DNA replication origin
gagccagcgagcgagcgagcgagccgagccgagcctcccgccgtcgccatgggccagaacgacctgatgggcacggccgaggacttcgccgaccaggtgcggcctgcgggctcctcccccggccccggtcccgacccaggccgcccgggccgctccggagtcggcctcccagcgcagggcgccaggcccgggccgccccctgactccttgttcccacagggggacccccccgcccgggccctctgtcccggctggacagccccaaacccggcctccgggcccagtctcccctgcccgctgggccgctcccggagcccgggcctcggcgccctgcctggctagccgcccccaccctccagccagcccggggcgcgggctgtgggggtttcttcccgggccggcggcgcgagtcctggcgttgggtcgggtctgaggctcgcggggagcgcctcggcgtttggagctgctggggggtccccgcacgtttttcctctcactggggctcccggaggcgggctgggagctcggggacgaacgggggccgggggtcctcccagaggaaagggggcgcgctggcgtgcgccccagctacaggaagccacagcaccttttccttttctctttcccagatgtgctggactcttggggtccctttgaccctgtctgcgtctccctccccgtttggactctgccctgggctggattgagtggggacctgtacacagcctgggaggaggggaagcctatctccctgatagtctccttccagaagtgtccaggtggcattctgagcaacagggaagcctttgaaacaggcggttgggtaactgttgagagcattcgggaactgggtggacaggatccgatcctacaaagtgaagggacacaactcccttccctctttcttgattaagcttgacagaacaaaaaaacaaaaacaaaaggtggtggtggttacgcagatttatgccttttacttctaaaagaatcccgttatgtcgacaaattaacagccttatccccgcagggagagccttgtgtggcccacttgccgttttttcctcggtttacttaatgtgttcgtgtggctttgctagagttttaagtagtgatggttaaatttttaaatttttctggaggtggtagtgagtcatcaaactctgaggcctagacttatcggaaggcttgtatatgtgtggtttaaaaaaaaaagaaaagagtaagtgaccgttttctgatcagctattgaact

SEQ ID NO: 17567 - DNA, 944 bp, Artificial sequence
  DNA replication origin
gctggagtgaggcaacatcaaacagctgtttgctcagaaggtccccacaaagccctggccttgtgtaaactccaaagagacctcctttgggttgcaactgagcaggcgtgccaccaccagggcagaggcagggccccacagacacccaacatttgagagaaacaaagtcgtggttgtttgtggtaccccagaaaatgttgcctctcatggagggaaaagaaagtgtcagaaggaaggatatgaaaatgcccaggacggagggaggtggggggggtcagccccccgcccggccagccgccccgtccgggagggaggtggggggctcagcccccccgcccagacagccgccctgtccgggagggaggtgggggggtcagccccccgcccggccagccgccccgtcagggagggaggtgaggggcgcctctgcccggccgcccctactgggaagtgaggagcccctctgcccggccgccaccccgtctgggaggtgtgcccagcagctcattgagaacgggccatgatggcaatggcggttttgtggaatagaaaagggggaaaggtggggaaaagattgagaaatcggatggttgctgtgtctgtgtagaaagaagtagacatgggagacttttcattttgttctgtactaagaaaaattcttctgccttgggatcctgttgatctatgaccttacccccaaccctgtgctctctgaaacatgtgctgtgtccactcagggttaaatggattagggcggtgcaagatgtgctttgtttaacagatgcttgaaggcagcatgctcgttaagagtcatcaccactccctaatctcaagtacccagggacacaaacactctgcctaggaaaaccagagacctttgttcacttgtttatctgctgaccttccctctactattgtcctatgaccctgccaaatccccctct

SEQ ID NO: 17568 - DNA, 1583 bp, Artificial sequence
  DNA replication origin
ggtgggtgggttagtggattggatggatggataggtgggtgggtgggtgggtcagtggatggatggatggatggatagatgggtggatgagtggatgggtgggtaggtgagtagatggatggatgggtggatgggtgtgtggttgcatgggtgggtgtatgggcagatgggtgagtgcatgggttgtagatggatgggtgggtgggtagatgggtgggtgggtgcatgtgtggatggatgtgtgggtgggtgggcatatggatgggtgggtggatgaatgagtgaatgagtgggtaggtgggtgagtggatggattggatgagtgcatggatggatggatggatggatggatggatggatggttggacggatggatgaatgggagggtaggtaagtggatgggtgggcgggtggatggataggtgggtgggtcagtggatggatagatgggtgggtgagtggatggataggtgggtgggtgggtgggtcagtggatatatggatggatagatgggtaggtgagtagatggatggatgggtgtgtggttagagggatgggtgtgtgggtggatgggtgagtgcatgggttgtggatggatggttgggtgggtagatggatgggtgggtgggtgcatgtggatggatgtgtgggtgggtaggtgtatggatgaatggatggatgggtgagtgtgtgggtagatgggtgggtatgtggatggatgggtgggtgagtgagtgaatgggtgagtgagtgaatgagtgtgtaggtgggtgagtggatgggtgggtgggtggatggatggatggatggggtgtgcgtggatggatgggtggacagacgggcagatggttggttctattggaggtgtagatggcatgcgtccttggagtccagccctttactgttgggctggggaatggaggtccagagaaggaggggctgcctgaagccaaccagggactgatggactcagaggagtctgctcttttgcctccctgtctggggttccagttgagaaagtagggcagagcaactgtaactttgcccccaaggtcctgacatttagaaggggcaagaagtttagaggggtgcacagtttcttggcacgtgcctcttccaactccttctacagccatccagggcacacagacacaccacctatatgggccagcctggtgggcacccaccaagatggacagcttcagtggctccagatcaacacaaagctcccgctgattggggcctcttcctccccacagttaatattctccacctcttctgagaagaggacctgcagggcttgtgtttcaagctgcttgcggggggccaccaaaggggatacagtgctgggcagggtgactctgtcaagcccctgcccccagggagcaaaggactcagggatcccaccttgcttttaccaacagacccctttcgtaagtcctggatggcccctgaagccctcaacttctccttcagccagaaatcagacatctggtccctgggctgcatcattctggacatgaccagctgctccttcatggatgtgagccgccctccctcccccacaccccacatgctgttc

SEQ ID NO: 17569 - DNA, 1014 bp, Artificial sequence
  DNA replication origin
ggtagccccaaaagacctgtaaaggcagatttgaatcgaaatcttgtaaacagcttttcacaagaaaggtggcctgttgagggaggtctcgaacttgtttgcttgaaagaaattgatgaaagaattatttcaagtacaaaaaagcaaagataaacccttgtaccttttgcataatgaactaactagaatggattttacaaagagaaatttagcttaaaatcccgaaaccaggccgggcgcggggcctcacgcctgtgatcccagcactttgggaggccgaggcgggcagatcccctgaggtcaagagttcaagaccagcccggccaacatggtgaaaccccgtgtctactaaaaaagtacaaaaaatattagccgggcgtgatggcgcgcgccggtagtcgcagctactcggggagcctgaggcagaagaatcgcttgaacccgggaggcagaggcagtagtaagccgaaatcgcgccactgcactccagcctgggcgacagagcgagactccatctcaaacaacaacaacgaaagaacacactggtctgtgtagcaagacagggagaaagaagattcctgtgtagaagtgaaaagcagatagcagacatgtgatggggttctagcgacacttacggtcttgaagtaaatactaattgagctcctaaaaatgtgcactctgccatgtgctctatgccatgcgtgttgcaatccccacaataagactgtgaggtggacacttccatcatcgctattgtacagatgaggaaataggctggaaaagtttaaatagatcatctaagattgcggctgggaaccaggtggctgactctggagtccatgcttttaaggctgtgttgtacctgctgtctccctagtgacctgcacttctgtagaggttgcctgctctctcctagacactcttccacgtgcgtcactcatacattcttaccacatcccttggagctcccttggagctacctcctgttaggatcatagctcactgctgcctggg

SEQ ID NO: 17570 - DNA, 1295 bp, Artificial sequence
  DNA replication origin
aggggtgggttggacggaggggtgggacaggaaggagggctgaatgcggagtggggacggacgtagagagaggtggcgctggcggcccagcgggctggctggaggctcgcgcgcccctcccacggggcggccgctacctgagcaggctcagcagctgccggcggctgcagggggaccaggcgaggccggcgcggggcgcggcgccgtccgaagccatcacgtgtccgctggggccgcagccgctgccgggcgcgccgtcgtgctccaggccgaagctggtcggggggcggggagttgcgctaaggcggccggcaggggcgggggcgggggtgggggcgggacgggggtcggcgagtcagcggcccggcgccctagtgccgcagcgccagcgagttttccgacccgggtcgacccctgacgccgccatctgctaactgggcgcagtggagagggtcgcgtgcgccctgcctcagtttcccccagaagggagcgctagcccagcagggtggctctcgcatcttttgctaataaatatcaaaagcctttaaaaatgtgcaagccacattaaatcatggtgttaggagtctgtggggaggtggggactggccggggccttgaagggctgctctggggactgtttacatggatgtgttgagcgtgaaattcacctactgtgaggaaagcacgattttaaagttcagttaaaacgtgcttgcccttggccattgtttgcattcctaggccaggaaggtgaaccgtttccaaactgtcacaacagagcttgctttacccaaagcggaactgatggaggactcctaatggggtgggagaggccaggcaccggtgaggtaggaggtggactccactctggaggccccgcttggacactggaccagaggactagctaaaacagggaggggtgggaagcccctttccataagacacgcccaccagtgtgccataccagtttgccattgccatggcaaaacccagaagttactgccccttttccatgacgaaaacctagaagttactgccctttttctagaaatttctgcataatctggccccttaatttgcatataattagaagtgggtattaactaggactgcagccctgcctttgagctgctcttttgggcacagtgtctatggggtagcctggcttcaaaaggggctatgctgtgctgtatacagtcacagggctgtacactctgcccactgccacatcaatcaaagttgctgtctaacaccacctgctccctcttgaattctttcctcggtgaagccaagaa

SEQ ID NO: 17571 - DNA, 1396 bp, Artificial sequence
  DNA replication origin
tcactcagccaggagtccttgggcacaggggccctcccaggactagctacataatttgtggggcccagtcaaacaaaaatgttggagcttttgttcaaacattttaaataatttctagagggcacagacagcattaaactaagccgccctggcttagtacctcagcctagcacggcacccagcaggttctcaccatgcacgttttgggggacgtgagctgggtgatgcggagggacctcacagccaatcccaggccaccgccggcagactcaccaggtgctccctggcgaaggtgcaggcgacagccttggggccgaaggccacgcggcactgctcgttggcgctgtagtagaggccaggctgcgcatccggcgggtgccccgcggacccgggttgaggccgcggcgggtcccacacgcagcgcgcccgtcctgcgctgcgacaaggcccggctcaggcccggctcagtcccggggtgtacaccgggaggaggcgggacggaggagtgggcacgaggatggaagcgtttggaagcgtggccttttgtgagtgggaacaggagttctcggcccgcgccccccaccaggagccggctcttggctgggaccaagactaaggctcctgccggcgcagaggtgggtggccagcagagggagcggcgacggagggacgggtctgagtgggatggagcagatgcaggttaggcccgggagcggtgcggtcggcgggaaggggacgcagggatacatgtacgcgggtgggggagataggggtgtgggactgatggagcgtggagagtggacggaggggtaggggcgggtggaggcagacgaagggtaagggggtgaagtgagggggtgggtgcaggaacagggtgggcccaggaacggggtgggtgcagggggctgagatggaggggtggatggaggagggtaggatgcaggggtgggtgtaggcaagtgggagagaaccagggagtgtatgtggagtcaaggggcgggatggggatggacggaggggtgcgtgcccagattggctggaacgaaagtgtgggcgcaagggggcgagggaggacgcaggggtgggcgcagggagggggtggaacggagcggtgggcgcaggggttggacagaagggtggccgcagagtgggacagcacggggggaggtgcagggggtggggcaggtgggtgggacgggggggtgggtgcaggggttgggacggaggggtgggcgcaggagtgggcgcagcgggatgggacggagctgtgggcgcggggttggacggaggagtgggtcaggatggagaggtaggacaggaaggagggctgaatgcggagtggggacggacgtagggagaggtggggacggacgtagggaggggtggcgcgggcggc

SEQ ID NO: 17572 - DNA, 1138 bp, Artificial sequence
  DNA replication origin
cggggcggggcagggcagggcgaggagcgcatgcgcggcggggccggcccctctccccgactggatactcacagactgcccccagcaccccagacaggcgacacagccagcggtaccaccacgtcatgccctcttcctgcgcgggcggcgcagagctggcggacgccccgggcgccccacctgagctgctcatggtgccaccgtcaggcgcagctcacagccctcacaaagggctcggtagccggccgcgtccgagccggcgcgctgccttgtgggagagggagcatattagcatagggggcggggctttcaggctgcggcgaggcgcgcccgaagggaggcgggtgctcattaacatagtgagcgggaccctcatgccgcgactaggggcgtttgaggggaggtaggtgctcattattgtagggggcgggacccgcaggctgcggcgaggagctgggggtggggagctcgttagcatacggggcggggctcgcaggcatcggagaggtgtgcccgaggggggcgggcgtcattagcgtagggggcgggggctcgcagtttgcggcgacttgctcccaaaggaggcgggcgcttattagcatagggggcggggcctggaggcgcgcagacaccttagcggtcagagcctcacaccaggacacacgggtggggcttcgcagggagctggctaatgcgccatcctcggagtggaatcctgattggattttcttcctggataggaagaagataactagggacgtccagcggcttgctcagatcaagatagagccaaccgcggccagcgaatccctgccttgccatgggatgggttttcaagccaggtctggacagcttataagaaaaaaacgccggtcagcctgcatgttttatttattggtacccgaggaaatgggggctgcttttccagagtccccacctccaaccccctagccttttggacattggagaagactctaaagtagatacctaagattggaaaaagttcgaattggaaagcactgagaccaggggtcaaccctccagggctggccagacacggaacaaatgttcaatgaccctcaggttccttcctttcccttccaggactgagggtcctgcatctccggtacccatgatt

SEQ ID NO: 17573 - DNA, 2024 bp, Artificial sequence
  DNA replication origin
tgagggctgtgagctgcgcctgacggtggcaccatgagcagctcaggtggggcgcccggggcgtccgccagctctgcgccgcccgcgcaggaagagggcatgacgtggtggtaccgctggctgtgtcgcctgtctggggtgctgggggcagtctgtgagtatccagtcggggagaggggccggccccgccgcgcatgcgctcctcgccctgccctgccccgccccgccccggcggccccaggggaaaggacccgctgggggtcgggggtctgccgggcgcctcccggggcggaggaatggcggggccgccgggagccggcgtcctggggttgccatggttacccgctcgggcctgggcgccttggtaccccgggctgggctgggctggcgcttctgggaacattcccggagggaccagaaaccccagggcgggggggcggcgggggcgggggtggggcaccggcctggggcacgtgactgagccctccccccgctccccaggggcttttgtgagactttctcggtgatgctcacggggcgcatgcccacctggcccgtactaaagcgtcaactgttgacttgggcgtaggtgacggcagccacattgctaacctttgggcaaggattgtttgtaagggaggcgggtgcacggctggctagatttctggcaggaagccactgggcggaagtttgctgagggtcaggtggtgtcagggcacaggtggcccctggggccgcggggcagtgagctgagggcccggcctctccctgggtcctctgtccgctctcatatctcccccgttgctgctgccttagccgcctgtcaccggccttcctccccttctccgcacgcatcccagtcacagaccctgaccttaggctgccagggaagctaggctcttaagcacagccagaaaaggacaaagagggaggcaggtcagctccaggagtgaatggaagccgtacagctggccttccagggaaagacaagtctgtctgagtgataccctttcctttcctgtctgccctcaatcttgtggattactggagtgggcaaggtcttagagaatgtctgtcgaggatgtctgcaggttttaaacagtgcctgcctggcagagagggctagctctgggcctgggcagggcaggccccatcagcaatcctgccagaaggaccaccttttcagggtcaccttgggttccacagcctttccaggtgggtagagggtggagggaggttgaggcaggagggtgctgggctaggagtgtgctgccctcgctaggcatgcccttatccagaggcaacggatacggtagggcaggccctacccccaaatcacaaaaaggccccgagtttgtgtcactgctcttcagggcaagtacgcttttgactttgtaggagagactggtgggtttgaagttaggcattggatccagtcctgtcatgtctggttagctgttttccctgcagattagggtgggcagtgcagtggggtgacatggtcagtggtgagaaaggaaaggtcctgactatggcctgtaggccacacctccttccttcttggtcagtggccctgccgactcccagatttgctgtggagtcttactcagttctgtgcctctcaaagtgaggtacctctgcctttcctgggagttcctggggctctgttgggtctacagatgaagcttcaggagaaacttgtggcattgccctgagttgtcagttgcatctgcagatttttgggggcatggttatgtgaacatcaaaatgctgtattacagggtagaatgcaaaaatgcagggtgttttagagatgcggcaggagttcagacaagggttgtgtgccgggctggtccttgggtaaggttttcctcctccagggtgaggggatcagagagagtacctggagagggtctaccctgggtcctaagagcatctggaggtgataccttgggaggggacaggattgcatggtgacagccccctcacgtggaagatatcagcattgaggcccccaagtggac

SEQ ID NO: 17574 - DNA, 1045 bp, Artificial sequence
  DNA replication origin
ccccctgaactcagagaccccagagtggtcacgtgatagcctagcaaacgctcttcattataagaaacaggaacgggcgtaggcaactgttctgggaagtcaggttacctcctgggccagggcaggacatggcccaggaccctgccaggggccccggaagccacctccccaccgtgcctcatctcccgccctcctgggcgctgggtctcagcagcagccacactcccccctcaaccccacccactccccctgcctcctggttcaaaactacgggccctgtgaccagccagaatctgtgaggcccagagtaagttcccatgagggagaagctggctagggcagcctaggccagcgcctaagctgtccctgcagtggtcagggcaggggggttgggggagggcaggcaacccagagtgagtccatcagcctagagggtccaagaagaacctgcgtgcccaccaggctgcagggcgggcctcctgcaggccgcggcatggaacagctgggatgccagcgctgggtagggggtgtggagggggtacctgagctgacgccagagggcccagcccctgaggaaggccgaggggcagacgggatgcagacttcaagggctacttcggatttgtcctggggacagtgggggagccctggtgtgggggggcggtctctgaacacaggaaggaccagatgaaggccccacagggctggtcactaccagcagcgcccacgagctcctctggggcaggaggaccctggagcttctccctgtgacccggccccgctcttcacccgcagagcaccttcggcctccaggtgcctttcttcttcttcgcggccatctgcttggtgagcctggtgttcacaggctgctgtgtgcccgagaccaagggacggtccctggagcagatcgagtccttcttccgcacggggagaaggtccttcttgcgctaggtcaaggtccccgcctggagggggccaaacccccagtggctgggcctctgtgttggctacaaacctgcaccctgggaccaagaggcagcagtca

SEQ ID NO: 17575 - DNA, 1434 bp, Artificial sequence
  DNA replication origin
ttgaagtctgcatcccgtctgcccctcggccttcctcaggggctgggccctctggcgtcagctcaggtaccccctccacaccccctacccagcgctggcatcccagctgttccatgccgcggcctgcaggaggcccgccctgcagcctggtgggcacgcaggttcttcttggaccctctaggctgatggactcactctgggttgcctgccctcccccaacccccctgccctgaccactgcagggacagcttaggcgctggcctaggctgccctagccagcttctccctcatgggaacttactctgggcctcacagattctggctggtcacagggcccgtagttttgaaccaggaggcagggggagtgggtggggttgaggggggagtgtggctgctgctgagacccagcgcccaggagggcgggagatgaggcacggtggggaggtggcttccggggcccctggcagggtcctgggccatgtcctgccctggcccaggaggtaacctgacttcccagaacagttgcctacgcccgttcctgtttcttataatgaagagcgtttgctaggctatcacgtgaccactctggggtctctgagttcagggggtgtgtgctcatctcctagggtcactgagagttagggtcctgacagcaggccttggcacagcccctggcactgagaagggtcctggccagtcagagagggcctaggggcctggggcctggggctgaacactcaccaccactggcaggaaggacttggtgaggacgaaggcggtgagccagctggccagcacgcagagccctgaggccacgccacgggcacgcaggggcaggacctcagacatgagcagccaggtgatgggaccccagcccacggcgtagcctgctcggaggaggaggcaggttcaggccctgtggggtgactggaggcggctgtgtctgtctccgctgagctgctggagacccccctctccagccaccccagacacatcacccatcccttaacacccaagacagcctgcccctctgagccaccaccacacctacccatgatgaagagcatggtggccagcaggggcaccagggtgaggtagccagcgggtgctgccaggggctgcgccaagtccccccaggactcgctttccaggcccgcagtgctgttggggctcagaggcctggggccaaagtggatgtacagccccagagtcaggttggcagcaaacatgatggccgctgtggacagacaggtggcctcgtggggccaggaccctctgagccagctgtttctctcagagctccttctgcagagccccttgatacttgcgtggtccagctcgtgtctgggactagagacccccagcagggcagcaagctctgtctccagccgcgtgttaggctcccaccgtggagtgtcacagccagtgtgtcca

SEQ ID NO: 17576 - DNA, 1862 bp, Artificial sequence
  DNA replication origin
atccagcaggggctccgccctgggacccccatcctgtcttggggcgtgaccttcgggggcgcacgcggtgccggccgcgcccggggaagccgggtccgcatccgagcatcaggacagcctgcggccgccccattggccggcgtgtctctgcagggccgtcccacagccaatagcggccaaggggcggagcctggccggtgccctcggagctgctggccccgggcggctgctccagtctgagcgccctccgctcgccccgagagagacccggccatgcaggagccgctgctgggagccgagggcccggactacgacaccttccccgagaagccgcccccgtcgccaggggacagggcgcgggtcgggtgagagtcgctaggttgggggctgcgggtggggcctgggggtggccctggttccctccagccggcggcaggctcccgccctgggcctcccctgacctagtcgccaccgaggggccatctggctccctcctgtcccagacacgctactcctatttaaggaactggtccccctaagggaaggaacgatccacgagagtaccgggcccagccccccactgccacagacagtgagactgaggccccagcgagcaggggttctgcctgaggtcacacagcaagcctccagccgccgccctgggggcagaaccagagcctcctcttccggagaaaaggccccagcaccagaggctcagccactgcggatgagctaacaatggcctgggaatttcccaggggagctggggctcaggccctgggaacgtgaatggccttggacccaggcctccctagcactgcccgctgagccgggcagccactgggttcagaaaaggcaatggtccctggaggagggactcagagaccctggtctttttgtccgccaccatcaccaggaccctgcagaacaaaagggtgttcctggccaccttcgccgcagtgctcggcaatttcagctttgggtatgccctggtctacacatcccctgtcatcccagccctggagcgctccttggatcctgacctgcatctgaccaaatcccaggcatcctggtttggggtaaggaccatcctctggaggagggtgggtgcaggaaggagggacctgctgagccttatctccagctaggaacctcccaaattctccaccttgggggtccctccagggccctggtcccccctcccccagccatccaggccactagtgggtggggtaaagctacaggattcctctgaaatgaggaactgaaagccagtggagagggtgagggaaggagcaggtggggaggtggctgtcagggtctatactaggtggggctgaggcttccccgggtccccacacccacagttggctggatgggggcaagggtatcaggtgtcagtggggagaggcactggctggggcaaggagagtccgcaggacagattgtgggctgatggagaggaagatcccagagtcccagagtctaaaattataatcttaatagcctcatatgtagagttgttaacatagtagttaagataaaaattcccaaggtttactgagcacttcctatgtgccaggcatgtgttgggcactgaacgttcattgattctcagggccaacgccacgaggtagaacttgcgctctccccataagacagctgaagaaactgaggtgcagacaggctgggcaatgtgcccaggtcccactaccagttagcagagtccagagggggtcccagttgctgctgtacagggaacttaagaacctccaaatcttaaagcccagtaccttcaagtcacagaattctcctgtattaaaatattagacatttaaacatcaggctggacagaaccactg

SEQ ID NO: 17577 - DNA, 1158 bp, Artificial sequence
  DNA replication origin
cccatagaggggcaaggcaagctcccccctcggggaagaggctgctctgtgccattgttgagagagcgggcatggggacagatggactccaatccagcctgtatttccagcactccctagttgagtggctttgggaaagtcactcttcctccaggtcagtcaccgggggctgtggggctatactgccacctccattcctttctgcttccttctgaaaggaccctaattttgcttggggatggcaatgagccttccctgcggccaggtggccacgtgtcggtgcagaggccacgagggctagacaggagggtctggggcagctcttcctgattagagaggtaaagtctcactggaaaacgttttgggtcctgccctctttttcctgcctggaatcccgtcgcgtggccgggggaggcagctgctcactggcaaccatgagggtgagacccagtcttgaggctgagaccgaggcaggagggtgggacccacgctacgctgctggggaaggaagcaggcaggggctctcaggcagtgtctggaggctggatgtccatgtggagtgatggggttggcttctgtttgctgcagcctcatgcactcctgctggacacccggtgtcactctctcttcatctggggattgagggacctggaggctggaaggggctggctcatgggtgtgctctggatctaggcaccctcctcactgccacaccctgaggggcactggggaatcgtcctcagaggcgtgcaggggtgctgtcgggacagtcgggccctactgcttcaaggctgcaggaggaggatggggaggatctggagggggaggaggagctggagaaggagaagcagggagaagaaggaggaggaggagagggaggagggggggaaggtgaggaagaggagctggaggaggaagaggggaaggaggtgctggaggaggaggggagggggagaaggaggagttggaggaggatggaaaggaggagagggaggaggaaaaggtggaggagggaggaggaggagttgggggaggaggatggaaagtaggagagggaggagcaaaaggtggaggagggaggaggaggagttgggggaggaggaaagggaggaggacagtgagaaggagaagctggagggggaggaggaaaagctggag

SEQ ID NO: 17578 - DNA, 1115 bp, Artificial sequence
  DNA replication origin
actggggaatcgtcctcagaggcgtgcaggggtgctgtcgggacagtcgggccctactgcttcaaggctgcaggaggaggatggggaggatctggagggggaggaggagctggagaaggagaagcagggagaagaaggaggaggaggagagggaggagggggggaaggtgaggaagaggagctggaggaggaagaggggaaggaggtgctggaggaggaggggagggggagaaggaggagttggaggaggatggaaaggaggagagggaggaggaaaaggtggaggagggaggaggaggagttgggggaggaggatggaaagtaggagagggaggagcaaaaggtggaggagggaggaggaggagttgggggaggaggaaagggaggaggacagtgagaaggagaagctggagggggaggaggaaaagctggaggatgagggggaggaggagttggaggaggagggggaaggaggagctagagggagaggagggggaggaggaggggaggaggaactggaggaggacttggaggaggagggagggaggaggacagcctgggtgggaagttgcacttggcccagctcccagagaggtgggtggctttaggtcatgcgttcatctgagacctagtacaacctaggaccctggggccctgtgccggtcactgtgcctcttccagcctcggtatcctctggaaggtgagaatgaaaaacacccaatgacactcagactggacaggagcaggtacgcagacagcagatggccaggtgcacagaggtgtcgcctgacttcctcaccgggacggcatggggtggggctcctcctgcaggcgaagcccgcccgggactgggctctggtgggttctctctcttttccttcaaccaaagacctggctggacaccccccatctgacactccgggggctttcaaggggcttcaggcaacccacatgcattctgggcatcccatttagggggatgaagaaggaattggataaggcaagggtggggctggcccgtctcctctgctggtgcatcagcccctcctagggacaccactgtccttgacccctctgcaggccaatcagccctccttgggaagccgccgtccttg

SEQ ID NO: 17579 - DNA, 1336 bp, Artificial sequence
  DNA replication origin
tatgggcgggggccttatgaatgtaccatccaagtagaaaagatgggctcaccacatgaacgcagcttccagacacctccagctgtgtctccccaggacccttccatggaggtctgacagccctggcccaggcagaacacggcctcagcgtgctcctgtggaccctggtgggagccccaggagccgcggtgatggggtgagtcgggccaacttcttggctgttgcctgtggcccatcaacgcctgcgggtggacgcccttcagggccagagcaggcgcctcagcgtgcagacactgtctggctctctttctgcgttttcttcatctggattctgttgggacaacaatcaaggctgtctcgttctgtctgtggaatgggcctcacctagcaagaagccccaggggcccccagggctggtgagtctgtgtgtacacgtgtgtgtgtgctcgtgtgagctcgtgtgtgtgcgcgtgtgtgtgtgcatgagcttatgtgttgtgtgtgtgcgcttatgtgtgtgtgtatgtgagcttatgtgtcatgtgtgctcatgtgagctctgtgtgtgtgtgcatgagcttctgtgtcatttgtgtgtgcgtgagcttatgtgtgtgtgtgcgtgagcttgtgtgtgagcttatgtgtgtgcatcaacttatatgtgtgtgcacgttagcttatgtgccgtgtgtgtgcgtgagcttatgtgtgtgtgtgcgtgcttgtgtgtgtgcatgagcttatgtgtcatgtgtgtgcttatgtgttgtgtgttgtgggtgtgtgcgtgagcttgtatgtgtgtgtgcatgtgcttatgtgtgtgtgcttgtgtgtgtgtgcatgagctttgtgtgtgtgtgtttatgtgtgtgagcttgtgttgtgtcgtgtgtgtgcacatgagtttgtgtgtgtgtgcttgtgtcatgtgtgtgcgtgagcttatgtgtgtgtgtgcatgagcttatgggtcatgtgtgtgcttatgtgtcatgtgttgtgtgtgtgcgtgagcttgtgtgtgtgtgcttgtgtgtgtgagcttatgtgtcgtgtatgtgcttatgtgttgtgtgtcggggtgtgtgcgtgagcttatgtgtgggtgtgcgtgagatttgtgtgtgtgtgtgcatgagcttgtgtgtgtgtgcgcatgagcttgtgtgtgcatgagctgtgtgtgcatgagctttgtgtgtgtgtgagctttgtgtgtgtgagagcttgtgtgtgagcttgtgtgtgagagcttgtgtgtgtgagctttgtgtgtgtgtgagctcatgtgtgtgtgcgtgagctcgtgtgtgtgtgcgcttgtgtgtgt

SEQ ID NO: 17580 - DNA, 934 bp, Artificial sequence
  DNA replication origin
gcctcctgtcctcacagctacagaagatgaaggagaagaagggcctgtacccagacaagagcgtctacacccagcagataggccccggcctctgcttcggggcgctggccctgatgctacgcttcttctttgaggtaccaagcccagcggggaggtgtcctgtgccccagagcccactcggcatggctctgctcagctgggataccagggctgtgcccacgctggggggactctgacagccccaggccaaagtctggtattagtccctgctcactagcccctcccagggctatgtcgggggcaatgccgtccccagcaccaccagcaccatggcctgtgtggacctggaggtcacagagaccaaagctggctgcctacagacagctggcatctcagacggcagcacagcctgggagacgcctggggcaggtgcccaacacctggaggagggagggagggaggggaggagacagggaaggaaggagggagaaagtggaggagggagggaggaacaggggaagagggataaggagagaaaagagggggagatggagggagggagggtaggagggagagaaggatggaggaagagaaggacagcagagagaggggatggggaagaaggaaggagtgcagcctggaggatggcacaggccctcactgctctgggtttaggtggagagaaaaaccactgtgagcgcgaccgtgggggaggcttcctgcaggtgtcccagtgccctggcagaggcgggggcctgaaggggctctgctgggtcttggagagggaggagcctcggggagggggctgaggccccagactgaccgcttgccccccgcaggactgggactacacttatgtccacagcttctaccactgtgccctggctatgtcctttgttctgctgctgcccaaggtcaacaagaaggctggatc

SEQ ID NO: 17581 - DNA, 2011 bp, Artificial sequence
  DNA replication origin
tggcctacctggcttcgggtcagcaggttgtcctcccagagaaaggggcgagcgctgcggagggcagacggcgccaggtgcgctgtgcgtgcgggggcggcgtgagtgcagaggctgcggcccggcctccctctccccttcccctcctcccccgcgccgcctccctctcccacttcaaagagcatccaagagagggggttcccgggaggggcgcagcccagtggcggctctgcgccggcggccgcctttatagctgtcaggcagacggggaggaacactcacacttcccaccaggccgctcccccgcccgcgccggccggcctggcgcacactttaacccgctctgcgcctctggagcccggccaggccggcccagctgcctgttggctgctgccggcggcggcggcccaggagcggcgagcagggaggccttcttcccgggtccagaactgggggccacatgtcgggtgtccagacggagcagccgctggcctgaggttaccggggaggctggcggtggcaaagccccagccccgcctgtccggcttctgcctccagagcgggccctgtccctggggctcctgagaatggggtctgggatgtatgaggtgtcccgtctgatggctccgttgtacggagggaaaggctgaacttccgggacgaccgtgccccaggtcacgagcctcagaaagctcccgagatgcaggggcctaagcaggtggagggacgcagggagacccagcgagaatgaaccaagggctccagggaggagacagatgtgcccgtggcctgctgaccagatggctagagcagccagggccagggcagagaggctcagggattctgcagatgtccagcaccaacttggcagcccctggcaggccaggcctggagctcaagcctctgttcctgctgagtcagggcacagaggggagcgagagtgggtggagcagcagagcccccctgggaaactcccggcgggccccagactttgtgaggctttcctaaagcaaggctgggcacctagcctctgcacaccagcttccccagagcccatcctcggcaaacagaggcacctccaaaaaggggaggaggaggaagctggggcaccattccatcaggtcatctgtgtcttttcatccatgcccctgcctccatgcagcagatgtcctgggcccacagcagtgccgggaagacacttctccttccctctgtcctccctgctggaagaaacttgtgagttccttcagctgccttcatgagaaagttctgccctgtgtctgaccacccaccagaaaggctgggaaggaaagccaccagtaatagtagtgaaagcgataataccgtctgccctctgtccagcttgtcctacgggcccagagctgtgaggccagatccacctttatgatctgcatttcacaggtggaagaactgaggttcggggaccaagtcacctctccagtaggcaaggctgggatgccagcgctcctgagtgtcgggttctctcctctgccgggttgtttaagtttctctccccgggaccctcgggcaggcaagtcttattcatctcattctcctgctggggcaactgggatgcaaggtggctgctcctagtcacagggccacctgcggtgtggaaccaggactaaccctaaccctaacccaggcccacactgccccctggggtcgctgtgctgaatcacagacatggtggcacctgtcacccagcacacacacacacacacacacacacacacacacaggcacacacacacccagtccctctcacatgaccggattacactcgctctgggtgcctctgccatccccttcctctctcttctggtgaccgccaggcctcgcaccccttggcacagtccccgagctctcctggcgtttgtggcctcacatccagccagcgccagggtgactaacggtttcccttgggagggaccccacagccgaccaacacaaacacccccagtgtcttctcttggctcagcaggacggc

SEQ ID NO: 17582 - DNA, 1795 bp, Artificial sequence
  DNA replication origin
gctcctgggccgccgccgccggcagcagccaacaggcagctgggccggcctggccgggctccagaggcgcagagcgggttaaagtgtgcgccaggccggccggcgcgggcgggggagcggcctggtgggaagtgtgagtgttcctccccgtctgcctgacagctataaaggcggccgccggcgcagagccgccactgggctgcgcccctcccgggaaccccctctcttggatgctctttgaagtgggagagggaggcggcgcgggggaggaggggaaggggagagggaggccgggccgcagcctctgcactcacgccgcccccgcacgcacagcgcacctggcgccgtctgccctccgcagcgctcgcccctttctctgggaggacaacctgctgacccgaagccaggtaggccacctcgtccccgtccccctcacgttgcagcgtccaccaggccagcccactgctcagagtggggctgggggtaggagcaccccgcgccctctggagccgttacataacgtggggaggcttgtggggaggggtcgggccgcagagcacggggcagggtggcctcccagcacctagccttgtgcgcccggagctctgtgtgcacggcagacctctctgctgccgccagccgctgcttttggaccccagggagggatggatccccgtgagcgaggcctggccagaagccagtggtgtctggaagccttaatgaaaaaagcaagtgtgaggccggctggcacctgtcttcagccggcaggcagaggctggggcacccgttagccaatggcacagtggagggggctcctgtgggtgtgaggctgagagtgcagatggaggtctgcaggggagggaggtggggggcaggcggcgggggcaggggaggtcagactcaggctccccactccagggtgcactgctgcgtcgtccgggctgcagtggtgtccttggagtggcccctgaaaatctgcaggtgccgggcctgcaaggaaactcttcaagttggatggaggctgctgaggagggaggggcagagcccgagttggcctctggcctggcaggggtgaggggtgacctccatgccttcttcccctggaattggccaggcgtgggggtcgagtccctgagtttgctagtgtgctaccttgctgtgtggctttgagcaggttggctcccctctctgggctccaggttatgagtgcaggctgcgtggtttctgaaatcccttctctaactcgctggcaagtgaccctcagcacctgagcaaggcctggacagaggtcatggtggatctctggtcttcccttccacagggcagggtcgacgctgaggagggggtggggagagctgagggcctggaggctggacagtcccttccaatgggcttgctttgacccctggcaggtgttttgagccaagggtgctggctgttgggaggaagtcagccttgtggccctggactgctgacatgctggcacaaactgcacctcctcctgccctgcccctcccccaattccatcttctctccggggatcgggaggcggcataggtacctgggttctgcctcacctgagtgccggctgttgctggatgctgactgtggagctgctggtctagggcgaggctgcacattcccccgggacctggccaagcccatccccatgcactgaccctagcagccagtggcagaggccattctcctgcgaggccagcaagagctgagccagttaaaatcccaaggtgctcctgccaaggcgctggactgagcccaggcccatcccttcgaa

SEQ ID NO: 17583 - DNA, 1021 bp, Artificial sequence
  DNA replication origin
gagggggctcaactgccagtcacagcagggaacgcaccctgcagctctgtgggaaggggattggtggggaaggggctggacagagtaaggaggggctggggacccacttctctttccctaggtgtggaaccagaacggcaaaagcccctccatcaccttcgagtacacgctgctgcagccgccacacgagagccgcccccagcccatctactatggcttctccgagagcgctgagagccagggcctggacggggccgggctgatgggcttcgtcccgcacaacggctccctctacggccaggcctcctcagagcggctgggcctggacaaccggctgttcggccacccgggcctggacatggagctgggccccagccagggccaggagaccaacgaggtgtgcgagcaggccggcggcggggcctgcgaggggccccccaggggcaagggcttccgaggtaaccaggaggagggaggcatgagggtggggcccgggaggcagcccagggaagggggccttggggaaggggtctcagaccctttgcagacctgcagaggaggttcctaagagctgccagctacctgcagatgtcctctgggcaggcacagggttgaggacttgggataggtccttctgtccatgcattctttgaggtagatgtggttatccccatttgatggatggggagactgaggcttagaaagaggaagtggcttggccaagtcatgcagtccaccgtggaggagctgggagtcaaatgcaggatggtctgatctctcgctcaccccatcgctcactcaacgagcacctggtctcacctcagctcggacagcacagggagcaaaagcttcgggggccccaggcgccccttggctgtgaccgtgtcactccagcctctgcctttgtcctcataggcctcctcctctgtgccggtgtctctgtcggtccccttctgataaggatatttctcagtccacgataatttcatctcaagattcttaactaattatatctacaatg

SEQ ID NO: 17584 - DNA, 1129 bp, Artificial sequence
  DNA replication origin
acagcggtgcgagcctggccaagccggtgcccaccacgccgcccacagcggtgcgagcctggccaagccggtgcccaccacgccgcccacggcggtgcgagcctggccaagtcgggtgcccaccacgccgcccacggcggtgcgagcctggccaagccggtgcccgccacgccgcccacggcggtgcgaaccgggcccagccgggtgcccgccacgccgcccacggcggtgcgagccgggcccagcagggtgcccgccacgccgcccacggcggtgcgagccgggcccagccgggtgcccgccacgccgcccacggcggtgcgagcctggccgagccgggtgcccgccacgccgcccacggcggtgcgagcctggccgagccgggtgcccgccacgccgcccacagcacttgctttttccctccaggatgccaggcgcaggggcgaacacagcatgccccatggctatgccctgtttgggggctcttgtaacaggaggcagagccctttcttcagtcccagagaggcaaggccagtgtgagcagagcctgcagggccgccccagcccctccctctctcgggcccatctcctgagatgccagcagggctgcagagggtgcggccaagctcagactgcccagctgtgtggaatcctcactggccagagactgcaagggcatcaaatgccctggcaaatgggtggcactggggcgggaccaggagcatcaaaccttttgagggccagctgggtatcctctacatccaaacatgaagccccaagaatagataaaatgtgacctcacagccggcactggggtctccctgccatattttctcccatcaacggccctgtatcctgatcctgggtttgacatcagacctcgcggcatcccccaggggagggtactagagtgggcagcagaggcagctccagctctagcggctgtggccagcgtctcagggcgatggtggccgtgcaaccagacagctgtgggttcaaatcccagctcaactcttactaaccacacacatctgtctgtccaggcaccaccgaggagggtcttttttcccctcctaacttctcccctgctgatgaggtcctagaatttgcctacttcccttcgtcacag

SEQ ID NO: 17585 - DNA, 1268 bp, Artificial sequence
  DNA replication origin
gcgggcacccggctgggcccggctcgcaccgccgtgggcggcgtggcgggcaccctgctgggcccggctcgcaccgccgtgggcggcgtggcgggcacccggctgggcccggttcgcaccgccgtgggcggcgtggcgggcaccggcttggccaggctcgcaccgccgtgggcggcgtggtgggcacccgacttggccaggctcgcaccgccgtgggcggcgtggtgggcaccggcttggccaggctcgcaccgctgtgggcggcgtggtgggcaccggcttggccaggctcgcaccgctgtgggcggcgtggtgggcacccggcttggccaggctcgcaccgctgtgggaggcgtggtgggcacccggcttggccaggcttgcaccgctgtgggcggcgtggtgggcaccggcttggccaggctcgcaccgctgtgggcggcgtggtgggcacctggcttggccaggctcgcaccgctgtgggcggcgtggtgggcaccggcttggccaggcttgcaccgcctggttgaccacaccatgggccctgggcaaattgccaaagccttccgagccactgttttccacaggtgaactgggacgcctgcttatctcaaaggtgggttgtggggatccacatgaaacaaggaatagcctctcatggtcagaggtcaatggatgctgccgttctgagggtggctgccaccacctgatgcagggtgcggcttccaccatacccaggagcagctggccttggaagtgagccatgtgacctgccttccgggcagacccctagcggagctgagcatggtggtggggtgtcagcagggtgtctgctttgccaagtcctttgcggacctgccctgagttcctccactcttcctggccaggggactccaagcgtgtgggcgttgtcagtaagtgtcaagcctgtgggcgttgtcactaagtgtctgcaaacatctgtgattcctcccagacacatcgctggctggagaggggacgtcgctcgagacgtctgcagggtgaggcagcctcgctggcaaggggcctgatgggcagccctgcgtggaagatgtccccagggaggacacagcactgtctcccaacacccagagaatggcagggagggggctggactgggtctgtgcagcgtggcccaaggtgcagtggggcaaaggacaacaggaaatcagaaagacaggttttggctttggaagaaggaaactctgctttacaggaggttgttcagaaatggaaatgagccaccc

SEQ ID NO: 17586 - DNA, 897 bp, Artificial sequence
  DNA replication origin
gaaagagggagagagagagggagagagagagaaagagggagagagagagggagagagagggagagagagagaaagagagagggagagagagaaagagagagaaagagagagggagagagagagggagagagagggagagagagggagagagagagggagagagagagggagagagagagggagagagagagggagagagagagggagagagagggagagagggagagagagagagggagagagagagggagacagagagggagagagagagggagagggagagagagagagacagagagggagagagggagagggagagagagagggagagggagagagaaggagagagagagggggagagagagggagagagagagagagagggagagagagagagagggagagagggagagagggagagagagagggagagggagagagagagggagagggagagagagagaaggagagagagagagggtgagagagagagagagaaagggagggcaggagggagggagagttccctgtcactgtgggaggtgctgaatggcactgggcagaaataacagagtcagggtccaccctttgcataggttgtgtccgtgcggatgtcccatggatggtcattggcccaccctccatcctgtgcctcgcaagaacccaggcacagggcagttctatcagtggggcagatcagcctgccctgagctttggccgcggtggggaagcttgtttttagatttttcttcgaagacactcttttggagccatagcaacagaggagcgtgagtttggcctcggctcaggtcataggtggaagtttctgctgcccttcggcgctccagggcaccgtggtgaggacagtggatcctgcggcccccaggcttcatcctc

SEQ ID NO: 17587 - DNA, 773 bp, Artificial sequence
  DNA replication origin
gctccctgcccaggagcaggatgattctgggagagccggcagcagtgggaacggccttggggtggggttagggtttgctgcttctgctgtggctgtgtgtgtgtgtgtgtgtgtgtgtgtgtgtgtgtggccacgggagacagacccagccttccgggatgacgggcatcatggaacggtcttggctgcagctgccagttcccccagaaggaaatcggtttccccatatccagagaacccagccgcccggcggcgtgtgtctgcaggccagcggctcctgcctctccaagccccagcgctggatggaacgaaacagcctgggaagcagccgacaaggggattttttcttttttccgtaaaggacgagccaggctgcaatcacggttcctctcccgccagagctgggccgtgcagcctttagccttctctgagggggaggctggcttcccggccaggtctgcttggaatgttccaagcctcagagacacccgctctggggcccagggaggtgcggggctggggacttgcagaccatcgccaagtgcctggttattcattcgctcctcgtcacggagtggaaacgcggcaggccttggtcaagagagactggaatccaagtcccagctcagtgcctccctggggtgacgtgaccgtgaccagactccaggcctcagcatgctccttcccgaaatgggaaccttccagagagcctgtgagaatcaaatgccaggacgttttttctgggcaccctcttcatgacacccatctcgaaa

SEQ ID NO: 17588 - DNA, 1284 bp, Artificial sequence
  DNA replication origin
ccccctgggaaatgagagaggagggaccacccctcactgtggatctggggagactgaggcagccctgggtgggagacaatcagagcctcccgaatgccagccagtgcccttttgtcggcatctcaactcagccttggagccgcaggtctagtttcaaatgggcttccacgggtcctgtgtcagttgggactcatggccgcctgggaagggtggggtggggaagggggagtgtgcaggttccccgccccctgcccaggcccctgccccatcaggaggctttccccatgccttctgtctctcccacaccagtgcaccaagacctgcggggtgggcgtgaggatgcgagacgtcaagtgctaccaggggaccgacatcgtccgtggttgcgatccgttggtgaagcccgttggcagacaggcctgtgatctgcagccctgccccacggagcccccaggtgaggcgcggggaggccgagggtggctctgggaattcccaggggaggcgaggacagagtcagggcctgaggggtgagcagacattgctcaccttgatggcgagcctgggaaccagcttgagagaccaagctgtgcagggagtgggggctccctcccggcatggccgagccccactgggaggggagagagggaaggggaatgggggaggcctgactggggctccatggccccagggagccatgctgagacctgtactttgggaaaagggtcagcttcagatggcagggccactgtggggccaagacctgaatccaggatgactcagctggagcggccaggggctggcacacagggggcagggaggggagcagctgaagcagggcctgggcacctggaggagggacagggtgccaggtgcagggcacgtgatgagttatgctttggatacattgagtggtggacggggggcccctgtggaacccttggggatgcttaggcctctgggtgtgacatctgtagctcctttaggcatcactcctcttgggacacagatcaaatcacctggcatgatctgggacagcgacatcttggggacagagatgggccaggaaggagggggcagagagctagagatggagacccaccacggggtgggaggcccactgcccctggaaaacggcacgtgggggtccctggggttttcgccccttggccacctcctgaaactgccctgcttcgctctgtgttccttctccagatgacagctgccaggaccagccaggcaccaactgtgccctggccatcaaagtgaacctctgcgggcactggt

SEQ ID NO: 17589 - DNA, 776 bp, Artificial sequence
  DNA replication origin
aaaacgtgcaagcttgtagagccaggctggaagggcgccattcattgacagcatgctacactaagcatggagagacacgcttgtaaaagtgtcacaaaaccctgtgctattagcatccaccttctacggatgtggaagctgaggctgggagaggggcagggacagaggccagctgaggcagagcaggacctgggctcctgctgcaccccgtccccggcagagcccctgcctctcacaggcacatcctggggtgcttttttcccctcagcttgtcttctcagttctctagaatagcacgagtgacttttgtggtgaggaagcgtgatgctctaaagctggcggcgtgtgttgcaggctgttgatggagaagggggcggatgacagccgggaccgtggtcatcaccgggggcatcttggcgactgtgattttgctctgcatcatcgctgttctgtgctactgccggctccaggtattcccgggcggcggggaaggggacagggcagggaggcccagagggtgcccctacctcgggagggagccccgcctgaaggtcacaagggtcacggcccgggaagtggggaagagccctgtggcagagaagacacacagcagaaggcagcaggaccctaccatggggctcagtaagatgcgcctgactcccctcacccagagcttataaagaggctcagagacgggaagggacttagccaagggcaccagctgcccaaaaggagtgtcacagtgagcaatccttcccacctgcactccagggcca

SEQ ID NO: 17590 - DNA, 985 bp, Artificial sequence
  DNA replication origin
ctagccttcagtgcagtcagaggctgggtcaggcggagctgagatagcccccaccaggcagggtgtgggaggagaggggaccccggctgagggctgcctggttgctccctgggcctcctggagatgagtggcttgcgtccccgacgggtgtggctgggactctcaggctggagctttgggtggtctgagggaggcggggcactcagaccatcaccccaagagtcaggcctgcctcaaacctcaccttctgcccagtctaactgaccccactttctcaggctggggtccctgaagctctttcctgggatctccctgggagcccctggagcagatagggaagggacagagaaaagagaaaaaggtgatgggcgaacgggggcgcgaacggggggcgagcctgggaggggaggggaggggagggtgggagcccagtgctcaccaggacctcactgctgctatctgcccaggaagccaggagcagccacagaggcaaaggtgagaagtccccgcaccctgagctgtgaggctgggcagtggggaagccagtagcactccctgctttggcactagggaattgcagaccctgttcaaaaatcactgaccagtcccagcccctttctgctgagaccgagtcggggatcgtgggagatgggggaaccactggccctgtctggggcagagcagcaggcagtgccatgggggtctcagatagatcatgctggtgggaggcctggcctgtggggcccttctgtcaggaaggctaccacgctacttaaggaccttgaacagaaagatttggggaagaacttgcaaaaataaagcttgagttgtggccgctgctgtcaggcctgaagttgccacctttggctccaggtcctgcttgcccagaagagggcacacctgggctgcatggcccaaggaggttggatcccaactctggggtgggggtgggctcaatggtacagaaggatctagcatgttgagg

SEQ ID NO: 17591 - DNA, 923 bp, Artificial sequence
  DNA replication origin
aggggaaggggaggggaagggaaggggaaggggaagggaaggggaaggggaagggaaggggaagggaagggaagggaagggaagggaacttaagtccagcagcagagagggttttacgaacccaacttctgcacattggtatttttaagggagacaaaaagccagccccgtcggcagctgagctgggacttgcccggggttttcaggccctaccctcccaccccccatttcctgacccacggctgggagatcgggaaactgcagcccagaatgttcttggtgcatctcatctgccttttcctggcggcctgaagccctggcctggcctacagctctgtgctgctgttcccgccccctgggaaacactggggatcagctaggtgagggtgggggtcacgagggcaagaccccagctcactcagggcctgcggtgcaagtgtgggccgcggcccccactgcattgaaatcagcaccaatgccgccctactgtgtgtgtgcgcgctgtgtcgccccctggtggccggaggactgcagtgggaaaccaggttcttgccttcatggggcttaggtctgatgcagggaaggcggtgagtttaccccgtccctacaggcaagctgagggtgggggatggaaggaaaaggagatacatcagatttgatgtggcacaccatgttcacccctggagccctcacccctcaccatgtgaccttgtgcttttctctccccatgctagactccttggctctcttgtttccttgtctgtaaaatgggcataataataatctttgccttggctgtcccggcaattgaaggagacattggtgaagggtgccatgccctcctggcacagagatagtggtgcttggcacaggatcctgtgcttattattattaagaggtatagggagccatgcagggtgttt

SEQ ID NO: 17592 - DNA, 1105 bp, Artificial sequence
  DNA replication origin
tttgcacacactgctccatcgactcggaactgccatccactccttgcatggtcaggtcaggctgctgctcagctctcagctcagacgtgacttcagggaagctttgctgctcgcccaggcctcctctgggctccccttcccagcacatggtgctgcattgtgccacaaagggaacctgggtcccgggaccccactgcaagcccgacagcagctgaagcctgtgtctgtgtgtttgcatctgtgtgtgtctgtgtatctgtgtctgtgggtatctgtgtctatgtgtgtcaatgtgtaaggggtgtgtgtatgtgtgcatgcatatgtatgtgtctgtgtgcatgtgttgagtgtgtgcatgtgtttctgtgtatgcatgtatgtgtccgtgtgcatgtgtgaatgtgtgtgtgcatgtatctgcatgcatgtatgtgtaagtgtgcatgtgttagttgtgtctgtgtatatgtgtgcatatgtgtcagtgtgcatgtgtatctgtgcatgtgtgagcatgtgcatgtgtgtctgtgtgcatgtgtgtggtctgtatgcatgtacaagtgtgtttttgtctgtgcgtgtgtgtgcatgtgatctgtgtgcatgtgtgtatatgtgcatgaatgtgtgtctgtgtacgagtgtgtgtgcatgtgtgtgctagtgtgtctgtgtgcatgcatatgcatgtgcaagtgtgggtgtggtctgtgtgcatgtgtgtgagtgtggtctatgtgcatatgtgtgtgcgtgtgtgcatgtgtgtgtgtctgtgtgcatatgcgaatgtgtgtgtgtggcctgtgtgcatttgtgtgcatgtatgtgtggtctgtgtggatgtgtgtgagtttgtgtgtgcatgtgtgtgtgtctgtgtgcatgtgtgcctctgaatgtgtgtggtctatgtgtatgtgtgtctgtgtgcgtgtgtgaatgtatgtgtgcatgagtgtgagtctgtgtgcatgtgtatgtgggaatgtggtctgtgtgagtgtgtgtgtgtgggggggaatgtggtctgtgtgcatgtgtgtgagtgtggtctgtgtgtgtgtgtgtgtgtgtgtgtgtgtgtgtgtgtagtgct

SEQ ID NO: 17593 - DNA, 1514 bp, Artificial sequence
  DNA replication origin
ccccatgcaagtggggcactgaggctgggagagcctgtgcatccttcccagacccccagatccttcgggagccatttccaagctttccggctgagtctagacaagccggccccattggaaactcagctgatagggaaaccaaaacccagctggatccaggatacaaagactgccctgtgggtcttttcatagcatcgtgcagatgctcaacaaactgccagcaagtgcaagaccgaatgaacaaaaccccacatttcctgggcccccgagccttagggtgagattttttcacaagctgccagcacctaagctgtttaggaagcttgcagtcagtgcaccaagagttaaaaccagcccttgcccagcccaggaagtgctggttctcacctgctcaggtgggtagagccctggtcacctccacttcactctcaattctataagagggagaaggtgggaagatgggcaaaggtgctttcccagcaaccctgaactttttgggggttggtaattactgctctccccagaagccctgaagagcgtgagttggcaggggctgagggaaatgcaagggagaaggctggcagggtggcccgctggctctcctgagctcctgcttactggggaaggtgctaggacgaatgctggggctcaggcctcaaggatactccccttaccctgcagaaggttccatgaacttgacccttgagtttcttgtctcagagccatcggggttgctacgggacacacactggcaggaccacttgtgcccaggcagtccgtggctgcgggaggacaggacacgagtggggtgagacagtggagccctgaggacccatgttgaatatctcttgggtttttggtgtgtagagtcttttcttttctggctgaggaaacctagtgtcagttaggcaaccccccacctgtcaatgaagcagagattcctaacagacaaaggtgtgaggtggtggtgacagaggccggcgtgtttgaggccatctccaccacttccccactctgtgatcgtgggcaagagaccaaacctctcggagactcagtttctgcatctgtgaaatggggccaatgcccctttctcgtgggtgttgggtgaatgggatgggatgaaaatgcagcaccgactctggaagaaggcaaagctcagcaaatgaaaaagtcttagctcctggcagggagagaaggcggccaggtttccagagggctcttctgggaaactttccctccccactgccccctgcccccaggccactgttccgagggaaatgaagccccccttcctaaagtgggtcccccacctctcccttaggccctcgtgcccacctgggtctcagtctcctcctcggggatgcgctttgagggtggaagccaggggatgggtgacgccagctgggtcaggggacctggtgcgaggcagccggggcaggctgcagtgggcactctggacgagtgggcacctagctggagctttccagcctgcgtcttctgccccacaccccgtg

SEQ ID NO: 17594 - DNA, 965 bp, Artificial sequence
  DNA replication origin
gacggggcgggcgggcgtccgacccgggcagggcgcagctagcggcggccgctcatgcccaggccacggcggtggcgcctggtgtggctgggcgggcgaggcgggcgctgagaagcccgggaggcccccggggaggcgactgcgtgcccaggcgggcacccctgccagctccgcgctgcggccgcgactccggacgccccggctggctccctgcgagctgcacgcgcggctccagcctggtcccgagcgcagggcgcgcgctggcggggagggcgcgcgcccgagcctggcggggagcgcgcgtcaccggcccgcgcgcgcagtcgtcgggggatgccgggagcggcctggggagctgtccctggtgctgacggctcgtccgctctcgcccgggacgcgcgacctcctggaggcctgggggtgcccccaccctggccggcgccctgcggtgctccctccgctctccgcctgttctcggggcgttccggcttccacaacgttgggatctggagtcaggccgaagctgctgcttatccgcagtagggcaagtcccttatcctggttgagcggctggttcttatctttaaaatggggagttaacaccagcacctttagggttggtctgagaatgaaatccgatgatgtttcgaggcccggcacaccataagtacttaataaatgctcgcctttgttactatttatttcccttctctgagttagcaaccccggagcaactgagaggaggagcaaggcttacgctgctcctggtgagtggctgtttggggcatggcggctgcctttggatctctcccacatccacggggaaggggagcagatcccttctccctgaccccaaagcacagagctaagaccaatggctagacgttaaagcaaggcagatttgggctggatacgagggagacctttctgacccaaggctcctactcctgagaggagtgccccag

SEQ ID NO: 17595 - DNA, 1492 bp, Artificial sequence
  DNA replication origin
ggcaggcctcatggggggccccagtgaggggtgatgggtctgcactccaaactgctggcaaaagcactcgcacaagacaatgagagcaagtgccaggtggtgacacataggcctagacagccagccagccagcagagagagaggagagaggagagagaggagagagaggagagagaggagagagaggagagagggagagggagagagggagagggagagaggagagagagaggagagagagagagagagagagggagagagagagaaccaataacgaggcaaggaagggagggcaggcaccctctctggtgacacctccacactgtaccgaatgccaaatgcaggtggtgtgagcagggcgcactaacctgcctaaaaataaagcaccaggggaggggaaggtaagaaacgaaccagtctgaagctgcgagctggttttttcctccttatctgagacccactggtattcgaaggcatctaatttatcctgggcccactgggctgtggtcaggaggccagggcctatgcagagttagtcgcgtaaggtgccgcagcctggagatccaggaagatccttcccagaagcatttgggagccagattaactgctaagtcaaacatcctcagcaccaagggaaggaagggctaatactggcttgctgagaatagtgtggggtggacgtctgatggggttgaaaacttggcatttggtgtagccttgaggggaagagatagctaaaaaatatcagagcctgcagccaggggctctggttgctacactagggtgaatgattaaattgggtggggacagaggcggggagaggcctggatgactcccaggttcctgactaggtgaatgggaagccaggggagggggcatttactgaggtgaggacccccaaaaagcaacttgggggagcagagtgagttcagtttgagacaagctgagtttgagggcaagaatccaagaggtggctgggaagtggctggggaagcagccacccatcttgcccctccagcctcagtttacctcctgcccccttccttgcagggtgaatggaacctgcagcccctgcccaaggtcatctccacactggaagagcccaccccacagtgccccaccagccagggccgaagccctgctggccccaccgttgtcagcattggtgggggcaaaggctgaggggggacctactcctccccctcctccatgctgtccctgtgggctcacaccggcactgtgcactctactctgcgacgatccccatggaacagccctgcacgcccaggatgaaggggccagaccacgcccctgcctgagaccacggtccaatccagccttcttcccccagggtcccctgcatggctgagagggtgtgggtgccctgttgacctaccctggaccgagtggaccacgacctcgtccatttaaacccggctgactcagtgcagggacagcctgcacagtggtccagggtccagccctccgccag

SEQ ID NO: 17596 - DNA, 931 bp, Artificial sequence
  DNA replication origin
gggagagggagggtgagggagagggagggtgagggagagggagggtgaggggagagggagggtgagggagagggagggtgagggagagggagggtgagggagagggagggtgagggtgaggggagagggagggcgaggggagagggagggcgagggagagggagggtaagggagagggagggtgaagggagagggagagggagggtgaagggagagggagagggaggctgagggagaatgagggtgagggagagggagggtgagggagaatgagggagagggagagggagggtgggggagagggagggagagggagggagagggagggagagggacggtgagtggagccgtgtcgtcgtcatcctgtggcttctccctgggtgcctgtcaggctctgtctcttgtgtgacagcctgtccagctccctgaatcagctcagctcctggagagggggccccttgcagacaggtcagcatccatgggtcctttctgcttgcctgaccccgaccttctggccctccatgaagtacctgcagcctgatgtctgggtttaggagggcctcggacggcccctgtgacccagtgcgctctgctcaggggtttcctgtcaggctgcataatagctgccctgcgccgcggctctggactgttgcagttccaggacaggcgcagagaagatgctggcagtggagtcacagagaacagccctgccacactgctctgggactccgggcagttggggcctcagcgtcctcacgtggagaacagaaactagggtgacaccaaagatgtttacgaaacctccttccagcctcgtcctaatctgatggacaggtgggacccaaacagtgactccaggctgaggatgcaggaggtgccctcaacatcaccccagcccttccattcagggacccctttgcatagctgccgc

SEQ ID NO: 17597 - DNA, 927 bp, Artificial sequence
  DNA replication origin
ggaccgagctgttgctgtccgtccaagcatatgcactgtggtgctcaggggcacacggtagacgcgtgcttgctgaggaagggatagaatcggagagggtcgagtgctttaacactaactggcttctgccaagtgtttgacttgaggctgctcatagaaaccaacatgcattaaggagacatttgggcagaaccctgcaggaaacgagtgacccagccttggtgttctgggggaactgctcccagcagtggtaacagcaggtgcaaaggccccgtggcaggccagtgcgtatgtctgaggcacgcattgaggctgggatggagcaggccaggagccgggctcagagggcagcagggtgagatactggaggcccagcagctgctcctctgagggaggggtgctgagcagaggaggaacatggtcgggcttgggctttggtgggggggtctctgctgttgggtcagcgggcagggggccagcaggcctgtgaggagcctcaggccaggcgaggcagggatgccaggagggagtgatgagctgagtccatgcggctcacgggcgagggtttggcgttgtggtggttcccatggactgggcgaggctcatagcacccgacagtggatggggtgtgctgagagggtcgggggagggtaggggacagagacagcttccgcgtgcatgatgaagagtggagggtgctggccgcagctgccgggaaagggactgggatgcggtggaatcatgcagtccccagcctggcccacaggcagccgcgatgctgtgtgcttttcatttctcacctgggtgaccccaacctccgcatctctggggtagagggaggggtgtcaaggcctggtccttggaatcctctggcttcattgccacgccagccttggacagggagtggggatatttttagtgtggggg

SEQ ID NO: 17598 - DNA, 1422 bp, Artificial sequence
  DNA replication origin
atttgcctgttcaggtcacttcatatgctggaatcatccaatacatgaccttttgtgtctggcttcattcctgtagcatgttttcaaggttcatcctgtgataaaatgtgtccaaatttcgttgctttttatggctgaataatattccatggtgtatgcagaccatgctttgttgatccactcatcagctgagggccacgggggttctctcccctggttagtggttgcgcatagagctcagtgaacatgcgtgaacggaatttgtttacaaccccgctctcagttctcttgtgcatacttgggagtggaattgctgggtcgtatggtgcatctttctgctagggcagccacagcaaaaggccacaagtggagaggtttcagcagaacttttttttccccacatttctggagactgggaggtccaagatcaaggtgtcagacgatgggttcctggagagggctctcctggcttgtagtcggccaccttctcactgtcctcatgcagcggggagagggccctggcgtcgcttcctcctcctataagggctccagccgtatgggattaggacccaccctgatgacctcatttaacctaaagatcccatctccaaatagagtcacgtcagggtcagggctttgacatacgaatttatgtggggatgtgattccgtccatagcagatggtaattctacagatgggggttctcagggccaaggcagatcagggcaggtggtaattctacagatgatggttatcggggccagggcagatggggcaggtgctattctgtagctgggggttctcaggatgagggcagataggggaaggtgataattctacagatggggttctcagggtgagggcagatggggcaggcggtaagtctatagatgggattcctggggcaagagcagatcagggcaggtggtaattctatagatgggggttctcagggtgagggcagatggggcaggtggtaattaattctatagatgggggttctcagggtgagggcagatggggcaggtggtaattaattctatagatgggggttctcagggtgagggcagatggggcaggtggtaattctatagatgggggttctcagggtgagggcagatggggcaggtggtaattctatagatgggggttctcagggtgagggcagatggggcaggtggtaattctacacataggggttctcagggtgaggcagtgagggtagctgcaaacactgggctggaggcctggttccaagagtcagggcctccttgctctccgcacccttgggtgtaaagtggcggatgtggctctctgccctgcgcaggggtatcaggccatgcgtgacagatgcctgttccccactcctgctcaggaactccttggacaaggctgcgtgttccaggagcggcatggctggg

SEQ ID NO: 17599 - DNA, 746 bp, Artificial sequence
  DNA replication origin
gctcagagactcctggttgctcccctcaggccagagccagaacacgcgtgggtcgtccttcatcatacacatgggagacacgcacagcgagggggcgtcccgggagaccaggcagcctgagccgtccctgggtgcggggcctgtctgggctccgggctgcgcgtgagggtcccagggctgaccgggcaccagggggcttccaggccatggcagccgccctgcgcgtgagttccttttgaaatcagataagaggctgtctctccagccccatatctgtcagctgcatggcccttggtcagtcgctcctgttctctgagcctcagtttcgccacctggaaaatgggaacaatgtaccaccctcttggagcgcactcgaggctcatgcgtgtggacgcttggcccagtacccaacagaggcagagccagagtgtgggctgggctgttttttcagggaaattccttggggaccaggtgagccagggaagagttgctctttatttaagtgaaaagggtggtctgggccggcctggtccctctgcccacttgctcacaggccgaattggcagctgggactctgtaggtcactcgctgctcctgccacccgacgtgcacctcactgctgcccccaagaatcctcccagaccttcactggctccatcaccccctccttcagctcctggtcagcatagcctggcgcaggtgtgggctgcctttgccgtggccttgccgtgtgactgtgaacactt

SEQ ID NO: 17600 - DNA, 1114 bp, Artificial sequence
  DNA replication origin
tgtggcttcaacagcgcaggtgagtccgggcagcagccctcctggcccccaagagggaggtcctgtcattcccagagctctgggggaggcgggcgcaggagcaccgtggcccccgacagtggtggggacaggagaggctggggagtccagccccttctgcttcccagagagtgcacctgtgccagggtccagtccagcagcagtccaatcaggaggcgtgcagcaccccaggtgtgagagcagagcttggagtgtctgtgctgtccgtggagatgggggcacatgtttggacatgggtgggggaccctggggggcagaccgcagccctgcgcttctcttcctgccaggaatgatgctgggtggtggctgtgggcaggagctggcccactggatcatccatgggcgcccggagaaggacatgcatggctatgacatcaggtaagtgcccattgggacctaagggcagggcccgccactcaggacaggtggcgtggggtaaacagcgagggctactgagaaaggagccttgcctgaaatccaggtggcttcctggaaggggcagcagtgagggaggaaggccaccagcagaaggtgggcagtgctgagggggtggctggggggcaggtccacgcccctttacagctttgaagatctcttgtcccagggtcctgcctgagcccctggacagctctggagtcatcagtgggatggcatcaccccacctcacagatggggagactgaggcctgggggcaggagggagcggggctgagctgggaaaactgtgctgagtgtgtatgccgcggcttgcagccaggcagccccggctgtcccgttcaatcgtacactgacaaagcggccaggaatgagacccagtgcaagccacttcctcgtctctaatgcagggtgatggggaggggctgtggaggttctgggagcagggagggcatttgtactggtgaggcacccagcatggggtctgcacatggaaacgctaagtcatccccagccgaggcatggactggggtgctggtggccagagccggtgacggcagcctatcccgatggccttctgccagtcagggccatctcttgcagagcacaggacagtggtg

SEQ ID NO: 17601 - DNA, 1215 bp, Artificial sequence
  DNA replication origin
tgggcttggccctgggaggcagcgctgagcaggacatgtcccagccctcgaggagctgacggagggagggagcaaatacttaaataagcaaaaaacagacggtctcgtaaagaaaatacgatgaactgagggccacgcgtcactgaggtgccagctgctactgttggcaccccagcaccacaccatgttagactctagatgaggaagcggccggccctggtctgagggaccccagggcacttcgttcgtgaacgatgatacggggatggctccaagtctggggggtcatcctctgcatgcagatcaggagcaagtgccgtcccgctccctggagagcaatcagggcccccacgctaggagctgagggggcagagagccacggggagcctgggctaagagcctggccaggagaggcagggctccttgaggggcagaaggtggcagggccactgcaggggagggtggaggaggcaggctagaggggcagggccctacgtggagggcctgggttatcagggcagagggcagaggccggagcagccatctgggtgagagacaaggaaggctccagagaaggtgacgatggggcagaaagagtgagctgaggccgggtgcagtggctcacgcctgtaatcccagtactttgggaggccaaggcaggcggatgtctggagcccaggagctcaggaccagcctgagcaacatagcgagacggcatctctacaaaaaaatcaaaaaattagccggatgtggtggagcgagcctgtagttccagctactcaggaggcggagaagggaggatggcttgagcccaggaggtagaggctgcagggagccaaaatcgcaccactgctctgcagcctgggcaacacagcaagacctttaaaaaaggggggattggggaggtaacctgggctgggtttggggatggcccagggagcaccttgggagggctggaactatttctaggcccagggagggcaggaaagaagctctgaacaacctcacagggaatctgcggggagcgctatcaagagctagcggaggggcagctgcagggaacaagggtctcttggatgtttcacaaatgactcatgcgggttgagtaacccgaggacacatgggacctccaggcaacatggccaggggccaggcctgcggctcccaccctgaccttggtgagctccaccatcctggaatgagagctctgcctgc

SEQ ID NO: 17602 - DNA, 1242 bp, Artificial sequence
  DNA replication origin
ccaggcttccctctcactggccctgaccctaaacaagggcagtctgttctcacactgaccctgccccacagcctctggccctggctctctgaacggccatgctctgtgcacgctccttgtccaccatgccaccctcaagagcctcacctagatgcagctgcctcctccagggagcctcccctggtccactagggctgggaattcctatagcccctgagaccccatcagagcccttatcagcatgttctggaattgcacatgtacttgtctgtacctccccccagctctacccagcaagaactaggtgtctgtctgtgttatggccacagcttctagaatagggcctgaaacaccaagctcacccatcaatgtctgatgcagagagggttcaatggaatgtgaatggttggattaatatgtgggtggatgctgaaggaagggcagagggagagatgagtggctagagggagggagggagggattgatgggtagaagtttaggtgggtgggtggatggaaggatatatgaaagaagggatggacagatgaacatgtggataaatagatgaatagatagatggagagatggaggacggaagaatggatggcgagatggcaagatgaatagagggagggaaagagtggagggaggaatggatgaagggaagggggatgggtggagggatgaaggaataaatgggagaaggcatggatagatacgggagtagatggatggagagacggatggagagatggagggctggacagagagaggaatgagtaagggagggttgcatgatgaacggatggaaagaggggggtcagtaacaaagtggcaggaagctcccagccaccatccctggagggaggagttgaggacaggagagaagagagggcaggaggcacccagccccaggtgccaggaggtgaacccaggcccccaacctcccttggcagaaggctctcagggaggttattcatgccaggaaccagcaccctctgagacaggcaccccaggcacactgagagcatgcaaacattcgggtcttccccgaaactcctgggcacagaacatggcaaaaagctaggctgcctgcaccacgcaggacaggctggactgtgttctgggcatcaaagagaggccaggtcctgaggaacaagggggtcagccccaacagggatacgcctgtgctacctagtttaatcctcataccacccggaaataccccatgttacaatcccc

SEQ ID NO: 17603 - DNA, 1051 bp, Artificial sequence
  DNA replication origin
cactctctgagctgcccaagggcgggacctccctcacattcatcttggtccagttattttctgctcaacaacctctccaggccccccaggtcctgcagagaaagaccttgcagagaaagacacccatggttgaatatcagggtatcccctgatattcgtctgggggaaggaggtgcagtccactccctggggagtgatggcacccaccctcccgggcaggcctgctgtggcagctgcggcccagtgacgtggaggtggagcttctggcccacactcggcgggtggtgagccgggagctggaggaggagacgggactacacacgggctggatccagaatgggggcctcttcatcgcgtccaaccggcagcgcctggacgagtacaagaggctcatgtcggtgtgtgctcccctgcggggggcaaggaggggggcttgggtgggtgggtgcactccctggggggtcatattggtgggtgcaccccctgtgggggggtagggtgggctccctgtgagggtggaggtacgctgggggttcatgtccgtgtgcgcatcccctgcggggggctggggtggggggctcgtgtggatgagtctgcttcctgtggggtcgggagtggggctcatgtcggtgggcacccttctgccgcgagagaaggggacacgccacagggaaggagccccggcaggtgacagatctgggttccagcccttgcgctgccccttgctggctgtgccacctggagaaagcgactttgccaggcttcattcagaattcccagacagagaatctgattggcccagcttctccctgtcccagtggtccacgcctgaggacactgattggctgttcttgggccaatcaaatgtgggggcgtggtctatctgacagtctgaaacaggatcttggcctctcttgacagctggtctgactgggaaacctctcaggcccaaagtattagacctgtggggttatttatcttatataatagacactttgtgccaggcactggtctaagttctttgtcaatgacatacactattctcaccccc

SEQ ID NO: 17604 - DNA, 1013 bp, Artificial sequence
  DNA replication origin
atggggaagtggcaagaggaaggccctgggaggtaacaccatagggcccttatttccctgggtactcagcacagcccccagcgtgtcccctctgcaccccacccagctctgattctctccccagctccctgtttcgctgaggcctggagcccccatggcctcactgagccgagccctacgtgtggctgctgcccaccctcgccagagccctacccggggcatggggccatgcaacctgtccagcgcagctggccccacagccgagaagagtgtgccatatcagcggaccctgaaggagggacagggcacctcggtggtggcccaaggcccaagccggcccctgcccagcacggccaacgtggtggtcattggtggaggcagcttgggctgccagaccctgtaccacctggccaagctgggcatgagtggggcggtgctgctggagcgggagcggctgacctccgggaccacctggcacacggcaggtagggaccgggggccaggtaggggcagggaaggataggacatagcgaggggccacagcccattgctagctgggacagttcttggttcacaacaaccagcctggggaagagaccctggggaagggtgcatggccagtttgcaggtgggcggagctgggggcactgcttgccctcccagtcgctgaagagctgtggtgggaggagggagcagatgctgcttgtgtggcctggagagtgaagctggggccagagctggaaactccaggcagctgtccagagggcagaagcccctttcctggacagagccaccaggactgagggcattccagggagtggagaaggacggacggggaccattgagggtgaagcagacctgtgtcctccatgagcaccagaggcttctacagttctcattctcctaactaaccagggggcatatattaagcacctatggtgtgcatgtcccaggacagccaaccttctgccttcaccatttcagccatgggtgtcctggcaaactggatctcc

SEQ ID NO: 17605 - DNA, 1056 bp, Artificial sequence
  DNA replication origin
gacccaggccttctcactcgcctctgaaggcagtgagcatcctgtccctgggggtgagcaaactggggcatgtgctgagatgacctcaccaaaggagcctccctgcagtggacgggcccctggcccaagctgctgctgaccccacctttcctgcccaccctgcctgtgcatagctccttctgggcgcggggagctcgggcggctccagcaggcaggtggtgcctgggtctactgcagcaaccctgaggcgcctgtttcagagacgaggaaatgagggttggagcggaagggtgactgccaggtcgcctacgggtaatggggcatggggttcacaaccctgctctgccgccctcagagggagctgcccacagggctggcctagaagccccaactaagctggcctagaagccgcagtggtgggcggtacgctccgcccagatcctgggcggagacatggggctggcagcgagggtggggggcgggggaggcctggagttccggccaggccactgcttgggaagcaagaaggtgaaggcacctctgctgggccaagcactcttagggccgaggggcactgcagctgacaagaggtacttggaggtacacccccagggagggacgaggctggggcctcccctatgtgggcggggctgggcctggtcagatctggctgggatctccctctgcctctggctgcagggaccatccagctgcatgagcaggaccagggttcaccatatgggcagctgcctccccgccccctgccgctcctccccacaagtctgcctaccctcaccaggcgaaggtgccaggcgctctcctcgcttgacccccaccaccccctgagcctgggaggaggagggcgttcctgggtcctctgctttgcagtgaggttaagttgttgctcgaggccccagtcctgtgacaaaacccccacccatctgtctgatcccaagcccagggctgtcctcagccctcactcctgggaagctgactcaggtacgagacagagttggagggggcaagagagtgggttaatgtggaggcagctgtttc

SEQ ID NO: 17606 - DNA, 983 bp, Artificial sequence
  DNA replication origin
tattttatttcccttttgatttcttattccactcattggttgttcaggactgtgttgttaaatttccacacatgtccggccgccatcccatctaggaagtgaggagcgtctctgcccggccgcccatcgtctgagatgtggggagcacctctgccccgccgccccgtctgggatgtgaggagcgcctctgcccggctgcaaccccgtctgggaggtgaggagcgtctctgcccggccgccccgtctgagaagtgaggagaccctccacccggcagccaccccgtctgggaagtgaggagcgtctccgcccggcagccgccccttccgggagggaggtggggggttcagccccctgcccggccagccgccctgtccgggagggaggtggggggtcagccccccgcccgaccagccgccccgtccgggaggtgaggggcgcctctgcccggccgcccctacagggaagtgaggagcccctctgcccggccaccaccccgtctgggaggtgtgcccagcagctcattgagaacgggccatgatgacaatggcggttttgtggaatagaagcgggggaaaggtggggaaaaggttgagaaatcggatggttgccgtgtctgtgtagaaagaagtagacatgggagacttttcattttgttctgtactaagaaaaattcttctgccttgggatcctgttgatctgtgaccttacccccaaccctgtgctctctgaaacatgtgctgtgtccactcagggttgaatggattaagggcggtgcaagatgtgctttgttaaacagatgcttgaaggcagcatgctccttaagagtcatcaccactccctaatctcaagtacccagggacacaaacactgcggaaggccgcagggtcctctgcctaggaaaaccagagacctttgttcacttgtttatctgctgaccttccctccactattgtcctatgaccctgccaaatccccctgtgcg

SEQ ID NO: 17607 - DNA, 807 bp, Artificial sequence
  DNA replication origin
agggttctgattggtggggttaggacaggcagcctcaaggtctctggttgccgactgactgagaggccatcactgtggcctgcctgcatggccacacagtgggtgggtcggtccagcaggctgttccagctgttccacagcgaggtggtcaccaggaggcggtggcacaagacagatgtctggatcgaccacactgaggaactgggggagtgctgcaggcacagaactataaactgtggccgggcgcggcggctcacacctgtaaccctgacactttgggaggctgaggcaggtggatcaccagatgtcaggagttcgagaccagcctggccaacatggtgaaaccccatctctactaaaaatacaaaaattagctgggcgtggtggcggacgcctgtaatcccagccacttgggaggctgagacaggagaatcgcttgaacccaggaggcggaggttgcattgagccgagatcgtgccgctgcactccagcctggcaacagagcaagactccgtctcaaaaacggaaacgaaaacaacaataaaaaaactgtaaactgtgtcgagggtgacgagccctgcttctggtgtgagagagttaaacttatattcaaaatggacatcaaagcaacaggtataagaactcactatacttctttacattcgtgattgccttctgcagggcttaccacagctgcctagcagcagcacctctcccaccgcgttgaagacttgtttctgtgctttctccaatttctttctttcaaatctggtattgaagacatggaatgctcagatacacagacga

SEQ ID NO: 17608 - DNA, 745 bp, Artificial sequence
  DNA replication origin
tttccatttggtttcttcccgggcatcgaaaaggcacagagtgggccctcgctaggactgtggagtgagtggaagtgattcttgctgcaaagccatcgtggagaacttgccgcaaatgtgactctgagaaggactcggaagaggtgacacgaggtcctgagggtaggccctaatccaagaggacggggtccccatgagaggagggagagacctctgagatgagcatgcagaggcctcaggaggaaccaacgccctcccttactgcatctccaacttccagcctcagaaccgtaagaaaggagatttcagagttgaggcagccgggtctggggcctgagccacagcggtcacggcagcctgagccaaccaggacagggcgagggcaggggcggagcgagggggaggggcggagcgagggggaggggcggagcgaggggaggggcggagcgagggggagggacggagcggggcagggacggaacaccgggaggaatggagctaggggagggactgagctaggggagggtggagcgaggggagggatggagggagggcagggacagagggagggcaaggacggaggaaggggagggatgtgctcgcccagagcccccatgcctggtagaagaaaacactcagtaaatgggagctattttattttctctcagaacgcaaggccccatcacttctccttgattcacccttctgatcaccagcctgggacacccactccacggtcagctgt

SEQ ID NO: 17609 - DNA, 1331 bp, Artificial sequence
  DNA replication origin
gcccctggaggggagagtcaaggtgagggtgggccaggggtccacgaaccagggggcgtctcctgcccctgggagacacagttctcctcttggacttgaaggggtcttctgtctaggcttgggggagaaggggggctgggcaatgaatacagtccctcccctgtcccctcccctccccgtccccctccccccgagcacaggcagtcttcagtgcacagggcacttgggttggctgtcgtgggcaaggaagcgtggatgctgggggtctgagatcaaactcagaagttgccgggcaccagcctctcaacaggcagccatggtgtggctgcccatggagctcactcaatactggggctgtgaacgtgactttataggtacgtcctcatcgaccttccctagcctgaagagtcagtctcactcaccaaattttctatagaactctgaaattcgctgattttcctcaaggtctccttgtcccgtttaacttcattgatgtacatcgccaagtccttgaaaacaagaggcagaggtgagcgggctgtgctgggtggggtgtgtgtgactgtgtgtgtaagcaggctgtactgggtggggtgtgtgtgcatgtgagcgggctgtgctgggtggggggtgtgtgactgtgtgtgaatgagctgtgctgggtggggtgtgtgtgtgtgagcatgtgtgagcggactgtgctgtggtgtgtgtgtgtgagacagcatgtgtgtgtgagcgggctgtactgtgtggggtgtgtgtgagcgggttgtgctgggtggggtgtgtgtgactgtgtgtgtgtaagcgggctgtactgggtggggtgtgtgtgactgtgtgtgtgagctggttgtgctggttggggtgtgtgtgactgtgtgtataagcgggctgtactgggtggggtgtgtggtatgtgagcgagctgtgctgggtggggtatgtgtgtgtgattgtgtgtatgtgtgagtgagctgtgctgggtggggtgcatgtgtgtgtgtgtgtgagcgggctgtgctgtggtgtgtatgtgtatgagtgattgtgtgagaacatgtgtgtctgagtgggctgtactgggtagggtgtgtgtgattgtgtgtgtgattgtgtgagcaggttatgctgagtggggtgcgtgtgattgggtgtgtgttattgtgtgtgtgtatgtgagcaggttgtgccgggtggggtgtgtctgactgtgtggttgtgtgtgtgagcaagctgtgctgtgcagggtgtgtgtgtgtgagcgtgtgtgtgcatgcacgcacatacatgcaggagctcagcccccaagggacccccccccccac

SEQ ID NO: 17610 - DNA, 1637 bp, Artificial sequence
  DNA replication origin
agcctcaggcgggatgtgaagtgaacatgaggacgtgtgaggctgctgaccctgctctggaggcccggccaccctctcctctcctgctccccgagtggctcctggtcagggcagccagccgctctgcaggcatcctctgggcccagctgctgcaccgctccttggtcaccacgtggcacagagagcatcgcccaagcaaacacgcccgggtggcggccccaggctgggtggagacagacctcaggagccctcctgctttctgcagcagcatttagccatggagggatacagaggccagcagggccctggcagaggctgacctcagagccaggattctcagaagccagggcatgggcagggcttcgagggaactggaaggacctgggccagggtgtacagatgtgcgtgcagaaaggccgctggccaaggaccagagggtggggcagcaggagggggcccggccggagcaaggccagcctgggcccaagggggcagcccaggtctcccggctggaggcatcacggccaccctggttggtttttctccccagtaaacactggcagttggcaatgaagactcagaagtgctagggaaatgtcccagggccaggttgaccaggtgcctacaggaggcccaggtggggtaggggaggtgaaggctgatcctcagcactctaggagctcagcaggccagcaggagagaggactcagatgcacaagagtggaagagctgggcaaggagcttggagtctgcagctctggtcactaggccgggccatgccttgtgcaggacactcccagccccccatggaagctttgttccattttacagatggggaggctgagtgtggagaggctggggagcagctctaggtggggtggggggaatacgcgaggagctagctcagtgcctgccttagagcaatgttcaggagctgaagccgtaatcccaccccgattaagctcagaggaggagcagggacaggcgcaggccgggacttcaggggcttcagaggaaaggagagggcaccctccttttgggtagggggtacctggaggcagagctgggagggccaccaagtctccttcgcctgtcagagaggccctatggccctgcctccggaatgcactcccaggagataggtggccctgcagtgaccacagtggccgctgccattttccagtggccgccatctgccctcaccttctcaatgtcctccagggtgcggtagtacttggcctcggtctcctggatctccagcaggcagcagttcctcttgtcatcttcagtcatgcccattttctagaggagggaagggggagtcagcaggaccccatgggcccggccacctgccacctgcacatctgcaccgcgacacccggacacctccacaaaagaggactccttgggtttggccacgaggtcactgagtgtgcagtgctgcagccagatgggtgacagagagggccaaccccttcccattcattttgcagatgaagaaactgacgcacggggaggggatgtgacgtggggacagtgccaaggaaggcttggaggcagagccttctagaatcccaggctcctactcctctgattctgaatctcgattcttcaccagactggggtgagggcctcag

SEQ ID NO: 17611 - DNA, 981 bp, Artificial sequence
  DNA replication origin
gggtggatggatggatgggtgggtaagtgggtgggtgggtgggtagatggatggatgcatgcatgcatgcatgggtgggcgggtgggtgggtggctagatggatgaatgggtgggtggatggatggatgtatgggtgtatgggtaagtgggtaggtgaatgtatagatggatggatgggtggatggaaggacgaatggatggctgagtggctagctgggtgggtgggtggattgatggatgggtgggtggatgaatgggtgggtggatgaatggatgggtggatggagggataaatggatggctgagtgcatgagtgggtgggtagatggatgaatggataggttggtgagtgggttggtggatggatgaatgggtgggtgggtgggtggatggatagatgggtgggtgggtggatggatgaatgaatggatgtatggatgggtgggtggatgaatggatggatggggtgggtgggtaggtgggtgggtggatggatggatgaatggatggatgggtgggtagatggatggatgggtgggtaggtgggtggatggatgaaaagatgcatgaatggatggatgggcgagtggttggatgaatggctaggtgggtgcatggatggatggatggatgggtagctagatgggtaaatggctgggttggtgggatgggtggatgagtggtagatgggtgggtgggtaagtaggtaagtggaaggatagataaatgggttgtcgggtggctggattcatgggtgcatggatgcatgtctggaaggacagatggatgagagagtagttggactttgtgggctgacagacagatggatgagtggatggatgaacaaatgagtgggttggtgggtgggattagtgggtgcatggataagtggacagaaaggtgggtgtcagatattctcaggctgctcttaatcccctgaaatggcagcctcaaattagatacgaggaagtttttttttt

SEQ ID NO: 17612 - DNA, 1105 bp, Artificial sequence
  DNA replication origin
agcagccacgaccaggcgtgcacagggctgagcacctcccaggcgtcagctcattaaatgttccccttgatcctgggagtcagagattttcgcccccattttgcagaggaggaagttgaggctcagagaggtcacctgtagcccagggccaacccgttgggcagcgtggggctggaactttatctgacgtcctcaagtggggtctgcctgggagtcagggggccagggttccgggcccagtattcatctaggcatggagcccctggcccagggtgtccgggctcttcccgttcggttcttggtaggactggcctctgacagctgagaaaaccagcctcatgcgtcatctgctgaccctggggacaggagaggctccactgcccctttagggttgctggtggggagactgaggcaggcctcaacccctgtccagcaccgaggtttcagccctcccggaggtggggctgctcacgctgaggcgcggtgcaaggtcccggctagggttggtggctgcggggtcctgggttttctgctatttggagaattttgttcttggatcctcccttccctgagcacccacttggtgggagggggcagctgcaggatgggaaccctgcacgtcgctccaggttggggatctggcattttgggagcagggagggtttggatggaacaggtatcccaggaaggcagaggtgaggcatggccagttctgattggaacttaaggctgtaggcctgaggctccaaggtgggtagttgggggcctggacagctggccctcgcccagccccatcccacccagggccgccttcaggcccacggctggcaccacccacagggtcaaagcccagttctctgctgcaaaggagcccagccaagcccatcccctcggggttactgtgggagagtggggctccatcctcatcttcacgcttgctgggagcccctgcccagtggcctggtgacccgatcactggggcggacaagtcgctccctctcatccctgccgcccgtcggccagtcatgttcacctactgtgtgcagcccctccaaggcccagagttcccgggacacggtctcagggtggcagcagagggatgggg

SEQ ID NO: 17613 - DNA, 1278 bp, Artificial sequence
  DNA replication origin
ttggcccactcttcctggagctttcaacaggatgtaaaaatgatacccaaatatatacttcctcatctcagtgggtctggatcaacaccttcaaatgcaggagtctgagagaccacctgagccttggggaccagcagcccgaatctttgtgtcttacactctgtgggtgctccttgtctatgacatagatggataagtcggtgggtgggtggatggataagtgggtgggtgggtgaacagacggatggatcagcagatgagtggacaggtgggtggatggacagatggatggataagtgggtatgtgggtggataagtgggtgggtgggtggatggatggatagattgatgagtggatgggatgggcagatggatggataagtgggtaggtgggtgggtggatggatatgggtgagtgcgtgggtgggtgggtggatggatggatggatgagtggatggatgggcagatgggtagacgggtgggtgggtgggtagatggatggatggatggatggataagtgggtgggtgggtgaacagatggatggatggatgggcagacaggtggatagatgagtgggtgggtgaatgggtggataaatgcgtgggtgggtggatggatggatggataagtgggtgggtgaacagatggatggatggatgggcagatggatgggtgggcagatggatggatagatgagtgggtggatgaatggatggctggctggatggataagtgggtacgtaggtgggtgggcagatggatggatggatggacagatggatagataagtgagtgggtgggtggatggataagtgggtgggtggatggatgaattgggggtggatggatgaatggaggggcggatggacagatggtaaatgggtgggtggatggatggatggatgaatagatggacggacggatggatggatggatggacagatggatggattgattgatggatggatggatggatggagaagcggatggatggatggatggatggatggatggatggatggatggatggatggtgggtagatggatgccgactcagagagatccctttgccccagtcccttctgatgaagtaaggagagaagagagagaagatgagcccctgacggcagcctcatacctatctccctgagtccctaatacacccttgacaatttctgtacaaatgtcctccctaatggtggggggtcccaaccacccaccatggaggcaccactgaccctattttgccactgagaaaacccaagttcagagagg

SEQ ID NO: 17614 - DNA, 1286 bp, Artificial sequence
  DNA replication origin
tggagggggagacagaggggaggaatagaagggaagggatgaagggggagggataaaggggagggatggagggggagggaagggagatggaggggagatggaggggggatggaggggggacggaaggggagggatgaagaggagggatgaagaggagggatggagggggagggatgaagggggacagatagaggagaaggatggaggggaggcatggagggggaaggatggagagggatggaaggcgaggtatggagggaagggatggaggggaaggagggaagggagggaggggaaagaaggagagggatggaggggagggagggcgggggatgggggagggatggagggggaagcgggagggatgaagaggaggaatggaaggggagggatgaagggggagggatggaggggagggatggagaggaggcatggaggagaggcagggagggggagcgatggagagggatggaaggagaggtatggaggggagggagggagagggatggagggggatggagggagagggatggaaggggatggagaggagggatggaggggaggcatggggatggagttgggagaggtggggatagagggcgtggagtgagaatggaggagaggggtaaaagtagtggatgagtggaccaaggcattcgggggagaggtggagagagagggagagaggaaaaggggatggaggagagggacaaaggacggggtgccaggggtgtggggagacgaaagggatgaaagaggtggggtgtggggaggagggggaaggagagggatgggggcattgggtacggggtggaagggacccaagggcggggtgggggatgatggaacagaggccagtggtgcaggggaggggtagagggggataaaggggagatgaggggaggggtggggatcagcaaggggcctgctcaggtgccagtgggaacaggtgtcccgggttggctgcatggggctgtgctgctaggaagtgaggcctcctggtgcttccgcagggctgcagggctttgtgagccaggagtgtcctttgaacacaaacaagcctctgtttattttggaaatgtgggggctgaggaggtggggagtgaaagctgacactcattagagcacccttaccagtgcacacacctctgtctataagcacactggggaggagacagaattaagtcacttggccaagatcatcccaggggtcagcaaaaatcaatctgcatcaatccctgggccccatgcagggctcggccaaagggcagccgagcacctaaccc

SEQ ID NO: 17615 - DNA, 1044 bp, Artificial sequence
  DNA replication origin
gcggggtgggggatgatggaacagaggccagtggtgcaggggaggggtagagggggataaaggggagatgaggggaggggtggggatcagcaaggggcctgctcaggtgccagtgggaacaggtgtcccgggttggctgcatggggctgtgctgctaggaagtgaggcctcctggtgcttccgcagggctgcagggctttgtgagccaggagtgtcctttgaacacaaacaagcctctgtttattttggaaatgtgggggctgaggaggtggggagtgaaagctgacactcattagagcacccttaccagtgcacacacctctgtctataagcacactggggaggagacagaattaagtcacttggccaagatcatcccaggggtcagcaaaaatcaatctgcatcaatccctgggccccatgcagggctcggccaaagggcagccgagcacctaacccgcctggccgtccctcctgggtctccgtgcctgaatcgggcgtcagagtccagcagagacaactgtccttcggctccaacagggacacaggggcacaaggagctcaggagggcagggcaggctgagctgcagggctagagggaggagaggactcacaggccagagatgcaagaggaggggcgaatccgggccaggcttcagctcagaggccattgcagacgagaaaagcggacctggcccagccttggcaataaaaagcattccaggttcttgtaagggggaaagaaagagccaagcggtctccatccacggggaacttgcccgagcccacccccagaattatcatcaggatgatgtctcacaaaaagacttcaaagtgagaccaggaacaccatcttcctggtcgtgaggagcaggttttgctgggcggtgaggggccctggcccttagacacgcagtaaggcggactcagctgccctttctctcagaggacagcacggtccaagatctatggctctgagtccgatctgggcacttaccagacagcctgagtcccacctcccgcgaagactcctcttgccaccct

SEQ ID NO: 17616 - DNA, 1373 bp, Artificial sequence
  DNA replication origin
gagcccaaaggagaggcccccagaaaccccagagctccccgggtgaccctgcacaaggcggctgttgggaaattttgccacagttgccctctgtccagggaggcatgagggcccagcagggttcacaggctcccaggaggaggaggggccagccctttccccaccgtctcaggcagatccttaaccccaaggggaccacaaacccctccaggaatctaaggaaggctgtgggcctctccccagaacacagggcaccccaagaggctccagatcctggcgcccaccctggacccccagagaaagaagtccagacttggggcccctgaggtgaaacagcagcctgtcccccagcagggcctgccatgacgctatgaccctaggcagggtccagagctgagcactctgctagccctcaccggccctagaccctggggtaaaggacaggagacagcacaggcggaacacagagccctggccatcggtgtcaccgctgttgacgtgggaggcaggaggaagggcaggggttgatgttctgaagatcgcgtggggggcgtccggagatggtgtgggagagggcggcaagaaagagggagtcaagctccaagccgaggcaccgagggccgcccgcaggagaatgacaccagcacaaggggcaggggagggggacaggggctcaactcctacagcaaagagtcaacaggtgttgaaagcagggaatcaagggctgggctctatggagatctctgagggctccaaaggtgaccgcaggagaattaaagacacagttataggtgcagctcctgggggaggcctggcggggctggggtcggggaggcaggaggccaccattcatttcaagcctgtctgtaacatgactctttctgccgtgcgcatctataattaccctgcaaaaataaaaaataaaaatgtaaatgagcaactcaaatgtccgtcaacagatgaatgggcaaacaaattgcggtggagccactatggactatcacgccgacgtgaaaaggagagaagctctgattctcaccgcaacgtgccagcgggtgccagccaggcacagggacaatctattgtgacattccatttataggaagtttccagaccaggcaaatccacagcaatttgaattagtggctgccaggggctggggaaatttgggggggatgaggagttactgctaatgggttggggtttctttttgggggtaatgaaagcgttttaaaattagtggtggatacatggccttgtgaatacactgaaaacccctgcactgcacacttcaaacgggcgaaccccatggtgtgtcaactgcatctcaacaatgctgctactttaaaaagagcaagaacatcagctttcta

SEQ ID NO: 17617 - DNA, 791 bp, Artificial sequence
  DNA replication origin
ttccctctgtcttttcctgctgcgggtccaggctcaccccatctccgcccatctcctggccccttggagctcatgctttaagtggccgcaaggactatggtgccacttcaaaggggagggctacccctcactttagcctccacccagttccactctttggggggccagtgaaggaaggggggcttggtgggaggggtgcccccagaccctccctccactctctgggggaaggcagagaaggtagggggcgtggggtgggaggggcgccttcagaccctccctccactctctgggggaaggcagagaaggaaggggggtggggtgggaggggcgccttcagaccctccactctctgggggagggtggtgaaggaaggggggcatggtgggaggggtgccccaggccctccctccactctctgggggagggcggtaaaggaaagggggtggggtgggaggggcgcccccggctctccccactgtgccgtctgtgccactgcagttggactgccaatgactggcattctctttgttactttcagcctggttgtttcaaaactcattaggcttggcatttctttacaaaggctggcatggcccgagccgagcggagagtgggaattgatttacgaggatggcggtggatctaggaaatgtcagcgtcccctccagagtccataaatcagttttgattccagcgaggccttctcccatcccctaaaacatctcccagggggctttccaacgtggtggagcttaaagttagtcagccgaggagctagtctcctgggt

SEQ ID NO: 17618 - DNA, 704 bp, Artificial sequence
  DNA replication origin
agttctgtgtggagattctgggagcgcagctgcctgcatgcccactgggcccacaatggccttgccctcaccagattgtgggtgcctgggtccccacacattttcagaactgcaggggctgcaaaaccaaaccaggcaagcggttggaagtccgctcccgagggggcctgctcctggcacctggtttgtagctgcgtctgcctcagaggggtgcagcgctggcaagggcgtggggacgccctcccagcggttcccatagtggaggcgcagacccactacagcctgctgccttccactccctgagtcttcctgggccgttaggttcaaagattccagacttccaaggaagctctgggcttggtgcagggtgcctttgtgtaccaggtggtgctgtgggggcctaggatgggctgggggtggacaccaggttggggtggtcactgcagttggggggcgggtccttgtctggcttgggggcatcagggaaaggtctgagaggtgaggggagatttccaggggaagagggtgtgaggttgagtgaccgagggcccccactggggaaggacagggtgcccactggcctcgcatggggggtttcagctttgggtgtggcaatgctggggaacgaagtctcagtttctagggtggcattttccctctgtcttttcctgctgcgggtccaggctcaccccatctccgcccat

SEQ ID NO: 17619 - DNA, 1542 bp, Artificial sequence
  DNA replication origin
ctctgggatggtgacgccgacgcttttgttagtcctgggcctgtgcgcccgggccctcgttggcacccaccaccttccctttctacaaagagggctttatcccgtggagagaaactttccaagtgaatcactgtcagttagcattcagcgcaagtcacaggctccgcgggcaattcatcttgcgcctttcttccttcttatcgagtgggaccaagcccagctcggtgttgcctgtccgcctcctccatggagccttggataaccccgctggctaggagcagagaggcgtgtttgagcaaagcccctccttccctccattctccctgggggagcagccgtggcctgtgcccgtttcctgccaggcttccttcagaagggaaggtgcgtgtgtgcacgtgtgtatcttgtgtgcatgtgcattgtgtgtgagtgtgcatgggtgccttgtgtgcattccgtgcatgtgtgcacatgtatatcatgtgtgcatcgtgtgagtgtgtatgtgtacgtgtgtgcatcgtgtgtacatgtacatcgtgtgcatgtgtgcattgtgtgtgcacgtgtgcatcgtgtgtgagtgtgcatgtgtgggtcgcgtgtacatgtacatcgtgtgtgtgtgcgttgtgtgtgcacgtgtgcgtgtgtgagtgcatgtgtgcatcgtgtgtacatgtacatcgtgtgcgtgtgtgcattgtgtgtatgtgtgcatcgtgtgtgtatgtgtgcgttgtgtgtacatgtacatcgtgtgcgtctgtgcattgtgtgtgcacgtgtgcattgtgtgtgtgtgcatgtgtgcgtcgtgtacatgtacatcgtgtgcgtgtgcacatgtgcattatgtgtgcattgtgtgggagtgtgtgtgtgtgcgccttgtctttgagactggcaccagtttttctaggggtcttctccatggagacaaggggcccagtgagggctcctgttttcagggtgctttgtaaagtgggcacagccccttgtccggcatttttttcagtagagacttcctcattgcaccacctgtgctccttgggagaaagtcagctggccgttggcaggtggagtctgtagaacgccagatcgtgctgaatccccttgaaaatatcaggttgaggggtgtggatggtggctgccgggaattcaaaaagtgtagtcgtgaaaccacgtgatcacaaggagggcgggacggtggtgtgggggctgactgtggcttccagctgtggatgtccccactctgccccaccatggagaattccctgatgtccccagagccaatgaggactagagtcaaggcgtcagaaagtgggtgtgaactccctgagccaggaaaaggggacactaatggagaacaggccggtgctcttccggccaagcggcctgtttcaaagcactccttggtgttttcaagattcccagacacagcacccgtgcttccctgctccctcccaggtccttccccccgtgcgagctgtcctgggtttgatgccgcttggcccagcactggtgtggcgctgagtggac

SEQ ID NO: 17620 - DNA, 1478 bp, Artificial sequence
  DNA replication origin
tcaacgtgcaacaaacacggccgaaaccgtcaccgaaagcactgcgcctgtctgctgctggggaatcactccgtggttagcacccatcatttcgagaagaaagagtcaattgtgatgttctgttaccatcccagtcatttccagggatttctgagaagcggcatgtgcctggtgtccctctgtccatctgcccatctgtccatccgcccaccagcacctgctgagggcctgcggccctgcatgcatggcccaggctgccaaatcagttctgtcaccatggggcggcaaggcacaaggaggagcaagtgcgcgtgagacgcccaacaggagagatgcctgcacttcaaggagctttctcgcctggtgctggaaaggacccaaagtactcagtgccgcagcagcacatcgcaagtgcgcagtgaatctgagtgaaatccacgcacgcctgaaggcttccggagaaggcatcgcaggtccagccatgggaggctggggggagcgggagctgtggcactgcagccaagcacttacatgtgccacacacctgtggggcgggcgggggatgctgctgatgctcgagcagggcaaggtctgtgatgtgtgtgtcctcatgtgtatgcgtgtggggtgcccatgcacatacatgtgggggtgcgcaggtgcttaggggtgtacaggcgtgcatgtgttcatgtgtgtgcacatgtatgtgtgcatgctcatgatgtatgtaccagtgtatgtatgtgcagtgtgtgtctgcattacgataaataaagctaagcaaaaatacatctgcaggagggcaaggaccgagataaatcattctgaactccaaacaggtggagggtaagatgtaaacagatttttcctgttgtttaaatgtacttcgttttcattatactgctgtttgcgtgcaatgaatgcaagtgcactgaggtgaggaaaaaggaaggcagacactccttcctccggctaccccacagacacccacaccatgagaaactagggcacccctgcagatgggaggcagcggtgaggtcgcctccaggctcggccaagggtacaggaagggcagaacctgaccaggccatttccagccagactctgcttcctgtggggagctcctgccccttcaggtcctaaaccttcaatcacccagattctggggaccccacagggagcaacatagtcatgccaccctccacaagcccagccagggagtgtggccccatacccgatgccaaggcgaggctcctggctgcggaagctgagtcggaagcacggtccccacactcctccttactccccgcccacgctcctccccactccccacactcctccccacccccctgcttctccccactctccccatactccccactccccctgccatgctgccccaactctccccatgctcctcagtccctccaatgccccccaagctcctccccattccccacatgctcctccccact

SEQ ID NO: 17621 - DNA, 1437 bp, Artificial sequence
  DNA replication origin
ggcccgaggctttctgctgcctgcccctggggcctgaggagaggcagctttcttgttggtagctaggccagaggctggggctgggcttcgaagttggaggtgctgggccagcaaggctgggcccagggaaggagccacctccatctctgcagccccacatgtgtctgtcaaagggaccaggtacaccaaccacagggctgtgggtgccgtggacagcctcgtgatcgccactgccacgcctctgtgggctcctctgtagaacgggctgtgggggtggtcaggtgaggtctggtgaggtcccgtgagcctcggtggcctcgtgtgggccaaggtccctggctcccagcaagcaccgaacgtggtgccatcccccagcctccgcttgggaaactgcctttttacgagacttgtattttcaagacatggcgggcgggggttttcctcacatcgcttgctgtgtggggtcatcgggtggggcccttccccaggccttcctgtgcccagggagctgaggacctggcacttgtgagtgattggcccttggggcaagggagagatggttgagactcggtctctccttcaaggagtcctgcagagtctgaggggagcgggaggagtgtggccattgtgggagctgttgagtgggcagggagggtggaggaccaggatggcaggagcagcgggtgctgaggccagggggtgcagaccaccctgcacgtctggggggtggcaggaactctgagtcactgccttgaaggctgcagggaggcagggccggcttcatcctgggtgtgccagggaaccctgggcagggttggtgcagatgtggcgtgctcagatttggctttggaaagctccactgtgtctgcactacagggacacctggagagggaggcctggagccccagaggctggggcagaggcagatgggggtgtccaggctggggggtggggagagaagtgggaatggagagagatggacggccccgctggagcgcaggaggagtgggtgggcttggggtggattggacttgggtgatgaagagggtgctctggggtcaggcttgagcagtgcgatggacagtggggctcatctggagttggccctaggggttcaagtcccccactggccaaggttgcagggatgtctgggttctcccagcagccttcctggaatccgctctggtcagggttggggtgtttcagctccacccctgaggttccctggttggcctcaggcttcttgtctcagtggtgctgatgctggttggtgtccaggtttgctggacttgaaggtgggaggtcagtggtcttggtgggtctggccccagcctgggagtgaccaaacttagcagcctctggcactgtcagatccctggagagagacgtctgattggcacagactgaattccagatcctccctccttccctgttcgt

SEQ ID NO: 17622 - DNA, 772 bp, Artificial sequence
  DNA replication origin
tgatgttaccatacaccagaagaagcctgttctttcctggttgtgggactttggcacgtttctgaactccgagtttcgcggtacagcgccagtttttcctgtgcagagtgggtgtgaggatgcagggggttgacgctctgggcgggctgagcgctgggccaggcgggccagatgccagacagatggtggcattgaggtctcttcaactgtgtgcagacaggggggcttgcagatcccctgtgcccatggaccttccttgggccctccgtggcactgggtcttcactgcccgctgccttggtaccaaggcagggctccctggggattccttaccgttcccatctctctccaggagggaggctggttggtgttccaggcaacggcttccccagtgccctcctcctccgcctcccacccttcccttagcatcttcaaagtggtgatggggagcttctccatggacttgtgagacacccctcatcatgggagtagccagtgcctaactcaggttaagtgatgaaggaagatgggtccagtgggcacgtgagatctcgggccacctgcatcatgcctgggccttggttgcctcatctgtaaagtggggccatcatttctgcctgacgcctccaggagtgggtgggaggagggcttgggcgggtgtctgcagtcaggttcccctcgctggagtgagtggcaagagcctccgctgccttcggatctgctttgtgaggactcttgcgggaggccctgccgatgactctgactgtctgtgc

SEQ ID NO: 17623 - DNA, 763 bp, Artificial sequence
  DNA replication origin
ggtgtggtggtgcacacttgtaattccagctacttgggaggctgaggcaggagaatggcttgaacccagaaggcagaggttgcagtgagctgagatcacgccattgcactccagcctgggtggcagagtgagactccatctcaaaagaaaaaacaaaaaactcacagaaacagtgcacctgcagtatgaaaatttcatgcagggagggagattaggaaaaatatctgaaaagcctccttggagggacagtaacgaaaatgagggtgagaaacactcatcttgcgagcactggcgttcctgctgggcaggagccggggagcgtggggtggggtggggtggggtgggagccctggctgttagtgacagggactgaccgggagtgggacttgagggctgtgttgagtgggattccaggctcaggcctggggtcagtaggaaggacccggggctgcaaggacagcatagcctggcgttggcgaagagagagagttctctgccgagcgttgtgattgcaaaaatcctggcgttggtgtggggcaggatgagaccgggaggaatgctgggtgtgaggtgtgggggccgccgtgagagtgacccgtgtctgcctgcggtttgggacttggagatgggtcggggccctggcctcagggcggtggactcatggaggcaggaccttggtgggggcctggcgtgggtgagcatccgccccaccccctgtgcctctgttgagccctttcttgctatggggcgcaggtcatgagga

SEQ ID NO: 17624 - DNA, 1066 bp, Artificial sequence
  DNA replication origin
caggtgcaggtggcgggggtggcggtcactgctgcagagggcttccccggatctgttctcagagccccacggggactgggaagtctggactccattttatggctggagaaactgaggagaagggtagctgttggggagcagggctgggcctcgaaccaaggtggctgcctttgatatgagttccaggggctgcccaggctgacttgctcgggcaggattccctgctgcttgcaggctggggctcagggcagaggcagggcagctgggtccgcacagaggaggcttgggaggagcccagccttgcctggtggactcgctgggtccgggggctgcccctccccagctgtggtttgggaagatgggaagaggagggggccgtggctgtggcaggtggcttggctcagctcctgcactggaagttcaagccagagacttcctggggtctctggagccattggccaggcagcaatacgaaccctgacagaggccccttgagccctgctgctggggggtggacgggtgtctaggggtcccgctgctgggccggtagaggggtgtttaggggccctgctgccggactcgtggagggcgtgtaggggcctggatggtaggaggaccagatgggtgtgtgtctgtgtggctctccgctctgattgaatcctggcactgtcccctcccaggtaggcaacgacctccagagcctcagtttccccatctctgtcatgagaacagtcatagcagtcccctcgtagccatgctgtgaggatttgctaagggcaggcacagaaggcacacccttcgcacagtgcccaggaaatgaccgtcacctggactgtggcacgtagtgccctgtgtcgctgaggctgatcttgccatccactcctctgtcccgtggagggtgggccacctttgtacggctgttgcctgcacggggacggctgcagatgctcccttaaccctcacattggctgtgacagccccgcctgttcattcaacgtggagaaaccactttactgcatctggctgcacacaggggttgggagaaagacttcgtttctctgtgtgg

SEQ ID NO: 17625 - DNA, 1171 bp, Artificial sequence
  DNA replication origin
ccggttccgcggtctgcgcggcctgggatgggggaggctccggcgctgcgctcgctctgcggggccctgcgagtggcccctcatttcccagggagcctgccgagccgggtgtgcgcgtcgtgggtcgcatccttgggcctcgcgcctcctggccggacgccggtggaagagcgggcgcggtcgctgcgccggcccggggcgcggctggagggcccgggaggggcgcggggcgggagccctcggggccggagggagctgggttggccccgggcaccgccccctcgccggcctccgcctcttcccggacccggacccgggccacttggcgccagtcctggctcccgggtcgagccgcctcgaggatccccagggccacttggccccagtcctggcccccatcgctttcccaacacccccacccctccttcgggcgctgagtgtggcctttgtcgcggcggaggcacgcgtgcggccgcagggccaggcaggaaaatgcctgcccagccgaacgaagctgcttttcttggcctcttaagagggaacttggctaagacttgagagaatcgaggcttccgtcctgttctccgggggtcgcggaatccttaccgggagcagcttagaagaggtcgggggaggcagagcgggtggcagccgggtccacccagcgccgaggaggtgcggtcttccagccagctcagcagcccctcaccgcgcgcagtggcaactccatgtggagagggaccattcaccagtgggacttaggacgtggttcctgggaaggagggagagtgagtcaccagcgattccaggctgggcagcgaggcctctgccctttggcggtgactgcgtttcctaggagaccgggcctttctctgccgggttggggggcgctgacaaaggcaagcccagaggggaaggggccgccttcccactgggtaatgattacccagcactgcctggaccggcttagcaggagccctcagaggcctccctgggagccagcgcctcttcccgcaggatgtcagtggtcaggtgcaggtggcgggggtggcggtcactgctgcagagggcttccccggatctgttctcagagccccacggggactgggaagtctggactccattttatggctggagaaactgaggagaagggtagctgttggggagcagg

SEQ ID NO: 17626 - DNA, 1258 bp, Artificial sequence
  DNA replication origin
gcgcgccggatctccccgcttcacacacgcaagtgcctgcgggccccgggccgggctccacgcagccagtcgccgcagcgctccccaatccgcgccgccgggcgccgcattctgcgctcggggcgccccgcggccgccgcggctcctgccccgcccgagacaaaggcccggcggggtcgctcgctccgcgcgtcccgggcctgggccgcccgcgtcgccgccgctttgttcgccccacccgcagtccccacgcccggcgctgcgactcgacgactcggcggctcggcggctccacggctccggggcgctgggggcgcagggggcgcggccacggccgggcggggcaggggcggggccggagcactcgcctggcacctccccgtgtcccaagcgccgcccccgcccccccacttcctgccccgctaccgcccgcgaaagttgcggtgggcgggggttgcggcgcaggcccaggtccggccgactttctccaagggcgctcggactttggggagcccttctccctgggggagcgacctcgcccgtggagtgatggccgggcgtccccccgggtgcctttggtcctccgtggaggtcaggaggtggtccctgtcgcgctgggcgccctcgcatggccgttcggtaacgacagactcgggagagggcaccgggctgggccgaagcttactgagcccccttggcccatcaagccgccccggcgggatacccgaggctgaggctgaaggcacacgggcccaggactcccagagccctcttcctgtcctccgccctggccgggggcccataggaagacccccgaccctgcataaaggccaggattccccagcttttggccaaagtcctggccactcgcagctgcccagcgggcagttcctggcgtccagggcggaatgcgtgacatgagtgagggcaggaaggtgctctccggcccagggtcgcagccggccccggtgctgatccgccctgatctcccttctaggccacaccctgggtggtgggggcgcggtctgtccagctggcaacgtgtgacggtaggaggggcttcaaggacaaacagattctgcaactgaaattatatggatcctggctcagctgccgggaaccgcgggttttcactgctgattcactgggggacaccaggcaagtccaagcccttctctgagactggctcagcccggaggctggggtgcggtgtctgagggctcccaccctggactccggtggaatcctgggcctgtat

SEQ ID NO: 17627 - DNA, 1072 bp, Artificial sequence
  DNA replication origin
tttaccttttattttatttttgagacagggacccactgtgttgcccaggctggtcttgaactcctggactcaagccatctgcctgcctgagcctcccaaagtgctgggactacaggcttgagctgctgtacctggccccaccaaacttttgttctttgattcacatccatcctgccctcagagcctccaaggattctgggaggtgcacagggccggtgaatgtcctatgccgatcaggacctgggaaccagggaggcctgagtggctcagggccactgtggtgaagtctgtgtctcctgagttgggtcttctcaacggtcaaccccagattttctgtgcagcccctcctgggtgcagccaggtgccccgtggtgacagcaccaccagggggcagcaggtacccatggcattgttggcgggcggctgcctgggtcccagacctggctggtcctcttggccagagcaggcaggcccaggaccgtgaggacagaggcccccttcttgctgagggagccacctggggaaagagacatttagtgcatcaatgcgccggcggtccaggcgaggggttgggagagtgggtagctcttcttcctctctgagccctttctgtcccagcacagtgggaagcctctgggtaatttatccgtccattcttcacaagcaagtccagtgggagccgggtctccccgctctagagaggaggggatgaggctttgcaggaggagggatcagtgtaggctctcagatggggctggagggccccgctcaggtttcactcctggctttctgatttcttagggagatgctgatgggtccacctgctgccccatcttgcttcggtgaggaaagctctcccccttgccctaaaggtgcccactgctgcttcctcggggaagggcaagagacctgagcccccgcctcaccagccacctggcctgagtttactgctgcaggggccagctccttcctgacctctctctacgggccagaccctaagctgggaccccctgcttccacctcagtggagaaggggtgagtctgactctgcagagaccaatttccaggacag

SEQ ID NO: 17628 - DNA, 2666 bp, Artificial sequence
  DNA replication origin
catactctgactgcatggtgggccagatggtctttttctacacctataatttcccaggaaattgtgacagctgaatttgcatgatgtagctacaaatggaatttgcacaatgtgtgtgttcatgtggtttggacatgagaataattcctttatcccatcatgttgggaagagtcaaaacattcacttgcccttcctcatgaacaaagccagtgctcagtcagtattttctatgtggaggatggaggatgggtggagggatgtgagggatacacagagggatgaatacagggatgaatggagggatgggtgggggaggggtggagagatgaatttaatggatggagagatgaatagagagatggatgggtggatggatggagggatgggtggatggatggagggataggtggatggatggagagatgggtggaggaatggatgggcggaagaatgggtggagggatagatggagggagggatgaatgtgggggtgggttgagggatggatgggggagtaatgggtgaagggatgggttgagggatgggagaaggagggagggacataggaggggtgagtggaagaatgaatggaaggatgggtggagggatgggtggacggagggatagatggagggaacagtggaggaatggattggtggaaggatggagggataggtggaaggatgggtggagggatgggtggacggagggatagatggagggaacagtggaggaatggattggtggaaggatggagggataggtggaaggatgggtggagggatgggtggacggagggatagatggagggaacagtggaggaatggattggtggaaggatggagggataggtggaaggatgggtggagggatgggtggacggagggatagatggagggaacagtggaggaatggattggtggaaggatggagggataggtggaaggatgggtggagggatgggtggacggagggatagatggagggaacagtggaggaatggattggtggaaggatggagggataggtggaaggatgggtagagggatggatggagggagggatgggtggaagaatggatggaaggatgggttgagggatagatggggaaggatggaaggatgtaggagggatgggtggaagagtggattccaggatgggtggagggatggatagagggagggatgggtggaggaatgtgggagggatggatggaggggtgaatggagggaaggacggcgggatgggtggagcgatgagtggagggataggtggagggatgggtggagggatgggtggagggatgtgggatgggtggagggatgtgggatgggtagagggagggatgagtggagggatggctggagggatgtgggatggttggaaggagggatgggtggagggatgtgggatggatggagggagagatggatggatggagggatggatggaaggagggatgggtggagggatgggtggagggatgggtggagggatgggtggagggatgtgggatggatggagggagagatggatggagggagggatggatggagggatggagggagggatggatggagggagggatgggtggagggatgtgggatggatggagggagggatgggtggagggatgtgggatgggtggaggaatgtgagagggatggatggagggatgggtggaggaatgtgggagggatggatggaaggagggatggatggagggatgagtggaggaatgtggcatggatggaaggatgggttgagagacggatggatggaagagtgggtagcaagatataggagggatggatggaggggcaggtggagggatgatggacagactccagccttgggcggagctcctttgaagaagcttcagtctatccctgggatgctggctgtggaatgagggtcccctgagccttggaccttttgatgaaaagtactgagaccttgcagcaggtcttggtgttttttgggggaatactggactgagacagtgcccactctggctgtatggaggttctctgggagggcctgtatggaaagaaacagtcttgagtgagaggtaaactctcaagcccttccactgtggcatgtaacgcgctaagggacacatgtattcctgttcagaaaccagaccctggggctgcccagagaatgaggacaccaatttgatgagggcagctctgcagaaacccaggggaggggcgctgggccggtcgtggactcagattgtcctgtgccactgcccttgaaatcattatttatcagtagaaaacaaaagcaaacctctcagctggaggcataggagaaggtggacctgagttcgaatctgaactctgccagttgcataaccttggccaagtcactcaagctatgtgagccgacctcatctgtagcacagtacgatgacagtcctcgcctcctagggtgtgggtggtcctggctcagggcctgggtgcaggaaggacgtgctgagttgtaggtggagcatcactcgtggtgtgagtgactgggcagagaagccagaggggaagcccagccatgctgcccacataagggcagccacctgtctacccactccttcctccaaaggtctcctctctgggaccccgaggatccaagagtcaccaggtttccaggacctccaggatgcgtg

SEQ ID NO: 17629 - DNA, 1273 bp, Artificial sequence
  DNA replication origin
acagatgaatggtggatggatggttgggtaggtggatagacacatgggtggatgggtagatgggtggataaatgggtggatgaatgatggatggatggatgagtggatgggtagagggtggatggatagatggagggctgagtggatggatgggtgggaggatggaatggtggatgggtggatgggtggatgggtggatggatggatggatggagggatgggtggatgggtggatgggtggatgggtgcgttggtgggtggatgggtggatggatgggtggatgggtgggtggatgggtgggtggatggatgggtggatggatgggagaatgaactcatgctggtgtctaactctcatcagttgtgctcagaaacaacacagcaccctctgggacccctgagacctccccaggaggcaaggggccacggtggcagcctctgttgcccagagacatgctagaccctgttctgggtgctgggaggacaaaaaggaggtaagcccacaggccaagcccccaggccaagcccccaggccaagcccccaggagcccaccccacacccaggcagacattgcaggacctctaagcaaggtacagagggcactggggaggccaggagatggtccctgagggaagcgatggctgagctgggttttaggagacatacacatttcctgggggaccaacctcccatgggcccactgctggacaaagccagacacagcttggtgtggagagaatttcaagagcatgagtattgtaggatttggggtgggtctggagagtggcataaattagactgagagggctgtgaggggtgcagagggccttgagaatcatgcttaggaggctggatgtgctcagagggtgggggacccaagactgttgttttgttttgaaatataacaaacagctttattgaaatagaagttgcatgctgtacaatccacccacaattcagtgcacaattcagcggttcttggtatattcacagagttgtgcagccatcgccaccatcaattttataacattttcatccctccccaaacccctgtacccatgagcagtcactccccctccccacctcctggcacctcgcaatctactttctgtttctctggatttgcctgttctggacatttcatagaaatggaatcatacaacgtgtagcctgtagcctttgtgtctggcttctttcactgaacataaaatttcgagctgcatccatgttgtagcatggatcagaaaacttcattcctttttaaggctgagt

SEQ ID NO: 17630 - DNA, 1225 bp, Artificial sequence
  DNA replication origin
ctcgggactgtgatacactgcggcctcgggactgtgatacactgcggcctcgggacagtgaaacactgcggcctcgggactgcgatacactgcggcctcgggactgcgatacactgcggcctcgggactgcgaaacaccgcggcctcgggactgcgatacaccgcggccccgggactgcgaaacaccgcggccccgggactgcgaaacaccgcggccccgggactgtgatacaccgcggccccgggactgtgatacaccgcggccccgggactgtgaaacaccgcggccccgggactgtgaaacaccgcggccccgggactgtgaaacaccgcggccccgggactgtgaaacaccgcggccccgggactgtgatacaccgcggccccgggactgtgatacaccgcggccccgggactgtgatacaccgcggccccgggactgtgaaacaccgcggccccgggactgtgaaacaccgaggcctcgggactgtgatacactgcggcctcgggactgtgatacactgcggcctcgggacagtgaaacactgcggcctcgggactgcgatacactgcggcctcgggactgcgatacactgcggcctcgggacagtgaaacactgcggcctcgggactgtgaaacactgcggcctcgggactgcgatacactgcggcctcgggactgcgatacactgcggcctcgggactgcgaaacactgcggcctcgggactgcgatacactgcggcctcgggactgcgaaacactgcggcctcgggactgcgatacactgcggcctcgggactgcgaaacactgcggcctcgggactgcgatacactgcggcctcgggactgtgaaacactgcggcctcgggactgtgaaacactgcggcctcgggactgtgatacactgcggcctcgggactgtgaaacactgcggcctcgggactgtgatacactgcggcctcgggactgtgatacactgcggcctcgggactgtgaaacactgcggcctcgggactgtgatacactgcggcctcgggactgtgatacactgtggcctcgggactgtgatacactgcggcctcgggactgtgaaacactgcggcctcgggactggttgcaggaacaaggcttgtatcaactccgtagattcccttgcctattaagtatgtgtatgtttgtatctagctattcctttttttttttcaattaagatggcggtcttac

SEQ ID NO: 17631 - DNA, 1511 bp, Artificial sequence
  DNA replication origin
aacgatgtcaggagaaaacaaacagggaagcatcgcaacccactcccgaacgccttcccagctgcgcagcgtcagggacctcccctcctgggatgcctgcgctaggtcagcctcagcttcccgggcccccatcgcgcgtccccgccacctgcgcgcaccctggggtccccgtcgcgtggcccgcggcccccatccccgcgccccagaccccgcgcgctctgggtcgccccatcctccagccccctatcgtctgcccgcatccccgggtcccccacgtcgcccgccccagtcaccgctcgtcgcgggcctcggagatgcgggcagcggcgcgacgcactgcggggctcccagggcggggccggcggccgctgggccgtgtctccatggcagcgccgcaggcctggcgagccgagcgcagaggctgggcaggcgtgtgcgacgagcccaagccatcgatcgctccgcgaggaggggctgggcccgccccgaataggaactggaagaggaggaggaggggctggaggaggaggggctggaggaggaggggctggaggaggaggagggaggaggaggaggagctgggagaggaggggctgggagaggagaaagggctggatgaggaggaggggctggaggaggaggaggggctgggagaggaggagctgaacgagaaggaggagcagaaggaggagtggaggagaaggaggagcaggaggaggagctgggggaggaggaggagctgagagaggaggaggagatggaggaggaggggctggatggtgaggggctgggaaaggaggaggggctgggagcggaggtgggaggaggggctggcagaggagaaggggctgaggaggtactggaaaagaaagaggagcaggagctggaggaagacgtggaggaggagctggaggaggatgaagagaaggagtgggacgcccacaaccctgttagtaagacactgccggactgtatggtcttatcatcttggttttcgtatttctgcttgtgtggttacttttgccactgctgttactgcttttattagtattcttactctcagtaattgatacaattatttttaattaattaaatgtccgggcttactatctcaaaaataggtcttgaatttctccatctcatccaaccaagccaggcctctatactgctcatttggactcctcaacagccccatgaaagcaaggtctatttccttttctcactccacctccaatcatactccaatagcactcttttagtatctacccttttcccctaattttatggttttctccaatgccaattaagaaaactagcataatggaacctggtgtggtggctcacctctgagtcccacctacttgggaggctgaggcaggaggatcccttgagccaggagttcgaggctgcagtgagccataatcatgccactgcacttcagctgggacgaaacagcaaaaccccatctctaaaaaaaaagaaaataagcataacagacatccaaggaagat

SEQ ID NO: 17632 - DNA, 2186 bp, Artificial sequence
  DNA replication origin
ctcctcctctcccagcccctcctcctcctccagcccctcctcctcatccagccctttctcctctcccagcccctcctctcccagctcctcctcctcctccctcctcctcctccagcccctcctcctccagcccctcctcctccagcccctcctcctcctcttccagttcctattcggggcgggcccagcccctcctcgcggagcgatcgatggcttgggctcgtcgcacacgcctgcccagcctctgcgctcggctcgccaggcctgcggcgctgccatggagacacggcccagcggccgccggccccgccctgggagccccgcagtgcgtcgcgccgctgcccgcatctccgaggcccgcgacgagcggtgactggggcgggcgacgtgggggacccggggatgcgggcagacgatagggggctggaggatggggcgacccagagcgcgcggggtctggggcgcggggatgggggccgcgggccacgcgacggggaccccagggtgcgcgcaggtggcggggacgcgcgatgggggcccgggaagctgaggctgacctagcgcaggcatcccaggaggggaggtccctgacgctgcgcagctgggaaggcgttcgggagtgggttgcgatgcttccctgtttgttttctcctgacatcgtttttgtttgggtccaggggcctcacgggagctggatgctcggagcagcaaggcggccctgggggccccttccggtcccggggctgacgcctggcggcgtctccgggaacccgcgccctttcaagcgccgctggctcctgtttcacagatggagaccctgaagccccaacaagcagcctccccagcacctcccagtgactgaaaaagctggcactgggcgcccgtctcactctccacccagctcccaggctgccccacgggacgtaagtagctcgatctaggccgctgacccccagagacttgatgctgcgctgcagactgccgccgctgccggggcgcttgacttcccctctcctgacagcacgttcgttcctttgcagcagcacctttggggagagacgagacctgaacaaacgctggggctggatccccagggtgggtcagaacagccgttgccctgaaagctggcccggacagatgcgtgcggggcgtgccaccggagctccttccagcttgcgtctggggccaccatgtcccttcctcagggcactggatccatctcttcaagctcagtggtccaggccatggtggcagaatcaccccccagggtgtgacgcctcgtccctgtcaattccacacagctgcacccggaagagctgtggccgggcgccgctctgacctgtgtgcggtcccctgaatgggtctcaggtgtcttcagaatggtgaggccgcctcatttcctcaccacacaaccctcctgaggacgttgcctgcaaatgggcggaattcctaatttctaccattcagttaaacgagggatccttaagccccaaagctgggaaagctgtccgttaatttagtgcgcgtgggccgtctcagaacagcagggttcccaggagtccagcgggacgggggaggggatgagtggccgtgtccccctggcagagaaggccttgtctgaaggctacgcccgcctccggtacagggacacctccttgctcatctggcagcagcaacagcagaagttggagtcggtgccacctgggacgtacctgagcaggagccgaagcatgtggtactcacagtatggaaatgaggccatcttggtccgagacaaaaacaagctcgaggtctctagggacacagggcagtccaagttttgcacaattatgtaattccgatgtgagcacctgaacccaggaccacactttgaggaaaacagacctgagtttcattcagttgtcttgttgatttccaatccttgctggaagattttgaataatgaacgtgaagatcaaactgtggtgtaagaacccaagaagcgcagaattggcccccgaacccctcagcacagccgcggtgtgactggtgcacaggacacttcccctctagagtcccctccgtggtcagctgttgtgacatttgaattctccaggtgctgctagggacagcataggcccgggcactgctagatgcttggtttaaaccaggccaagagtaaccctcccatccccattacaaaccac

SEQ ID NO: 17633 - DNA, 767 bp, Artificial sequence
  DNA replication origin
gacacaaccactcccacgacgtcggccatcactgccagccggagtgagtcgcccccgccgttgtcagaccccaagcaggccaaagtggtggcccggcgggagagtggtggccgccccatcaagcctcccaagaaggacctggaggacggcgaggtgccccagcacgcaggcaagaagggcaagctgtcggagcacctacgctactgcgacagcatcctcagggagatgctatccaagaagcacgcggcctacgcctggcccttctacaagccagtggatgccgaggccctggagctgcacgactaccacgacatcatcaagcacccgatggacctcagcaccgtgaaagtacgtggccgcgcggcaggccctgctctgcccatgtcctgcggctctgccgtgggtgctgatgtcttgtgccggctgagtgggggctgtcggggagcagggtctcgcttgccggagaagcgcaccctccaggctggcccccgcagcgccggctgtggctggcaaggctcagcgaggaaggcgtgctctgcctgtgggtcccggagtctgtggctctgttgttgtttattcccatcgaacccgtttagtgatttcattgatttcattcctacctcccattctgtatcatcaggtcagggggtccctagagctgggccactctcacagttggcaaagttttaaagctgcactttgcttccctcaagccccggatacaggcgcctcacagcagacaggagtgaggcggccagtggggatgg

SEQ ID NO: 17634 - DNA, 1254 bp, Artificial sequence
  DNA replication origin
ggcagggagtgggtgctccctgcaagatttggggctggcgaggcctggtgagtctcctgctttgggcagggcccgtgccaggcacttatgtgtattatcttcttcgatttgatcctcacagcaaccctctggggcagacagtatttcccccatcttacagatgaggaagcgggcgctcagaggggttaaatggctcgcccaaggtaaaatgccacctccgttgcttcccctccccgtggccttcactgcctgcacttatgggtggcccctggtcaagccgcctcccccagtgggggctgtttctggagcatgtcccatttgccacggccagacgagtctgtccccgctcctatccgccctgtgcggcacgcgcctggcgcttggcagcacgtgggtgcctgccaagtgtttgtggatagccggctccggcccctgccagtctgagggcggcggcttggctgggcagtgactgtgggtggctctctagacggcaggtgccgtgggctgggagccgtggctcccgctggctcctctcccgctgggctaagattagaagctggctgagctggtctcagggtgcacactgagccctggccctggaacgctgaggtgatgcccatgggtgctgggtgctgaggcccttgcaggctgcccagagagacctgcacacccccaggaggcctggacgttaaacatgcgcgtctgcctggtgcctggctccgtccccaggacacacccacagaaggttctgtgggtcatctccctcctctccttgcttgaaatggccttcggtggctcccactgctgctgggatggagtccagacttgcccactcaatccctgaggtcccttgttcccagagctgctgtggctgcttcatgcctcctggttgggctgccccttgccctgtgtctggaatgctctcctgcctccctcttgtcccgcaaaacttgtgtttgtccgcggagcccccgctctcaggcccttgtctggaactttcctggaagcagggagttcctcccaggtctctgcagcaccgaggtccccgggtcctggtctgggtgcttgttaggtgtctggcgaattgcatgcagcacctcacatggcttggggtgtgaggtgcgagcccacccgggacccctgagccctcggggctaagggagagaggtatctcccctcgcccaggtgagggcgggtttcagagttgatcctgagggagagtcccagcctcaccactgccagctgtgtgacctt

SEQ ID NO: 17635 - DNA, 864 bp, Artificial sequence
  DNA replication origin
gctcccagccaagtggggagcaggacaggcaggtccccatgctcccatgtggagcccacaggcggggccagcttgggtgctggcacctcacaacgcacccaggtaggtacagctggcaccactctcctgagtgtgagcaggggaggaccgggacccctcccaccctggcttctctcccacaacttccccaccttgaccaagcctttggccagggcttctggccagagaagctggggttcaagttcagccaggccctcccttaccagctgtgtgaccttcagctccccaggcctaggtctcctcatctgtgtcagtaacaacggcctgagctcccagggcgcagagagaaacactcccaagagccagcactcagggaaaggtgggggccccccgcctgctgctcctgccctgacctcaggaaccctggccgggctcaggtgccccacccatccggactcagggtgctcaccttgacgacaggcggcgtaggagggaccacggggacgatgggtgtggcaggaggaggtggggcggcagctggggggactgggaccgacgtgacgtttgcagtgatggttggtacaggggtggcagcgatgacgggcgtctgggagacggtggggggcacgctctgaaagggggtcgctggggagacagaggacacggccgccacttgctgtgtaccttcaagacaaggaagggatgttcaacacaccaggctccactagtatttccagaagcttccagtgccacccctccagccagaacacgggtaccagctctgtgctgccaagaccgccggccagaagaaccctccatgctgagatgccccccatcctgcatcttgggggcagggttggtctg

SEQ ID NO: 17636 - DNA, 611 bp, Artificial sequence
  DNA replication origin
aaaaaacaaaaaaaacaacacacacacacacacacacacacacacacatatattcattttgttctctcctgcgctgccaaatctgttaacaaattttaaatatttttttgagctacaactaataatgtcctttgcaagcacacagctcctttcctgacacgtgacctggactctctgtgtcttcagcccacagatgacatagtgctaatggcccaagctttagagaaaatttttctacaaaaagtggcccagatgccccaagaggaagttgaattattaccccctgctccaaagggcaaaggtcggaagccggctgcgggagcccagagcgcaggtaaagggagctggggcaggcgaggggctgggcctctctgcagaggcccacgggtggatgggctgggacgcgatcctttagccatctgagctgtttcccatctgtcgtgacgagctcgtgggtgccgggtcttggatgagtgtggcctgtgggtgatgttggaggggcagctggcccggggatacggaagacattaacgccatagctggctgcctttgagcccacgctggggaggagctcatggtctaggaggatcacctgtccctgctctccacct

SEQ ID NO: 17637 - DNA, 1681 bp, Artificial sequence
  DNA replication origin
cgcccggggccgccgccgccgccgccgcctttgtgcgcggccacgatgcaacaaagcgcggcggccgcccggggtcgcggcggcggtggcggcggcggtggcgcgggctccgctcccctcctcccgctcccgcttggccgcctccgtcccggactcggggcgtcgctgcggccggggcgcgcagcccggagttggcgcggcccgcgcgccccgcgccagcccggcctccgcgcgccctccctcacggaagggatttttttccccctttcctccgcccgccatctttcgaagggggaacccagggaggacgcggagggggaaggtgcgcgcggcggccccggcctgcggccgtgcgctccgcggggccactttccccgcgcctgttccgccggcctcgctcccgagccgttgctggggcccgcgcctggggaccgtcgccgcgcgccgcggccggggcggggggcaaggccgggctcggccctgggctctgcgcggcctcctcccagagttacgggcccagagctgactttgagcccccctgagttgccggattattgcacccaaaccagggggagacccagttcccgttttgaaatcagcctgaaaatcgcttaatccgggcgagggcgagttggagcgggagggacgggggtgcttcccctccttcccacttttggggggcgccggagtgacaacgtgatacaagcccatccggggagaaatgcgcaccccgaaccgtgtacacccacatggccctggtgggctctctgtgaataaagctggggcgtgcgggaagtcttattccaccggttgctcgttcgggggcagggccgggatgggggcttcgcgcggcctcctttccctggagggcgagaactcggcccgccgagacccaccgggggcagggacccggcgtccatcgtgtgggttcctccgttcgacccaatccttgagtggttgcgatctttaattttggttgaaagctttctgctcagaaatagatactgggatttctcccccttacattaaacttggtcattgtctgcaaaagttaaccaggaggggagactgtagtgcattggtgggcagagtaattgggctggaactgcaagaggcagcttcgtgtgtcccgtcctcccccgccctaccctgtgagaaggaacagaagaggaaaagagttttctttttaccctgctcttttgtaggcttttccccttactcttttctttaaaatggagggttttttttttttcctgggtccatgtagtatgcctggggagatcctggaatctatgcaaagttgtatggcatttttctggggaaagtagtttgttactggcttccaacggggtctaaggaaggtctgaacccctgcaaggggctggcctcgggggttagggagccctccctccgggttcttccctggcagccctgatgcagcctctcatttgcaaataaaggtctgtgtttgccgttttctctgttgaggccttgatgggtgctggtggttactgatcatgaaagataaggcacacgctgtaacaggacgggctgcaggcgagcgaggggcatttctttctgaccttccgggtagcctcagaggcccggtgcctcagcagggcaccgggtgcctggaaagactgtgggagcagctccagcctgagccctgccgttgggacat

SEQ ID NO: 17638 - DNA, 1618 bp, Artificial sequence
  DNA replication origin
agcctgagcaggaagggagaggatgatgggctgctaggggctggaggggactgcagagccaccccaaatcccttctcaatggcagccctgctggctttcagctgtttgccactgtggcccctaaactagtcttcagagatagtagcacaggggctgagatgctcaaatgagagtttctgtcctgttcccttacagattctgcttcctagagacttctccagcctcgggaaagttggctccatggagccatccgggccactcatgtgtgggtgagcagcgggaagggaaagaaggggaccttggtgcttccatcagagccagtgcccagggagcgcctgggttcctgccatactcctgggggtcaccttagggcagtgggaggcccataagggttgggggcatttggtcagcagcctcagacacgctggctggtcagggcagcctgctgtgtgcatgtacctgggttccttgaggtcaagaccaggcggaaaggctttttgttctagccttgggaggagtgcagtggggtctgtgtaagtggtgaggtggccatcctggtggtcagagtgctcaagatacccaaggagatgagatgcagacagcaggaatgggttgcagcctccaaggtggctaacacagaagcctgtaggttgaggaactgcaccgggggtttggggacacaaccaggatggtagttctaagggaactgcctgcagatcctcacctctcatattccccctccccgaccttcctgcgcctgaggactgcactttgtccattttgccaactagaaaggcaaggctggaacctcgtcctagagccttgccctggagtgtgagaaggtcctgggctcccagcagaaacagagggacaggattgggaaaggtgttggcttcccctgcaaactcttcctaagaccccggggctttgggtctcagccgtcctgcaaattggctctgtgaccttgggcaggaccctttgcctcactgagcctgtttccttacctgtcagcctggaacagaacacctgccttctgggtgagcatggggatgaattgtctctgtgctggcactcactttgtgaatattgcatagatgtgtgcatttcaggcagtggagctgctgctcaacttggaacacacctggggaccccaggggcttggggtgggtgcagcccacacaaggaaactcgaccttgcagttggcaggttcagcaggcaccaaggaacctcgttttgtttttgacgtttttattggggtctaatgtacacaacgtgtaaccaccttaagttacagctggattaaaattgatttatgtggccgggtgcgttggctcacgcttgtaatcccagcactttgggagtccgcggtgggcggatcatctcacgtcaggagtttgagaacagcccagtcaacacggtgaaaccccatctctactaaaaaatacaaaaattagccgggcgtggtggcgggtgcctgtaatctcagctactcgggaggctgagccaggagaatggcttgaacccgggaggcggacgttgcagtgagccgagatcgagccactcactacactacagcactccagcctgggtgacaagagcgaaactaacgtctcaaaa

SEQ ID NO: 17639 - DNA, 1087 bp, Artificial sequence
  DNA replication origin
gccgggcagaggctgcaatcttgccactttgggaggccaaggcaggcggctgggaagtggaggttgtagcgagccgagatcaggccactgcactccagcctgggcaacattgagcactgagtgagcaagactccgtctgcaatccccgcacctcgggaggccgaggcaggcagatcactcgccgtcaggagctggagaccagcccggccaacacagcgaaaccctgtctccaccaaaaaatgcaaaaaccagtcaggtgtggcggcacgcgcctgcaatcccaggcactgggcaggctgaggcaggagaatcaggcagggaggttgcagtgagccgagatggcagcagtacagtccagcctcggctgggtatcagagggagaccgtggaaagggagagggagagggagagagggagagagggagagagagggagagagggagagagggagagcgagagggagactctagtgaatttttaatttcagatgagattgggttccttcagggtggtatggctgtagatggaatttttaattttagttattgctcttttcaactcaatctttctatttggttcctttttacaacttctctttatttctcttttctacttggtgagatatcatactcatagtttcctttggctctttgtacatggttttctttagctcttgagcatatttaagagttgatttaaagtcttggtgtagtaagtccaatgcttgggcttcctaaggatgagctcctattaattcctttttttgtccctgtgtatgggccacactttctttgcttctttgcatgcttcgtagcttttttgttgaaaactggacatttcaaatattataatgcggcaactctggaaatcagatcctccctgttgcccagggattgttgctgccatctaagtgtaattgctgttattcatttggtgacttttctgaacttcttataaccatccctttcctgtttctcaccagaattttccaatttttatgctttttgtctctgtttctctaagcttcattctagctgatttcctcagatctatctttcaaggaactaactctttcctcagtttcgtct

SEQ ID NO: 17640 - DNA, 926 bp, Artificial sequence
  DNA replication origin
aggggcacctctgcccggccgcccctactgggaagtgaggagcccctctgcccggccagccgccccgtccgggagggaggttggggggtcagccccccgcccggccagccgccctgtccgggagggaggtgggggggtcagccctccgcccggccagccgccccgtctgggaggtgaggggcgcctctgcccggccgcccctactgggaagtgaggagcccctctgcccggccagccgccccgtccgggagggaggtgtgggggtcagccccccgcccggccagccgccccgtccgggagggaggtgggggtgtcggccccccgcccggccagccgccccgtccgggagggaggtgggggtgtcggccccccgcccggccagccgccccgtccgggaggtgaggggcgcctctgcccggccgcccctactgggaagtgaggagcccctctgcccagccaccaccccgtctgggaggtgtgcccaacagctcattgagaacgggccaggatgacaatggcggctttgtggaatagaaaggcgggaaaggtggggaaaagattgagaaatcggatggttgccgtgtctgtgtagaaagaagtagacatgggagacttttcattttgttctgcactaagaaaaattcctctgccttgggatcctgttgatctgtgaccttacccccaaccctgtgctctctgaaacatgtgctgtgtccactcagggttaaatggattaagggcggtgcaagatgtgctttgttaaacagatgcttgaaggcagcatgctcgttaagagtcatcaccactccctaatctcaagtaatcagggacacaaacactgcggaaggccgcagggtcctctgcctaggaaaaccagagacctttgttcacttgtttatctgctgaccttccctccactattgtcc

SEQ ID NO: 17641 - DNA, 1394 bp, Artificial sequence
  DNA replication origin
gaatttaacaaaggcaagtaatttgctttactaagttttaaatcctcttatatcctaccaaacagttgtcagcctcaggaaaaaatatggcaggtgaaaatagaagagaaaataagaatcacagaagaggaacaaacacgatggagattttcagaacattaactaggctttggccaccagcagtgacttagtaaatggaactgtttctctgaacatcttttttatttttttgagacggagttttgctcttgttgcccaggctggagtgcaatggtgcgatctcggctcactgcaacctctttcctgggttccagcgattctccttgcctcagcctcagcctcaggtgatcccgacctcaggtgatccactcgcctcagcctcccaaagtgctgggattacaggcgtgagccgccgcgcccggccggattttctcatttttactagaaggttctatctcctgggggtggggtgaggtggtgagaccaattcacctggaagtggaagctgggaacttggtttgagttctgagggttctggggtctcgccccttatcttgctttgcctggagggctgaagggctggaaatatttttgttttggggctggaaccaggactgcagtttgggagccggtgctaggttggaagaggaggcggggtctggtaagcactttagccgaattgagcagtgggaattagggaattgagggcagtgggaagctggttctgagttttaaactggggagtgacagatcagagctggatttttaggagtttctctgtttggaggtttagaaaagacccaggtgggaggtagggctggggtggggagggagagaagtggacgatctgagagctgaggtggggtggaaggagagcagcgtgtcacgggctcgggattccggcccaggcggccaggtggacggagataaagatgcgcttcttcatccgaactgggtttgctaacctgtgactgtcaccactccatgctccagggcacctggcccaagggatccggcctcttgggcacacaaatccatatggagccctgaaggaccagacagggaccttgccttctctgtgtccttcctgggaaggggactccagaccaactgccagtcttccggttccacctctctgacaaccgctcacctcaccctccttggcatttttatttcaaatgctctatccctttgtttgcatgggttcctgtgtcatattctgtgttcccatttttaattggagaataagggactgtatgttattctacccacaggcctagctgaggggatagggaggccatgcctacctccaaggctctaagaagtgaagcaggcggcgagaatgtgcagtcgttgaggccagaggaccgggcctcagcttctccttaagcccc

SEQ ID NO: 17642 - DNA, 1773 bp, Artificial sequence
  DNA replication origin
tccctttaaagcgttgggccggcccgaggcattctggccgctgtcgctgcccgtagcgctcctccgagaggccggctttgtgagctcgccccgccccccggacaccgccccctcccctcgcgcacgcgcactgcgcccccgccgcctggcgcccgcccgagctgccgccttgtcgagctgagtccgcgctcccgcccaggcggcggccgacgcgacgccccgagcgcccggccccgccgccgcggcccggcaggtaagcgggcagccgcccggcccggggaacacaaggcgggcagcggggcggcgccagaagcttccaaaccgcacccggccgccgcacgtgttccccgccgggcctcgggccaggcccagccccgggcgctgctcccgctgcagcggccccgcccgggacccccgccccggcccctcggtggacggccgcgcgcgcagttccctccacccggtccgcccccactcgcgcccccacctccgcctccccggcggaccgctgacaaggccagagcgccggcactgggtcctctttcccgcaggcagcgtgcccggcctcacatcgcccctctccctccactgccccttcagggaaggaccccagacccaccaagccactcagtccctggacgaggtgcgcttcccctcctcgtagaaacgcccccagcccgctcccgccgctcaccccaacccgaggcagccaggctgcagctcgctaggtggggtcctggggtgcgggtcctcggtcctgaacggtaggcccaccgtgcctcctcgcgcggggccgcagacctgtcctggccggtctgcgagagccattttgagcggttacgttcccggaccaaacagaggtcggcctgttacatcgctaacgacactccctgctgtctcgcttgcaagtttccactcaccccggtccgtttacccatctcctcaaatgctagtttaatctgtgacctgggcaggtgctgtcctagccggtggggaagacaggaaagcgaaggacccaggcggggagcctgtccaggatctcagatagggagagccaggtccccacctctgttgggccggccacccggctggtgtttaagatgcagattaattcctgtctttgcacacagtatgcttttctgactgcatgtcacaggcagattcctgggctccacctcagggactgagggactcaggaatcggcctgtggcatgcagtccaggagggcacactgaggtttggttgctcggcttcaggtggtcaggcttacctggatgaaaagcagtggctgctaggaggagccaggcagcatctggtctaggggccgccaattcatcaccgttcccgtaaccttggcccccgctttcctcaagatcaagtctccaaccttcctgttctctcaaaaggattgttccacagagacacctgagtgttcatgaaaatgccaagccttggcccggcgcggtggctcacgcctgtaatcctagcactttgggaggctgaggcgggcggattgcctgaggtcaggagttcgagactagcctgggcaacatggcgaaactccgtctctactaaaaatacaaaagattggccgggcgtagtggtacgcgcctgtaatcccggctaaactggaggctgaggcgcaagaattacttgaacccggaaggtggaggttgtagtgagcccagatcgtgcacctggactctttggactgtgtctcaaaaaaaaaacaaaaacaaaaaaaaaacacgccaagcctagaccccaccgacg

SEQ ID NO: 17643 - DNA, 1396 bp, Artificial sequence
  DNA replication origin
ttttaacccaaataacatttgacttccatggaggagtgtctgtgaggctggcagagctgcagaaagcctgctgtttttctcctgggccgtgtgtcttttgtaaggttaacactagtgagaagatttcctgagggcaatggggatgtttgggattttgaccttttgccgatggtcctattttgtcctgtcaagttactgaccctgttttttctccccaagggaatatccgatgtagcctggtcgtcagattctaaccttcttgtttctgcctcagatgacaaaaccttgaagatatgggacgtgagctcggtaagtgacactcagtgcttctctccaggggagaccggctgcagggcacggggcaggtgcgggggactgagttgactgctcagtaagcaacactcagcgctcctctccagggaagactggctgcaggggcatggggcgggggtgggtgggggaggccgagttgacttcggggaacagcaagtcactggcggggcatcaggcatgctttgggatgtcagacattgatgaatgtgacctgactcttacgtttggggaaataagcactggaataatcctaataatactctgttatagggcaagtgtctgaaaaccctgaagggacacagtaattatgtcttttgctgcaacttcaatccccagtccaaccttattgtctcaggatccgtaagtgtggctggggtgtcttccctgggggaggtggtgtcggatgtgggaaggctgttgaatttgcttgtagccactgtggagaaggcaggtgggccctgagtcctttctgtgctgtttgtggggaggatgggctgatagcaggtcttaggttctggggaggtttgtcccctctccttcctgtaaaatcactgtcatctcttttgtgttcagtttgacgaaagcgtgaggatatgggatgtgaaaacagggaagtgcctcaagactttgccagctcactcggatccagtctcggccgtaagtccctctgacacggatggggtggtgtccagcactacgtttctctgacatcggatgtggccagctgtctccctgaggggcgtaagcctggccatggcctgtgcctagctgattcctgctgtcatgccacagtctagagcaatcaggttggaggctgggacttgagaaatgagtcctgtgtgcagtggagggatggcgagggggtggtgaggtgtcagtggggtgccctgtgatgagcaccaaggggccgtttgtgcagacttgggggcagtggccacaggcgttcaggaggtagtgtaccctgaactgatgcacgggacaggaagggcggccaggctgggaagggcactgggagtggtgggagcacaggtgaagtgtgagttttgagtggagttagctttga

SEQ ID NO: 17644 - DNA, 1041 bp, Artificial sequence
  DNA replication origin
aggagggacacggggggaagaggagagacacggggaggaggagggacacggggggaagaggagggacacggggaggaggaaagacatggggggagaggagagacacggggggaagaggagagacacagcgggagaggagggacacggagaggaggagagacatgatgggggaaaggagagacacgggggaggaggagggacacggggggaagaggagagacacggggggaagaggagagacacgggggaggaggagagacacggggggaagaggagagacacgggggagaggagggacacagggaggaggagagacacggggggaagaggagagacagggggagaggagggacatggggggagggacacggggggagagacatgggaggagagacacagggggaggaggagagacggggagagacatgggggaggagagacatggggggaggaggagagacggggagagacatgggggaggagagacatggggggaggaggagagacggggggagagacatgggggaggaggaaagacacggtggggagaggagagacatggaggggaaggagagacatgggggaggaggagagacatgggaggagagacacggggggaggaggagagacacaggagggagaggagacaccgggcagaggagagacataggcagtagtggagcgacatgggggaagtggaggcttgtgtgaagatagaggtagagatgggaaccatgtggccacaagctagggaacccctggagcctctagaagctggaagcagcaggcagaaccctcccctggagcctctgagggggccaagccctgagacaccccgattcttcagcccccagcactaggagagaatcattctctgttgtcggaagcctcccagcatgtgctcattcgtcacagcagccgctggacacccacagagagagctgtccttgcttcccagggaccaagcgggacccagccttagttagcgggacctccgtgtctgtgtccccgacaccgctgtgtgccgaccacactggattc

SEQ ID NO: 17645 - DNA, 1494 bp, Artificial sequence
  DNA replication origin
ggagacgttgcttcatctgaaatgaggccagtggcaccaaactgaaaggggcattgggagggtcagtgtccaggcagttgccccacctggcagggccctcggctgtggctggctgggccatttcagcctccccagaggccaggcacaccgccggcccatggagatgccctggcacagaagtgtgctttgcccctacccaccggtgggcagagcacactcacacggcaacccccatgcctggtgggcatccatgccatgcccgggcacgcctcctctctcaccttcactcctgtcgcccccacttggagccctctccttctcccctgacatccctcagctgtgaatttgaagccccttggtgccacctttgccatgaggccccctgcttgtgccctctggatggcacggtaggcctggccagcgcaggagtggggcctcagcagtgggtgccgcctcagggccctgcaaaaggtggggcgaccacatccagctcaggcacccggtggggacagcacagccagcccagcaggctggagaagacggggcagcggcagagaccctgaagcaggaagaactgggggtgctcgaggggtggaaaggacgggtgagggcccgaggggtgcagctggggttggcgtggatggcaggtgccgtgtcacctgtgcgtttcatcggggctgacagaaggtgcattggaagcactaaaaagcccagtttcttgggtccacgaggccctggaatcacgtgctccacatgtcacagtgcagacctccatccggggctaaagatcccagcccctgtccatccccagcaagaatctccccattccccacacacgggagggacaggctgcccagcaggggctaaaaccccggtcctgggtcctgggaggggcggcttcacctcgggtggcaaaggaggagggtctgggctggcacaggagaggggttgacaaaagtcacggtgccattactacacctcactgcccagcccgacaggcttcactgcatccccattctacagatgtggaaactgaagcgtggagagcgtcgtgggctgaccgtggcccccggagcctgtggctggaaccttctttagaaagggggtcttcccacatgtggctaagttactggggagaagactgtcaggattgtccaggtgacccttaatccaatgacaactgtccttaggagacatacagaagggagacacagggggaggaggagagacacggggaggaggagagacacgggggagaggagggacacggggggaagaggagagacacggggaggaggagggacacggggggaagaggagagacacggggaggaggagggacacggggggaagaggagggacacggggaggaggaaagacatggggggagaggagagacacggggggaagaggagagacacagcgggagaggagggacacggagaggaggagagacatgatgggggaaaggagagacacgggggaggaggaggg

SEQ ID NO: 17646 - DNA, 840 bp, Artificial sequence
  DNA replication origin
tcctcatggatgcgggcagatgtgagcgaaaggaagccagcaaggatccgggattcggggcctgagcaccttggacggagcaggggagctggcctgggcagtgggcaaggggccctcggacttgggcactggacacattgaattgcagacaccctggtggaaaaaacagggcagcccagcggggacggagaagggatggtggaggggggtgcccagagacctccagagggaaggaaaggtaaaaggaggaggccacgctcaggaggagacgcaccctcatgcggaggtcacaggatccccaggggagggggagccgggctggagtggaggagatctgtgggtgaatggggagggagtgggggctgcgagggcatcgtgccccgctgaggtttctctgtgagatgagccagggaatggcaggacggccagaggggcgcggggtggaatgggagctcaccgcacagggatgcagtgaaaggaggcagctcccaagagggacagccacagagaggacaccgcgggggtgaggctcatccggccctgggggttttgggttgtgaggtgagagggtgtgagaggtgctggaagttggggtgtcgatgggtgtggggttaaggtgggattgcagacatcagaggcctggagtgtgagggtcaggggacttgcttggtactggggggagtgaggggccaaaggcgacaatgatcgagtgcacgagggagccatcggctgagggagaggacaaggccagcataggaaggaccacccgcaagtaccacggaggaagacaggcttggcggggccgcttccttgaggctgagatggggagctgtctgcaca

SEQ ID NO: 17647 - DNA, 1074 bp, Artificial sequence
  DNA replication origin
  misc_feature (1055)..(1074): n is a, c, g, or t
ggtggctcatgcctgtaatctcagcactttcggaggctggggtgggcaaatcccttgagcccaggaatttgagaccaccctgggcaacaggatgaaaccccatctctactgagagagaaaaaaaaaggagccgggtgtggtggtgcacgcctgtggccccgggtactctggaggctgaggcaggagggatgacttgagcctgggaggtcgaggctgcagtgagctgtgattgtgccactgcactccagcctgggtggcagagtgacagtgagactctgtctttaaaaaaaaagagaaaagaaaagacaaagggacttagaggtatagaaaagtaaaaaaagaaaatcaattggactacccctgtcaatattttgtagtaaatttttgctgctattttccccatgtgctgtgtggtgtgtggtgtgtggtgtgtggtgtgtggtgtgtggtgtgctgtgtgtggtgtatgtgtggtgtgtgtggcatgtgtgtagtgtatgtggtgtggtgtgtgtgctgtggtgtgctatgtgtggtgtgtgatgtgtgtggtgtgtgtgtatgacgtgcctgtggtgtggtgtgctgtgtgtggtgtcagtgtgtgtggtgtatgtgtgatgtgctggtgtgtgtggtatgtggtgtgtggtgtgtctgtggtatgtattgtgtgtggtgtgtagtgtgtgtggtgtgtgtgtgtggcatgtgtggtgtgtttagtgtttggtgtattgtgatgtgtgtggcgtggtgtgtgtggtgtgcatgtggtgtgtgtggcatatgtggtgtttgtgtggtgtatgtgtgtgtggtgcgtgtgtgtggcatgtgtggtatgtgtggtgcgatgtgtgctgcatgtggtgtgtgtggtgtttgtgtgctgcatgtggtgtgtggtgtgtgtggtgtgtatgatgaggtgtggtgtgtgtggtgtatgtatggcatgtgtgtggtgtgtatggtgaggtgtggtgtgtgtggtgtgtatggtgaggtgtgtgtgtggtgtgtatggtgaggtgtggtgtgtgtggtgtgtnnnnnnnnnnnnnnnnnnnn

SEQ ID NO: 17648 - DNA, 1172 bp, Artificial sequence
  DNA replication origin
agtctgggtcttggattatggaagcttggggtggccgtctgggaggacacgctggctcccatacccacgtggctgcctcatttccaccggctgagccagcagacacgtggctccaggccagcgcccaaagactttccatggtggggggcagggcggaggctcagggaagccgacaaggggctctgagcccacatgctgctgctcacgtccagagcccaaactcgggatacgctgggtgtgggggacacagcgtcctcaggacggaggcctggagcttctgacctgctgggtgggcagtgggagggggctagaggcagggttgtctccagcctttccagacaggagaggggtgaccccaaagtccccctcgagccagccacagccggccttggagctggagtcctgacccccgaccaggtttgaggctgagctaagaggacattatgggggctcagagcccaggggaccccccacacctcaggctgggcaagggttggcagggcgcctgacctagctccaaagcttccaggtacttggagggtttgatttttcttcccatcctccctgcccggaattcaattaatcaatagaagaaatccctgcgtcacacctctctgagccccgcaggctcctacaagaccgattaacacaaacatcaatttcttgggctgcgcgcctccgaaaacacggtactttttcagattgaattgctactgtgtgcccggtgtaaataaaggagagggagtaatatggaagatttgtgactgtgtgcggcgcggctccgcttcccactccgccggtgctattaggcgctgcagtgcggggtggagggagggagagacagaaggagagtggagggacagagagggggcagaccactgggcagggcgagagaggacagagagagagggagagagagagatgacagggagggagacacatacactcagacagagagacagacacagagggagatacagagacagagggagagtggagaggcagagagggcgggagaccattgcggggatgagagaggacagagagaaagcaacagagagagagaggcagaaattgagagtggtggagggaggttgggagcaagagagagagagagagaggaagagggagagagagaggaagagggagagagagggaggtgaaaagagagc

SEQ ID NO: 17649 - DNA, 1951 bp, Artificial sequence
  DNA replication origin
ctggatcgcagggtggaggtcagaggatcgcaggatggagatcagagaggtcagagctgggtagacgcatgtggggctatcaccataggaatggcatttaaagggactggactgtcggccgggcacagtggctcacgcctgtaatcccagcacttcaggaggccaaggcgggcggttcacctgaggtcaggagtttgagaccagcctggccaacatggtgaaacctcatctctactaaaaatacaaaaattagccaggcgtggtggcacacatctgtaatcccagcttcttgggaggctgaggcaggagaatcacttgaacctgcgaggcggaggttgcagtgagctgagattgcgacattgcactccagtctgggcaacagagtgagactttgtctcaaaaaaataaaaataaaaaatataaataaataaaataaaggcactggactgggaggatcctggggaggggtgtagatggggcttaacccaggccctcctgggtgaggaaaaggcaaaagagccatggagagacactgagaaggtgtggcccattatgtagtgggaggaccggtagggaggaccagtggggaggacaggtggggaggatggtggggaggatcggtggagaagacaggtaggtagggaggacaggtggggaggacaggtggagaggacaggtggggaggacagctggagaggatggggggaggaccggtacggaggaccggtggggaggacaggtggggaggacaggtggggaggacaggtggagaggatggggggaggaccagtagggaggacaggtgaggaggacaggtggggaggacggagggggagacgggtggagaggacaggtggggaggacacgtggggaggacagctggagaggatgggggaggactggtacggaggaccggtggggaggacaggtggggaggacaggtggggaggatggggggaggaccagtagggaggacaggtgaggaggacaggtggggaggacggagggggagacgggtggagaggacaggtggggaggacacgtggggaggacagctggagaggatgggggaggactggtacggaggaccgatggggaggacaggtggggaggacaggtggggaggatggggggaggaccagtagggaggacaggtgaggaggacaggtggggaggacggagggggagacgggtggagaggacaggtggggaggacacgtggggaggactgatggggtgggggcccccagaaggcaccagaagaaagcagtacagggctgctggagaatagagtaggtttggcaacacagaggttgctggagaccttggcgagacttcttttatgccagattcgtttctacagggactgaggaagaggagtctataaagagaaatagctgtggggtgttgtggggttggcgggccagcttggctgggggtggccaggaatgagcccgcacacagggaagttgacagggcggatgagagctgctctgaagccatcctgaccccaaacttagatttccccccggctgccttttgattcttatccctacccctaatccctcttcatgctgcagccagaggaggctggggttcagggaagaccgagctgcagctccccagcaaatcccgagtccctctccggctcaggaggcctgagctccagccatgccctttctcaagcccctgtaggaagcactgcctcatcctcaggcactgcgtaggccttctccacatgcccctggtaagcctcactcctcatggtcccaaactcttcagaggcctcagctgtgtgtccagcctggctcagggtgggcactgagacacgaatgcagagccctaaccttcgacctcccaccctccccttcctctctgctctagtcatccagcttcttctcgaatgtctcccatgacggggtgctcagcatcactcaagccagctgtgtcc

SEQ ID NO: 17650 - DNA, 1031 bp, Artificial sequence
  DNA replication origin
tcaccaaagctggggacaaagggtctttgtcctgcttcaggagacaatgtcccaacacgttgccgtcccccaaatgtccccaagccacgctggatgtctcacctgtgtccaccagctccagtttctcactcattcaacaactcaccttgaacctagacgtaaacaagatggagcaccatcttgttcatcgtgcggcccctggtgtgttgggaagacaggttgggaggacggcagtggtggtggggaggggttgctcccggaagggatgaggagaaggcagtacagtgcccctcgagaatggagtgggtttggcaacacagaggtcactggagaccttggtgagacctcttttgatgctcaatgctccactggtttagtggagcttccaattccaggaagggaaactgacaactcattagtgaacatgaatatagtttctacacagcaaatcgaacaagtaagggactgggaacagtggggagcaggtgtgggggagggcaggaccctgaggaggggacacatgagctgaggctgaatacagtgagggtggggaccctgagaatagctcggtgcagggcgggcattacaggttagggaatggcgagtacaaaggccctggggtgggaatgagctacacgctggacccagggaacctggcagaacacagtgtggcagggtgcccaggagggtgtcacggggttggcagagccagatggagaatgggggctatttaaggaatgggaagacgggggaggtcaggtttccggcatggacgtgctgctgtgagctgttggcaattgtccgattcagcctgtaagctgttgagacgctgaggtgctgagtgggcggacaaacatctggatcgcagggtggaggtcagaggatcgcaggatggagatcagagaggtcagagctgggtagacgcatgtggggctatcaccataggaatggcatttaaagggactggactgtcggccgggcacagtggctcacgcctgtaatcccagcacttcaggaggccaaggcgggcg

SEQ ID NO: 17651 - DNA, 745 bp, Artificial sequence
  DNA replication origin
accagtagaaattctctgcagccatcacgcatgcttggctgagcccccagccccacaaggcagccctgccactcctcctccaggcagcatgctgggtagccagtctccctgagctcccaggcagctgggcctcagctcagggacagggacagggacgtttcccctggaggcttccagggcccaggacccaccccttgtggtgcatccttcacatccccagctcagaaagttctttcccagggaatgcccacccagcccagcctcaggagctcttgcccacgcctcagctctgcgtcgctcttcctgcagtcggaaagcacaggctccgtggacgcagaggccactcctcatgccctacaccgtcctcctttcctgtgccagtgacagcgccaccccctgacccgccaactctcaggtaagtcactgagtcactaagcactcgaatcatctcaccaaagctggggacaaagggtctttgtcctgcttcaggagacaatgtcccaacacgttgccgtcccccaaatgtccccaagccacgctggatgtctcacctgtgtccaccagctccagtttctcactcattcaacaactcaccttgaacctagacgtaaacaagatggagcaccatcttgttcatcgtgcggcccctggtgtgttgggaagacaggttgggaggacggcagtggtggtggggaggggttgctcccggaagggatgaggagaaggcagtacagtgcccctcgag

SEQ ID NO: 17652 - DNA, 1194 bp, Artificial sequence
  DNA replication origin
gatagaggaggggcggtggggaggggtgaggcttcactgggtgggggttgcagggagaacagggctgcagttccagggcattgtgtagccaggaaaagagaggcagggaagccccaggcatgaccgtgtggattttccacagcgccccatcttttggggctcaagggcgtcccagaccctcaagggcacagtggaggcagcagggcagcaggacaagaggcagcaacgaggaaaagtacagcccaggagcaggagccctggctcccagggcactgccatggaaacggaaatagacattcacggggggtgggggggtgaagtcctctgagatgggccacgcgtgaccccagacactgggaaggtgggtgcccgccctggccatccatggcagtgccagccacaagagactggcaccgagggcccggcagcctgacagcccctgcctggcccaggacaccctgggctaaggcttggttcctcgggggctctcagctcacagtggggggagtcaaagcacagtcccacagcgcctctgggactccatagccgctactggcagggggagggcctgcccctgtgtcagggagggaccccaggaggcttccagagggaggcaacatcagagctgcacttggagaaggcgggcgtgctggacaggaaggggaggaggggcaccagaggacaggggtgtgtatgccaaggtgcagaggggtgggcggcagggccaagggtatggcgggaagagggacgacgtggggtctcccggggactcattctctggatggccatgcagaggcatgggaggcaacgccgtcctaagcagcgtgatcagatttgtgttctagaaagatccttctggctgccgtgtagggaagggcaggaggagaggaagccggaggcgagagggtgccaggagttgacctgtcatccaaggagagccgaggaggacagggaggtgactccaggcctaaggaagagtcgatgcttcctcctaatgcatcctccacagctgggccagaggggatggagcaagcccctctccagtagcctgcagcagcccgggctctggaagcgcgcccactccactccttgagaagtgtgtggcggaggtgagggctcctgcttttctgatttgctccaggccccaaaggaatctatgagcttgctccggacctcagcatcccagccagggcc

SEQ ID NO: 17653 - DNA, 798 bp, Artificial sequence
  DNA replication origin
gcatcccaggagcccacagccaggagccaaaatcggggggctgcagctgggacccctctcccgtgaactgcccctgccaggcctttttggcctcactttatctgcctgtccagtgggcacaaccaccttgctgggacaggcgtgtctgccccaccagcaggtccatcctaacagcctctgactcctgtcaactcaccacaaacgggtttcctccacctcagtgactctgtgatttggaaaccaaataaatgtgaaaccgtctctgttggcattgcacagagcgctgccccccaccccctctgggcaccccaccctcacacctcctcctgcccccgcctagcagtaccaaggccggctggaaatcatattgctccccggcccaggcccagacggccacgtcgctttcaagccaggcccactggtccagggccaggcgcagactcggccggtccagagcaccaggcagggtcgggatagaggaggggcggtggggaggggtgaggcttcactgggtgggggttgcagggagaacagggctgcagttccagggcattgtgtagccaggaaaagagaggcagggaagccccaggcatgaccgtgtggattttccacagcgccccatcttttggggctcaagggcgtcccagaccctcaagggcacagtggaggcagcagggcagcaggacaagaggcagcaacgaggaaaagtacagcccaggagcaggagccctggctcccagggcactgccatggaaacggaaatagacattcacggggggtgggggggtgaagtcctct

SEQ ID NO: 17654 - DNA, 1169 bp, Artificial sequence
  DNA replication origin
aaaagagagagagaaagggaggaagacacagagaaagacagagagagaacgagagaaagacagagagagaaagagagagaaagagagagtaagacagagagagagagaaagagaaagacagagaaagagagaaagagaaagagagagagaacaagagaaagaaagagagagaaagagagaaacagagagaaagacagagagaaagaaagagagagaaagagagaaacagagagaaagacagagaggaagacagagagagaaagagagagagacaaagagagaaagaaagagagacagaacaagagaaagagagagaaagagagagagaacaagagaaagagagagagagagagagagaaacagacagaggaagacagagagagacaaagagagagagacaaagagagacaaagagagacagaaagacagagagagaaagaaagggagggagaaggagggagggagggaggaggaggaggaggaaaggaaagtgaggggaagaatgccatcttcctcccccaggaggccaggctggtagggtggtgggtgctgtgggccagagggcaaggcttttgcctggaggtgagaagattctgtgtgaagacggggacactgtccccttcctcccctgcccttggtgggacagtgtggtccacctttgggaaaatcacttcctttcctgagcctcagtctccccttctgttcaacggggtgggtgagatcgcgtctcacttgtctgtgaattgtctaggtcacttcctttcctgagcctcagtctccccttctgttcaacggggtgggtgagatcgcatctcacttgtctgtgagttgtctaggttgctaagtgcccactgaccgcgaaaatgtggtatgtacacaccgtggactcctactcagccatacagaggaatgaaatgatgtctttcgcagcagcttggatggagctggaggccactattctcagtgaagcaactcaggaatggaaaaccaaacagcgaatgttctcacttataagtgggagcgaagctaagaggatgcagaggcatctgagtgatctaatgggctttggggactcggagggggtttggcggggggcgagggataaaggctacacattaggtacagtgtccattgctcaggtgatgggtgcaccaaagtctcagaaatca

SEQ ID NO: 17655 - DNA, 1595 bp, Artificial sequence
  DNA replication origin
atttcttttcttgaacgtccttgcgaggttggcactgtcattttgcctcagaggacacgacagctcccgaaggcacaggagttgcccatgagcacagattaataagtgaaggtggcaggttcccctttgctggtcttgctacataaacacactgacttactctctgaaaaaaaatcagcatcatttgtcttggttgccccctgacactctagggtcctgtggacgggcactcagtagggactcagaaatgctggcagtcactattctttcaacaaggctgtgcaggcccaaggcaggctcagagctggtccctgcgggcaaggagcatgaggaccaagctttgacaccctcccctgccagcccccagtgtgtggctgaggctgggttgtggtggaagcccagagtggagccttggagcccaggggattccagaaggaagggggcccggcggtaggtaggggttgggcggcgggggggtagggggtgggcggtgagagttgctggttgggggaggggagggctcagcagggggtctgtctggagaggcctgtcaggcagggtcttgtggggcttcagcaaatgctcgggatgatcctgcaggtgggagtcggggaggcagagaaagagcagtggggacattttaggaatgcttggcccgagtgaatgccggttggtccaggccttggagttagctctttgttgaggacagagagagagaagattagttcacctgtctgcacccctagggttcatccacccaagactctcactcctctttggggtgagttttgcaggaccggcctagttgagaggaccagcttcaaggggaggcgggtggcatccatgcgtctttggcaaagagcctcataaaaggggcccggactgaaaatcgattctctaaagctgaaatcaataacaataactaatattaatactgatggtcctctccttactgcactctgcagctgggggatgaattattttcaaggattagcagaggcggctctgcagtgcggctgggatgggatcagccgggagcctggtgctgggcaggaaggtggacccaggggacctgtgcagcctgatacttcctctgccttcagttcaacttctccaagacctggcttcctcatcactgtcctcaaatgagtgggctcaccagctgcatgactttttgagccctgtgggatgaggggagcccatgacctcgggggcttaggatcggagtgcggtgaaggggaagtggggtttgggacatttccctggggcctgcgagctcctagcgttggcttctgcctatgaggtgatgtgagtgatgccatagggaggccctgtctccagggagccccgaggctggagtgggcagccagggagggcagcactgtgcgggaagtggtcacacggttcctgcctggcacctcggctcccaccggctctctgtggagctctttctgctgggagtatcccagactgtggggctctctctgctgggagtgtctgggacttttgtcagagtctacagagtgaggagcccagggtgaaaagggggtgcccagatttcaggccctggggcctccactctccccaccaagagg

SEQ ID NO: 17656 - DNA, 1484 bp, Artificial sequence
  DNA replication origin
atattctgactccatttatttgtcacctgtgtctggatcttggtggggacaaatcttctagactgtgtctgtacctagggagaaaggaggagtcagatgcattggtggggggcacagggagctggtggggagcagaggccctgaggataaacagacaggagcagcccctgggcctgcaggaggcccaggacgccggagtctgggagatcccttccagaggagaccgctccccactcccgggggctgctggggcccaagccgtcctcccagcaatgctctgtggtgaacagtgtctcacccacgttgaggggctcctgctatgtcctgggcatgggctcctgtcaccatgaagggaaggcatgggtgtctgctgagacgcaggatgtacgtgcagggtgcgggggctgctgccagggaaggcttccaggaggaggtgaccagccaagctcaggtgaaggagcagggccagggaggacgcctggcagaggaagggtggccacaaagaccaggaggaggggtgagccccggtgttccaggagccaagagctcagcctggctggagctgggttgagtgtgtgagggtgtagggggaatatgaggagtgtgtgtgaatcagtgtgtgtgagtgtgtgaatctgagtgtgtgacagtgagtgaggatggagtgtgtgaatgggcctgtgtgtgtgaatctgagtgtgtgagtgtgtggggatgtgggagtgtgtgaatgagcatgtatgagtgtgtgtgaatctgagtgtgtgatgtgagtgggtgaggatggagtgtatgaatgagcgtgtgtgagtgtgagtatgtgaatgaacatgtgtgtgagtgtgtgtgtgtgatgtgagtgggtgaggatgtggcagtgtgtgaatgatcgtgtgtgtgtgagaatctgagtgatgtgagtgggtggggatgtgggagtgtgtgaatgagcgtgtgtgagtgtgtgtgtgtgatgtgagtgggtgagaatgcggcagtgtgtgaatgagcgtgtgtgtgtgaatctgagtgatgtgagtgggtgggaatgtggcagtgtgtgaacgagcatgtgtgagtgtgagtgtgtgatgtgggagtgtgtgaatgagcatgtgtgagtgtgtgtgaatctgtgtgatgtgaatgggtgaggatggagtatgtgaatgagcatgtgtgagtgtgtgagtgtgtgatgtgagtgggtgaggatgtggcagtgtgtgaatgagcgtgtgtgagtgtgagtgtgtgtgatgtgtgatgtgagtgggtgaggatgtggcagtgtgtgaatgagtgtgtgtgagtgtgtggctatgcgtgtgtgggagtgtgtgagtgaggtctgatgtgcaagctgcaggttgcagagccttgtggatcacaataagatgccaggggccaggactggatcctgcagtgccaggaagccacagagtgtggtagggtgagattgacgctgtcagcatgtccctagg

SEQ ID NO: 17657 - DNA, 1113 bp, Artificial sequence
  DNA replication origin
aggagtgatgggaggggacgtccaccccacctgcccctctcggccacacacatccctcccccaacactaggccgttgaaggtgataatgaagtcatttttctaaggaatgttcacctggaagacagccgtgtccgccagccgctgatcgggccacaaaggcaggcccaggggagaagtggagggcgggggcgggagggaaggtgggggtgaggtgcggcgggccctgaaggcctgctgctctgagcctgctgccacgtcggggtgatttatatgggagctcctcggagcctaggccctgcctctgccccagccggatgcagcaaccggctgccgttgcagcaggagggagaaaacctggggacttggcctcggtgagtaggggtgctggggtgggggcgggggggcgggggggcggtgatggcgagctccagcgaggcagcagaagacgcgttttcagttccagaaggagccacggcgtgccctcgcctgacctgggcacagctctgggtgcttttcagcagaactgattgatagggccctcctgagggcccaaccaggtaggtctgacgaccggccccaccttactaatgtggaaactgaggcacaagtgacactgagctgctccctgtggtctcacatatctgaaactcaccctggcatctcctgccatcccaggatacacgagggactctgaaacactccagcctgaaccacagcctggtcctggggccctgggaccttctcgggagacccagatgtctcctgcgctctcctctcgctcatctcctctcccaagtgtttcctcccactgtggctacaagccccacaggtagctgggctcagagtaccagggtccacacagagccacagctccctagctgttccctgtcccctgccccggggccactgtgcaattgtcctggtgcttcagtttcctcgtcagtttcctcgccagttcataagttgtcctgagaatagagaggcctggggcatggccctggttcggaggaagggttgggtgcttttatcaggactgtgtgtaaaagcgaatgcagaaaaggacagtccagagggtggcagagctggggcagagcagggaacgggtagtttgt

SEQ ID NO: 17658 - DNA, 1041 bp, Artificial sequence
  DNA replication origin
ggtgctggggaaaaggcagagctgcctggaggtgggtgctccccaggagtctcccagtgccacccccaggagacgaagccacgtggcccatcaggaagcggaaccacacggtgacacccccagctccccctcccaggtctagaaccaggtcagggcaatgcttttgtgaacatttgcactttcaccctcaaaaccacctgttatgggggtgcctttgctccctggcaaaagatacgttgcagccgctacccccagcacctcagactgtgctcttatttgggaatagggtcatggcaggtgtgactcattaaaataaggtcatgctggtgttggggaggcctaatttgatatgacccctgtccttgtaagtggatgtgatgtgtcaggggcaacaagagttccaagcaaggcccctaccaggcctgggaggtcagaagcagtaacagcctaaaggatgactggggtcaggagagcagggagggtatcccaggcagagggaatggccggtgcaagggctggaaaggacgctgcccatcgctgcccatcctaagcagcaggtggctttgtctggctggtgggcagagttggagtgggtgcaggaggggcacagtcgaatcccacagggtctggtcagtcacattgagtctgggttttatccagggcaatgtggagccacggaaggactgggaggcaggccatggtcgggtgtgaagaagccctggaggccggtggagatagaggggagctggaggccggtggagatagaggggagctggaggccggtggagatagaggggagctggaggccggcggagatagaggagagctggaggccggtggagatagaggggacctggaggccggtggagatagaggggacctggaggctggtggagatagaggggagctggaggccagtggagtcctgggtgtgggcactcggactgggcagcggcgggggcgtggcaagaaggggagcagagcagagaggacacctgactgtgtctgccagacccgttccccagaggacgctgccctccc

SEQ ID NO: 17659 - DNA, 1109 bp, Artificial sequence
  DNA replication origin
atgtgttccatgacagtcggcaccagaacagtgggtctgatggttctggcctcagccacctcctggacaagtgccgtggccgcctggttgagcattacaggcttgagctccgacctgggccttgtcctgctatggggtccgctggaaactgcggttgtttctttaaacaaagagccatccagacctctgacttctcagcatgggggaggcaggcgtgttgtgaggctggcactagcagagctgtaccaagccacagaagaaaggccgtgaaggccatgtgtggccccagcacaaagtgagccaagatctgccctggggccctggtggggtatggtcactccagagcagggcagccccagaagatgaggcaggctggagggtgccacccagcagccccaggggtccccatgctacccacagctggggactttcttttgccaggcctgccaatggggagtcaccacagggccctggctgcccggggctgccctgagaggaaaaggggcacaggcagtggagaggggtcggagtgggaacagggcagcctgcctgccccagaactgccctgggggaggaggacttcctctcccacacatttcatttacagatgagaatttgggggtttggagctttggggactggactgaagtcatactcctggggccagaacttgaacctaggtctgcctgatccgcaagcccatgccccctgcctcttcccaagatcaccccataagaaattgaggggtttatggttacaaggcagggtgctttctgaagctcttttcctcctcagagggctcagtttggttatggcatggagcacagcccattgatcttgagctaactgaatcccgctccttttagtgattaactcccccacccacatcgggtgaagttcaaagtcttctctgagcagacacacccagtacaaataactaattgtattttaggtgttggggtggcagggggagcggtcttggaaagaaaatgcagccaaatgcgggaaggcttagatacggggccagggaacccagtacagcccactgcttgctgtttcctgggggacaggaacattttttaacgacttacaggagctgcttgtggccc

SEQ ID NO: 17660 - DNA, 1368 bp, Artificial sequence
  DNA replication origin
tccatcagggaacatctcagccccatggcccgtggtcatgctcagcagggagtccagcagttgtgcgaaaggcaagcttgcccgtggccaggccccagccttaactaatttaagcatggccaaaaacttccagactgtcctggtactgatagacttgtccctgatcttctgggtgggtccagggccgttttagagaagtccatccctggatgggatgatgggttgctatcctgagcccatgggcatggagctgcctggagggttcctccccatgagctgcaccggctgggttggccccctggatcttagctcttaagaagttctacactcagaaaggcaggaggggaacagaagtgccaccaacagggacccagggctgttctgagctggctggcgggggtatggattcctgctgtgagctggctgcgggggggtgtggattccttctgtgagctggctggggtgggggggtatggattcctgctgtgagctggctggggggggtatggattcctgctgtgagctggctgggtggggggtatggattcctgctgtgagctggctgggtggggggtatagattcctgctgtgagctggctgggttgggggggtatggattcctgctgtgagctggctggggtggggggttatggattcctgctgtgagctggctggggtgggggagtatggattcctgctgtgagctggctggagggggcggtatggattcctgctgtgagctggctggggtgggggggtatggattcctgctgtgagctggctgggtggggtatggattcctgctgtcacagagtggccacatggacactggcagagaggggagctctcgcttcaccacgcccataccttgtcacaactcggcagagaggaagagccaagagaccccgggggaagcgggctgtccctcacaaggtggttagcccctgcaactggcagtgccaaggagctggccaccaggctggcctcaaaagcccccaacacacagcagcccagccacgggtcctctccgctctctgggttcagagagacattagccaagcgggcacgcgagagacattagccaagcaggcacgcgagagacattagccaagcaggcacgctcttactctgacatcctgggtggggtcacttcgtgggttttggagccagcgaggtgcctggatccgtgcagcctgtctgcgggctgaccatggtgcaggctgtctactcccccaaaatgggtgctcaacataatacattgcttagtgaaaacaaaaggcggttaacattgcacacaaaaggatgccagttataaatgtatacacagaaatctgaaggaaaacacctcccaccccccgactggtgaac

SEQ ID NO: 17661 - DNA, 1414 bp, Artificial sequence
  DNA replication origin
agagggcccttctggaaccttcagccttcccaggaggaacccacatggaaatctgtctgcatgtgcctccccgactccaggcaccaacagctcctgagtcttgagttttcagggacaaggagtgagatgggggtggggtggagagtccagcatgccacaccgcccactattgggaggtgacctcagacacttcagcccagccttcccaccattgcctggcgtgtcctgacctgccgtccgcggcctgctgctccttctctctgcaggccgctgctcagccggccctgctgcctgggcggccactgcctgatggaacctccctgctccaaaacctgactcaagaaccagtgatcccaaaagctgcctgagccctttggctggatagagccttgctctccctgcactgagcataggcgaacggcctgcctaattcagcgtcatttcatcatcatcatcatcacaataactgtcacaccgagctcgtcctcccgagcgcagactctccatattatctcacttagtcatctcagtgactcagtgaggagggagtggttgttcccactttacagatgagaaaactgagatacaaggagggaagtgacccagctaggccacacggttggtaggaggtggacctgcaatctggcccaggccttgtctatctgggactcccccccaaccccccaacctgagtacagtcaggaggggcccaagcagtcacagagacaggcctggaacgcggcgggcacatggcacttttgcagtgtatgttggtgcttacgggggctctttctcagtcctatcctttgtttgccgcccccctccctggcaggaggaactcagttttagaagggcagtgggttgggccggcatgccatgtgcagtggggaagtgggtctgttgtggctgtaaccacagtgggtgaggaccaggtgtcaacagtggccctcatcccggagggagtggggcaggctgcctgttggacagggtgtgtgaatagggggacggggtggcctttggtaggggcccaggggtcagtgaagagggggagggggagagggctgccttgggctctggctgtgctgggggtgggctgcccaaccagggcacttctgtcccaagtggaaccaagacctcccaccggaacaggccaccggagccctcgtggaacccagctccgggtggcccgacttgaggggcacccaggcagcaggacacctctctggtctcgggctgttatctttgggccgtgtcatggctgtccacacgcggtcatcacctcctcacctccctccccattagcgtcccctgacccgggccaccacgcgcagcctgcgtgaatggtcagtccctgtgcctcgcagcccgggcccttaggtctaggtggtcagcaagctcgcggtgggggtgcgga

SEQ ID NO: 17662 - DNA, 896 bp, Artificial sequence
  DNA replication origin
gctgcggcgccggcgggggggtggcggggggcccgcgacgggcgctgactcggcgcagcgccgccgccaccgctcggcccgcgccccgcccgcccagccccgcccggagcgcgcccccctccgccgccgccgccccgcgatcgccgcccgcccggccgccgagttgagagcgccgtgcaaacttgcgagttcgcctccgccaggggttcccgggagccgcgaggaggcggcgtgggagggggcggggcgcagagggagcggggcgggggcgggggcgggagcagaactccctccccgggcccgccacacactcgcgcacacacacacttgcgcgcaagggcccggaggaggcggagagccgggccgggagcccagcggccgggccattgtctgcgcggccacacaaagcggccgggcggtggccgcgaggggaccccggcccgggccaggcaagcgcagagccgggcgggatggccgcggcacccatacctcgcaccccgccgcggcggacacgtggggaaactgaggcccgggagtggcgatgtgccccaacggcagaggacaagctcctcgtccggggaaggtttcgtcttccggacgctacccccggtccaccccacactttcacgccctacccccacggagagacccacgagcccaccgggaacgaggaggggtgcgcgcttcgcctcctcatcgacccgcactcctgggacccctcttcaaaggcaccaggctgggcaggcgctgcccggagttggacacagactttgtggccggtggctatttttataccctgggtagttctctgcctgacttttaaattcacgatttgtttgaaaacgaaaggaagcactcctgccccgggacagctcgggccgcctccgccgcgcgcc

SEQ ID NO: 17663 - DNA, 1642 bp, Artificial sequence
  DNA replication origin
gctcggtgagtgctcgccgggccgggcggggacggggccgggggccgggggccggcgggcgggagggggccgggggcgcgttggcggcgcgcgcggggggtcgccggcccgggccccgctcggacccctcgccgaccttcgcgtgagttcgggcgccgggcccggggagggtcgacccggggcaacttttcgcggggccggggcggggctgggcagcgggcgggcggcggggccggggggcgggtggcaggttcgcccgggacgaggaggggtctcccgctcaccggcggccgcctgcgccccggcgcccagctgcagccgcgccgcacaggaacccggccggagcgggaggagcaacttctgcgctccgcggctccggcctccctggcctggggaccgggacggcgcgctgggccccgagcggcctctgcgccgcccgcccgtcgggctgcggcttctagcaggccgctggcccttgggtgtgtgtccgcccaggaaacagactgggaccctgttatccccaaagcagcccacgcccgggtgggcagggtcccccggggctgtatgaacagaacgtcagacctgggaaggccccattccagaaatggggcccctcactctggcacccccgggtgttctcccaggctggctctccatttgtgagcaggacagcgcagaggcgcgtagggtcagtttccctcctcctcctgccatcccgcccggtagcttcctatcccagactgcccgccaactccaggcccagacctaccgagaagggggagagggcatggctggggcccccacccattgccctcccaagggtttggaagctagtgagaagggggagactttataaattagctccgggaaggatattaatttggtggtgggacggcagccaggctgtcaggccgggtgaaggatttgtgctgaatggaaatcgaaacagctgattatgaatgaagcccccgccatccgtagcccctcctgcccaccctccctgcagcctggggtgcagcttggccaccccaggaggtgctcagaagccaatgtagctgcagggatgtttagtgagatggggcatcaaggggagccagcatggacctagcccctcctggatgtgagggtgagagtctgagtacctctgctactcacaggcaggtgtgctgccccgtgaccggggcaggcggtgggttccaggtttgtcagacctaacgcttactccctgcctctgtcatgatggagtggtgggctcgaggccttgaatgagctccagggctcagcctccaggggtgggcgctcatgcccattttgcagatgagaaaactggctgggagaggctgagcccccaggatacaaggtggtggatttgggattagcacccccagctcgtggtactgctgagtgtgaggcaggagggaatgctgcgctgtctgtgaccgagtgcagtgtggagtgggctggggctgcctttccctgttaaagctttgcactcacacatgtgcacacacacatccacacacacagagctaggctctcccagacgattcctctggaacaagaatgctcagctcagtgtctggcccctggacgtggcaggggcctggctggttgcacttcagctgagtactgagaaccgaac

SEQ ID NO: 17664 - DNA, 731 bp, Artificial sequence
  DNA replication origin
aggacgcaagggtggggttgcagggctggaaccaggagggggttcacgtgtgaggtgaggctgggtagggcctgtgtgccgggcgtaggtgcatgggtgcccggagactgggggatcccagtgtggtgctcatggctggaatgaggccaccagtgctgtgcagagggtggtctggaggcagccaggcaaggcctggaaggaggaagtgactctctccaggtggctcactggtttcaggtgggccttggggcccctgtgaatggccttgcacccttgccctggctgggctcctcagcatggcagcctgggaaggggggaggattcctagcatcttcctgggggcttaggccaggtccctgggctggcctgggggtcgtctttcccgggcacgggtatgggtgaggcaccttttccctggccctggctccggccccccctgcactccccaggctctggatgaagtagggggcaggccgtccagggggagtagagcagccgggcctcttggggccggatcagggatgctgagaccatggaggggaccagactttggggctggggagtgggacattcaggggtccttcaggggatcagagcctctcagggtctctgtgtgagaagttgccacggggtctgtcctgcacagcccacatctgtctttgatgataggcttcagccccagctcctcttccaggcactgcctgctggggtgagggatgccgggaagccct

SEQ ID NO: 17665 - DNA, 1323 bp, Artificial sequence
  DNA replication origin
gagatcctccctccaggactctggagacagccgccgttctgccctccctgctgacccctctgccctccctcaggtctgcctggccgcctttctgagaacaaggagccgattgttgtcaccactgctgtctgcctcctgctgtggatgccttgcttggcgctggcagtgcccacaccggcagggacctggggacttggagccggacctaggtcgccggccgtgtgcctggtgtcggggcagggctggtggtcaccccccctggggttggccccgtgggctcagggccctgcctccctgtgccctgtccgtagggaccctctcatgccctctggccagcctggagagctcttggcagaaaggccaggactgaggtggctggcatggcgcctcccgcgctgttcctccctccctgcctggccttcaggggcgcgtcgtcctccccagaccctcctctgtctgcgtgtgagcccgtgagcctgtgtgggcttatgtgtgtggctgggattccagccagggtttgtgcgcgtgagcctctgtctgcgtgtgagcccgtgagcctgtgtgtgagagtgtgtgggtgccatgcctgtgtgagtgtgtgcctgtgtgtgagcctgtgtgtgggtgtgcatgcccacgcccttgtgtgagtgtgtgtgagtctgtgtgtgtgtgtgtgtgagcccgtgtgtgtgtgagtctctgcatacccatggccttttgtgagcctgtgtgtgtgagcctgtgcgtgtgtttctgtgtgagtctctgtgtgtgtgagcctgtgcgtgtgtctgtgtgtgtgcctgtgtgtgtgtgagcctgtgtgtgtgtgtgtctctgtgtgtgtgcctgtgtgtgtttgagcctgtgtgtgtgtgtctatgtgtgagatcccgtgtgtgtctgtgcacacccatgcccttgtgtgagcctgtgtgtatgagtctgtgtgtaagcctctgtgtgtgtgtgtgtgtgagtctgtgtgtgtgtgagcccatgtgtgtgtgtctgtgaacatccatgcccttgtgtgagcctgtgtgtgtctgtgtgtgaacctgtgtgtatgtgagtgtgcacgcctgtgctcttgtgtgagcctgtctgtgtgcacccgtgcatgtgtgttcctctgtgcacatctgtgtccatgtctgagcctgtatctgtgtgcacccatgtctgtgtccctctgtccctgtccctgtgtgagtgtgtatccgtgtgcacttgtgtcctcgtgtctccctgtgcccgtgctgtgtcggcatgtgtgcctgtgtgtgcttctgtgtgtcttgtgccccacaccttctg

SEQ ID NO: 17666 - DNA, 765 bp, Artificial sequence
  DNA replication origin
gtgggtggatgcccccaagggtggagcccccattttggggatgtcatgtaccttcaccccactgtctgctcgcacttgtgtgctgctggagtctgaagcccagggtgggacaaggagctgcctctgagggagggtcctcctggaggcccaggggcttgaggagcccttgtcgggacagtgtgggttggaagagtcacaggtgggactggctgggaccccaccagcgcttcactgctcccatcttacggagggggagggcaaggctggtggggggcagcttgagaggcactgcttccaggcaccacatcctggacctggcccttgcggggagggcccagctgtcactgtggaggtggcaggcaggtgggagtagggtggtggcctttccatcactgtggaggtgacaggcgggtgggagtggggtggtggcctctctgtccctgtggaggtgacgggcaagggtgggatggaggccttgccatcactatgggggtggcaggcaggtggggttggggtggggacctcactgtcatctgtgggcaggatggggcagccataaggagagcaggtagagaaagggttaaagggccaagggaagtaataatgtttctaattttcctgtgtaatttaatgaaaatgtaaattgctgggcagatgacgcgccctgccgcggtgttgaccaagatgaattgcgggtgctcgtggtcagcctgcctttgtctctgcgccctgagtgcagcgcagctcctccatctgcctgggagg

SEQ ID NO: 17667 - DNA, 1207 bp, Artificial sequence
  DNA replication origin
gtggtggcctctctgtccctgtggaggtgacgggcaagggtgggatggaggccttgccatcactatgggggtggcaggcaggtggggttggggtggggacctcactgtcatctgtgggcaggatggggcagccataaggagagcaggtagagaaagggttaaagggccaagggaagtaataatgtttctaattttcctgtgtaatttaatgaaaatgtaaattgctgggcagatgacgcgccctgccgcggtgttgaccaagatgaattgcgggtgctcgtggtcagcctgcctttgtctctgcgccctgagtgcagcgcagctcctccatctgcctgggaggcagacaccgtgccgtccaccctgatgggggccgcagtgtccgggcttctgccgagcaggaggggggcctggtcagtcagagccagcccctgctgtgaccccacacccctgtccggaggagcacaaggctgggggaggacggccaggggcctgcgttgatgggcaggttccaggtatgcggagggtcactggccagcgtggttagggaaagccctccagggggatgctgcgggtgggcttgtgcatgggaaggagcagccggtggggaggtggagaaggacctctcaggccaggggaacggtgtgtgcaaaggccccagagtggggctcactggcaggggctggggcggtcagttcagagctggacattgaggtctggtggccaggagggggctggtgggtgacagagccaggcaggacatggccagaggtgctgggcctgtcctgacagtggtgagcatccttcagaggccgtgagtgctgagtgagggtcctggctgccggtgaggatggaccccaggggcaggaggggagtccgtggccacttaggaggcagaagcagaggtggtcatggccatggctgtggggatggaggagccggtgggtctggttgcagttacagctgtggccaacaggccgggagagagggcttggggtgaccatgtggtttgggcctgcacagtggtgctgtttctagggacatgaggcaccaaggggagtcgagggtgccaggcgcggcagttgcgattgaggtcatgcaggacccctggcaggttacaagagcagtgtgcattgaatgccagagctctgggggagacctggaagcctcccaggaggtgaaaccccagggtctgtggttggagctt

SEQ ID NO: 17668 - DNA, 823 bp, Artificial sequence
  DNA replication origin
gcccctagctcgtggccctggctttgaatgttacatagatgaggcctcatgtgggtccctccccttctgcttacctgccctcttacttatgaggaggctgatgctagagaggggtgtgccctgtcccggttgcccagctgggggatggggcaggcccacagcttctggggagagcgtttcccaaggtggggtctggtgctggcaggagggggcggggtgagccaatggctccggggccaccacagaggcggctgttgctggagggctgatggcacgctgggcccgggaaagcccctcgtgggccatctcccggagttctcttgagggcccctgtcttacggatgaggagatagaggttgaggatcacagccccagcctgcaggcgctcgagctgaaagccctcgcccctcgtggtggggcagcgcgtccctgggtgagtgaccaggcggccttgggtctctggtgagctcagggagcggggtccacgttgcctggcccaggtgggatttggcgggtaacgctcgtggtgtgtcctggtgtgagacccggtgttcttggctgatgtgtgggtttgctcatggggtggaccaggccgctgcccctgcctcctgtctctggctgtggccatggctgtgtggaccaggctggggctgcactggggcctgggtggtagggggtgatctgcttgtccagtggtttctgtggcttttctggggtcctgggctgtccctcagcaggcctgggactgggcggggacagtggggatgagtttcaggtctgttcttggtggctgttaactctaggccagatgtagccctgaggg

SEQ ID NO: 17669 - DNA, 1802 bp, Artificial sequence
  DNA replication origin
gaggtgccagcttgcagggccaggagcctgcggcagcgggcctggggctagggtctcctcaaccccctccccccgggactccctgccatgcacctgtgtctctggagagccctctgtaggggagggaggccaggctgctccccgatggatggtcagtgcctggctgtggctcccacagtgccctgtgtccccagggctctgctgatggtcagctggccttgacaggcacagccaggtgcctgtgaggtgctgttccgtccagtgggcttgaggcccccttgggaagtagggcagctgctcactctgcccttgccacccactcccctggggctggatagcccctgccatgggggccaccgggtccttcccgcactgtggtgttcggagatgcgccctccaggatgagaggctcaggcagcagaaggctgcagagagctggctggctttgagcaaaaagtcatgtgtgccgttctgttagggtgtgtgtgtgtatgagtgtgtgtgtgtgactgtgtattttgtatgtataggtatgtgtgactgtaggtgactgtgagtgtacatgcatgtggatgtatgtgtgtggctgtgtggtgtgtgtgtgagggtgtgtgtgtgtgactgaggatgtatgtgtgagtatacgtgaatgtgtgtggatgtatgtgtgacttcatgccatgtgtggatgtgactgggtgagtgtggatgtgtgtgtgactgtgagtgtgtttgggtgtgtgcatgtgactgtgcatgtgagatgtgtgtgtgctgtgcatatgtgtgactgcatatgtgtgtgtgaaagtgtgtgagtgcaggggttatgtgtgtgagtgcaggggttatgtgtgtgtgggggttgtgtgtgtgtgtgagtgcgggggttatgtatgtgtgtgagtgcgggggttgtgtgtgtggggttatgtgtgtgtgagtgcggggcttgtgtgtgtgtgtgtggggggggttatgtgtgtgtggggggttatgtgtgtatggggggttatgtgtggggggagttgtgtgtgtggggtggttatgtgtgtgtgtgtggggttgtgtgtgagtgcaggggttgtgtgtggggttatgtgtgtgtgagtgcggggcttgtgtgtgtgtgcgtgggggggttatgtgtgtgtgtggggttatgtgtgtatggggggttatgtgtgggggggttatatgtgtgtaggggggttgtgtgtgtggggggttatgtgtgtgtgtgggggttatgtgtgtgtgagtgcaggggttgtgtgtgtggggggggttatgtgtgtgtgagtgcaggggttgtgtgtgtgtgcgggggttgtgtgtgggagtacaggggttgtgtgtgtgtgggttatatgtgtgtgagtgcaggggttatgtgtgtatgtgggggggttgtgagtgcgggggttttgtgtgtgggttgtatgtgtgagagtgcgggggttgtctgcgtgtgtgtgggggggttatgtgtgttggagatcgcagctgttgtgcctccgggggcttcttggatactgtcacccattccctgtgagctctccacacccccacctttgtgtcccctccagccccacccagggcctcctccctgtgggcatgggagtcatgggcctgggtttgaggtctgacctgctcggtggccttggcgtgttgaggcctctcgggtatcctgtctcagagctgccttggtgcaccctcccacagcctcacatttggaggcagaggtgtgggaggagaggctgagtccagaggtcccctcctcctagttcaaggctcactgt

SEQ ID NO: 17670 - DNA, 958 bp, Artificial sequence
  DNA replication origin
ttggcggctccagccccctctccagtatggcagagcctggaggcctgctggtctctgggtctgagactctggcctcccagcctgctcccctgggggttggtggaggcctcggggctgtcggagcttcaggattagggactgaagcccagcaggggctcccttttctgtgccccctgcctgagcacaatcttcctgccctctcccctgcagcccctctgttgtcgtggtcagtcgtgccgcctgagggccaagtgtggccttggcactgccaccgtccaccagcggcaagtcagggcaggtgcgtgtgttgggggtggccccccgcggtgtaggccggaggtggcgtgccggccccgtgagtcacgccgatcccaggatgggagtgggggtggccggggcactgtgagctggcgtgctgaggctggcctgcccgtggcttggcctgggggcaggggtagggtggggtcctgcccgggttctcctggagaacctgggtcaggagccaggggccagatcagggctggggacttcgcctggggtcggataggggctggggtggccatgagaagtgaggagcctcccatgacccagtggttgcaaggagcagatgccgcctgtcaggtgggcggccccccctgggaggaggctgcaggctgggaggtagacaggacgggcccctcggtgtgatggttggggtgtccagggactggacttgggaagggttggtgacctagtgccatggggtccctgctctctgtggctgcctctgtggccaggccttggccctcctattgctgccccacgacacctggctgtggcttgtcccagctcctgggccaggtggggagtgcagctggccaccgagcctcatgaagcacctttccagttccccggcacctgggtctggccgaggtctgaggccagaggaaaggcctcctccagaatccagggctgcccg

SEQ ID NO: 17671 - DNA, 790 bp, Artificial sequence
  DNA replication origin
ctccttctgtccctggacccaggagtttgggagaggccagcgggccagctgggcactttggtctctgtaatgaggaccctcccaccccaccaagatgcacacatgccctgccaggatgtgggggggcgcagggcagtgggctgagccaaggtgtagatgctgggaggtaaggttaccctccccctgggctggcgtctgcctccccgcctgctgctgcccctgtggccggccgcatgtggggaggaaggaagaggtttgggtggtgtgtgtgtgtgtgtgtgtgtgtgcgcttttgactgggctcggagggctctggctgggacccaagctcaggcctttagcaccttggctgggaggagtgaggcctggggagacagtgggggccaggagctgggtgctgaggagaccagagctgggggctggggcggggccagggcagctggtaggaagtcctgcccttgcagccggtcctgcgagaaagcccctggctgctgtcttggctttgctggactggcaaggtggaccagaggctggggactggacaccatgggcctctgtgcactgatggagcagtaggtgtgtgggattcatggggtgctggggtgtggattcacgagggaggggccttttgggttacgaatcagcccctccagttatccagggtggggtgctgaggcctgagtgggcagtatgagggtgggcagctaactatgtaacagccgggtctctgggaggccctggtctgtggcgttgccgtctctgagctgggaagacatgtgcctgagagctg

SEQ ID NO: 17672 - DNA, 2285 bp, Artificial sequence
  DNA replication origin
tctgggaggccctggtctgtggcgttgccgtctctgagctgggaagacatgtgcctgagagctggtccggggtggcctctggctttggctggggaggccctgcccacctgagagcagcgttcggcgagtgtggactctgccccggtgctgggcgcagcacctgtcgagttcttggagcgtgccgaatgcaggcgtagcttcgggctgtctggacaggacctggttagcgagaccctggctgaagggcccagaaggggctgcagtgggactggagccacctggctatgcccctgggctgctgggatcacatgctgtgggtgattgggcagatgtggctgtgtgtgtgcacactgtggggacagacagggtgggcccatctaagccatgtcctgccagaggcttccccagtgtcagcacacacaggggggccatgaggggccgagagcccaggccgcttcaccccagagggctgagcagctggtcagctggacttgctctgggggtctttgtctcactgatgagccatgtcagggtgaggcaggatggaggtggggctgtcttgtgtggcctgagtgggtgtggcgggctgggagcctgttgcaggtcaggatgtgtccaggggccagcaccagacctgctgaggtgggaggtcagtctgtgctggctctgtgaggggccctgcagtcttggaccttgcctgtcccctctggggctgaggtcaaccctggggcaggggtaggatggggacacggaccctcattccgagtctcatgagaccgcaccacttagctgtcagtgaggcttgttgggcataaatgaagcgcattgatggggtgagggccggaagaacccacagaggcttcgcacctcccactccccgccccactctgggaaccaggccctcaggcagctggcgaggatctgggggtcacagctgaccaccagccacagctgagttggcagttagcatggtggcatggtgtgcctcttgggaataaagcttcgacctgggctgcatgaggacgggtaggtgggctgtgatcctcactccaggcagaaccgtcccatgcccttgtccataggatgagcttatccaggtgtggttccaggccctgaacccgatgtgcagggagctggaaagttcagaggagggaacaagggatcctggctaacacccaggaggccaagggaccgtctggcctgagtcttgatgaaaccaggcctcgggggttgtttgtgttgttattatgagactagcatgtgcctgtggtacagaccccagctcaacaaaagcctatcttctcctcactagagctgggagtcccagaccctccacactgtcactcaggtggggagtcctggactctccacactgtcaccctgtggggggagtcccagaccctccacactgtcacccccggggggagtcctggaccctcctcagtgtcaccccggttgggggggagtcctggaccctccatactgtcaccccggcggggagtcctcaaccctcttcagtgtcacccctcgggaggagtcctggaccctcctcgctgtcaccccagggacctccctcatcatctttgaaccccaaactgggcagacattgatggttacctgctccacatggctgggccggtggtgcagaggaaagcgaaccgtgctggggtcgccagcgactgaggatggagtcaggggatatggcagcagtggagacaccagcaagctagggacagcccgaagctgggggagacttgggaatttagtgggttctgcagagcatgggcttttgtggtgggtgagacccaggagggaagggacctgccctgggcccctcagccggtggagctgtgggtgcagggtgagcagcgtgtggacccatgcagggcgtgctggggggcaggggccagagctggaggaagaggctgcggtggggctgtactgggccgtcacccggtcggcctgggggcgagggttctctggcccttttctgtcttccaggaggaaaggagccctctgtgtcccacctgctgccttgacgctggtgccctgggcttttgtgggcagtgggtttccctgtgctcaggcggggcagtgccctcctgtggttcagggccagcctggcctccagtcctgagcaccgcctgcagaagggttttcagacgggtgtgagcatgtgggggtgccatcacaggagacttctggttcccctccagccctgtgtgacatcttggcggcctgtccccagcactggttgggcaggcaggaagctcctggcctgggat

SEQ ID NO: 17673 - DNA, 1595 bp, Artificial sequence
  DNA replication origin
cctcgggctgcagggtctggcagacccagggccagcctcagtttgctgttgctgacagtggcagcctgggagaatcagaacgctcccatgacaccctcagcacggccacgtacggagcagccgtgaccagaccacaggcatgctccacggagcggggtgtcccagacctggcccccatacctccccagcctctcccgacctggggtccccagatcctctcccccacagccccagcagacatgccatgagtcccacactccataggcaagacacaggcacccacccaggccacacggagtggccaccaaacctggccctcacctgccagccacctgcggtcccccgcccgccaggccagtccaccgcccgacagagaggcaaggaggtgcagcctcatggcgagggcaggcgagaggtcccaccacaggggcggccccatcggccgctggccggcgggctcagggtcccacagcctcgggtgatgcagcgcggcggctgagcgggcaggaaggggcctgagggaggtgcctgagcagagctggagtctcttccaggcagcctggagctggtcgcaagcaagtggtgctcatgctggcccggcggcccagttcccctttcccagagccgcccggtcccccaccctcaaccagacacctgtgaccacaaggcggctgccattggccaaagccaagagcttcttggaagaggacaaggaccccggcctcatttcctcaatccgagacacgaccgtcacacccgcagctggtgccgcagatggtctgccacccagcaggggcctgggcagaggacaagggcaaggcccggacgttgggcagccccaagttcaaatccagctccaccacagctggctgcccactgtaggcaaatcaggtgacctggctgggcccattccccatctgcgtgctggggggcgatggcaacagccgccccaacatggtgccagccggcatgcaggagtgctggaaaaccggatgcagggtgcctgtccttgtcctggcctggagtggtggcctggaagaagcccaggcattgttcgggggccaccaccgctcgcgcaggccctcacatccccaccgtgccatccccacctgctcccagcaagggccacactgagcagggagccctagagaggccagcattacggatcctggggggcgtcctgtgggggcgtgggggacgcagaggcccgagtggaggaaacaagcagggagtcaccgggcctggcaaggcaggggccggaatggagcagagcctcggatactggtgaggcagggcctgagcagctctggatggaacccgcctcgagaggcttgaggaagcacgcgggggaaggggccttcatggctcccagcctccctccagccacacaacgagggctttcttccaaggcacagaatgccttttgtggcccatcagccaatggacaagccccgggccggtagtgagtgtgggggtgtggacgtgcagctttcagccctgccagcccctggcatgctagtgggggtcctaagtccccatccacccaggaggcctgagagccaaccagctctgtccacaacaggctgccctgccca

SEQ ID NO: 17674 - DNA, 1432 bp, Artificial sequence
  DNA replication origin
tcaggcctgtgtccactcacctccctgccaagctctggtcctccaaggaggggtttggtctcctgggtcctcctcggagagtcacatccgccacctggccggtcctgtcgtggacgccctcagctcgctcccgtcccctgcccctctggatggcacagactgcacgttgttgccatttcacggaacccgttttcccggatttgtcaggaggggagagaatggtggaaatgcagttttgctgggttccctgcacacgtgggcgctggctttggtcacccccggggggttgctcgtgggatccagagaagtggacgttggtgaggccaagcaggctgggaagggtgctggacagggacagcagaggcctggccccagggggttagggggccagggcttgggcgcctctgtcccgggctgggggctttggactttgggggtataatggggagccctgggacagcagagggctagccccagagggctagcggggccagggcttgggcatctctatcctaggcctggggctttggattttgggggtgtaatagggagccctgggaagttctgatggtgacagagtggacattctgccaagtgaccagtggaggggacagtggtggagagggtgtgctgagctggccttagcctggcctgggcaaggtctggacttggccatgtctggctctgcctgtacagagggggctggcagacgttcctgcgggaggcactctgtggatggggtcacccagagtctggacagagactccatagctgcagctggcctctccatccctccccttccttccgaggcccctgggggctgccggctaggctgggagttaccgtgcgtgctagctgcagccccgtctcaggttcttggggctgggcaccgaggagcagagaagctgcctgccacctgttcaccctcgcatctgcaggccagcggctcgtcccctcctgctgccacagtaccctgatatgtgccgattggtgggattgggaggggacacagcgaggccttgggtcagagccttgatgaggatgggggtggccgtcctgggggcagcaggccggagcctgcgcttgcctgcattccccggcaggatttttctctcggcctcctgggtcggcatctccttggtgcagggtggagtccgctccccaatccctgggcttaagggaaggggagggggagtctgacacacagtgggtaggggcccgggtgcccctagaagtggccaagttcagacctagcccaggccaggctaaagccagctcagcacaccctcctctccattgccgtcccttccacgggtcacttggcgggaggtccactctgtcgctgccagaagttcccagggctccccattacactcccaaagtccaaagcccccagtctgggacagtgggtggggggccaggccctacacag

SEQ ID NO: 17675 - DNA, 806 bp, Artificial sequence
  DNA replication origin
gtttgctgaagccggggagggggcaggggttgggggtcccgcagggacacgtgctctgatggggaagacaggcctcacccttgggggttcccagtccgatggaaaagacctagcttccacccagggtcgtcgggggagacattggtctagagggggcagtggctgtcccccattctgcttcctcctcctccctcaggaaggctgcttcccatttccttcctgcctgcctttgcttcctgtgcccaccctccagctctgaaggactgggtgtggaaacagcagggtctggcgtgtgtgcacctatgtgtgcacgtgtgtgcatgtgcgtgcactgcagggatgtggctgacccacaggtctctgctgtgggaagggagccccggctgggctcgagtgtggccctcttgccttctggcctgtgaactgggcaagtgaccttgcctcgcccagtcctcaggttcctcatctgtgatgggctgggggcatcaggaagacccctgcgagcttgggggtggatgagagtgctgtgcgtggctggtggtggggttggagagcagtggtcacgtgtgggtgtgggtgtggtatgtctgtgtggtgtatgggtgtgcgtgtggtgtgtgtgtgatatgtctgtggtgtggtatgtgtggtgtggtatgtctctgtgtgtctgtgtgtgtatgtctgcatggtttgtgtgcacgtgtgtgtgcatggttctcgtgttctgatgccttgctctaggttgaagccctggagggaaggtaagtcactccctttagagactctagcttgctgtgtggcct

SEQ ID NO: 17676 - DNA, 868 bp, Artificial sequence
  DNA replication origin
atcagggcaggactggggaccctgggcccgggggtgtgaagggaggggcttgcagagccccgagacggctgctcagtgggagctgtagcttcaggagaaagtggcggctgacaccgtggcgggtaggggcagggagggtgccacaggcacagatatgttctcccaccgtttgccaaacccatctggaagccagagggtgggagggtgggatgggacatggtcagtccatgggtggctggtgcctgtgagtaccccaggtgttctgcccaccatcgagacatcctagaggggctgggatgagccccgccacaggcccagagaggtggcagcttcaggaacccctctgccaggccatacccttgggcccttaggagggcaccatcctaggcctcagaccaggaggagaaggggcctgggtcagggactacccagcccagcacactggcaggagggcacaagggagggaggaactggccccaggtccatgtctgagctcggaggagatacggtgggaagggcatttccagggcgagagtggagaggccttgactggagtaggggcgtggagctgtgctggacagaggtggccgcaggaccccatggtcgctgttgcttttctggctctgcggtttactcacttagaccagtcattttctctctcagccatagttttctcaccggtacaatggggtaatgtgagtgcccgccctgtggggcggtgttggggttgttgggtggtggatggaacagaaggaggtggtggggttggggaccagagccccagctcaggactttcagggaaggggacgtgtctcgggggaaccgcccataagccaagtggactcttctatccaaattccatctgggt

SEQ ID NO: 17677 - DNA, 1466 bp, Artificial sequence
  DNA replication origin
catagagtacataggaggtcccaggacgggggagtgtcccgggagtggggagtgtccggggagtggggagtgtccggggagaggggagtgtcccgggagtggggagcgtcctgggagcggggagtgtcccgggagaggggagtgtcccgggagtggggactgtcccaggaggggggagtgtcccggaaggggggagtgtcccgggagaggggagtgtcctgggaggggggagtgtcccggtagcagggagtgtgtcccgggagtagggagtgtctagggagaggggagcgtccagggagagtggaatgtcacgggacgggggagtgtcccgggaggggggagtgtcccggtagcggggagtgtgtcccgggagggggtagtgtcccaggagtggggagtgtcccgggaaaggggagcgtcccaggaagtaggagtgtgtcctgggagcggggagcgtcctgggagatgggagcatcccaggagtggggagtatgtcccaggagggggaagtgtgtccctggagggggaagtgtgtcccaggagggggaagtgtgtcccaggagggggaagtgtgtcccaggagtggggagtgtcccgggaggtagaagtgtgtcccaggagtcgggagtgtcctgggagaggggagcgtcctgggagaggggagcgtcctgggagatgggagcatccagggaggggggagtgtgttccgggaagggggagtgtcccgggaggtaggagtgtgtcccaggagaggggagtgtcccgggaggtaggagtgggtcctgggaggggggagtgtcccaggacaggggagtgtcccgggagtgcggagtatcccgggaggggggagtgtcctggtacgtgtcccatctgcatggcatccccatccccacctaggcctcgccactcacctgcccgcagcaggatgacctggtcgtccaggggcagctctgagaagtgtgggatccgcttggcccactccaccagggtgaaaagctgtttgtcggctgcttggcaaatgttggtgacagggtcgttcggctgcagtggaggaagaagagcaggacattcagtcccagaagccagtgtactgaccaaacacagcccagaccaggccctgccacacgctgggcccatgcaggacgctgaatacggcccccaaagatgcccaggccccaatccccagaacctgggactatgcgaccttgcatggcacatggggcttggcagaggtgattaggtgtggcctgatattgggaggtaagcctgcaccactggggggacccagggtcattgcaaggggtctatgagagggaggcaggagggtcagaggaagagatgagatcacagacgctggggcccaaggggagagagacactgctgggtttgaaggtggaggaagaggccacaagccaaggaatgtgccagaagcagaggccagggcagactccccagcagagcctcca

SEQ ID NO: 17678 - DNA, 1135 bp, Artificial sequence
  DNA replication origin
agaaactggtggaggattccagccaggctgtgggaggttgatgtcacacgtgtctgctcctgtggggtagggccccttccttggggtgggctgctgccctacccgtccaggaggccttcagaaataaagcattaaaatgaagagttttggcttgttccatggaagctctgggtcacaccctgacccttgtgtttgtcagatgagtaaactgagacagggccgggtcgctcacagctttcaggtttctccgtccaacctccttcccacctgcccccttcatcccaggctgttgctttccaaggccgtgttagctgctccagcggggtcgtctgagggcctgggttgcacaggcacctcctgcgtggcggcagggtggggggtgggggggggtgaggggggtggggggaatggaagtgggcgggccttgctgggctgggagggagggagggaggggccaggcttaggtagcaggcccaaggtccccctgtggggacagcacaccactttactcccctggtcttgttaatcctgcccacatctctggccccagaacacagggtaagccaggctgggctcttgtcactgccgccctgggacgggatccccatcacaagccccatggggacagcagccgtgactctgggggggccctgccctgccttgtgagtgtggactcatttaactctccagaccaccaggagtcggtgttattactgtcccttgtgctgcggaagtggtggctcagaggtgagacaggaacgtggctgagccaggttggagcccgaggccccagcttccccacctgacccttgactctgtgctgttccttccggaagcgctgtccaggggtcctgcaaccccagcagaggccctgagcgtttgggcagggccacgagggatctgcaggagtaagttccttgggaagggccagcctcttgagttggaggacatagtgaccaagggagcagccccaggcaagactctttgtcctgcgcttggagcctggagtaagacctggtatcctctgcatcactgaggtcctccttctgaaaggccagcgcaccctgagccgtttaaagctgtgtccgtgccgggcccccacatcacagggccaggagccctccttcctgcagcg

SEQ ID NO: 17679 - DNA, 757 bp, Artificial sequence
  DNA replication origin
ggtgttccagaggggaccaacctcatccccaagcctcgggtccagggtgtttctggggctgggcccctgtggttgaggagagcagggcttggggctgtggggctggggctgggcacaggcctcctggccgacagtgcggcccttctccagcctctgggttctcggcttgaaaagcctcctaggtgctactccttcgcccaacaagtgctgacacgtgcctgtttgctcggtgccctgctggcatgggagggccccttcaagctgctggatagggcttgcctgcctagagcttggggtttagagggtcacgcccaccagcaggcacccccggcacgtgagggcaggagcacggttggtcgagggtgcgggccacttcctccgggagctgcaagttaggggccaggggagtgagaggcacggaggtggggtgggctggtggaggcagcccaggcagggccttgaaagtcttgctaagtttgggttttttcttggggccacagggagccaagtcctgaggggttccagccgggagggagctatgggtttctgtgtttggaaactcagctcattgcgtgataggggcaggtggctggggtgtggagggagaggtttggggctgctgtggggagctcacttgggctatggtggagggagtggagccctctcggctcctggccctgaccttctgaccttgccctttgtcagacctggctctgagggaccgggccgggatggagatgggcatcttcttgtgggg

SEQ ID NO: 17680 - DNA, 1042 bp, Artificial sequence
  DNA replication origin
ggtggggtgggctggtggaggcagcccaggcagggccttgaaagtcttgctaagtttgggttttttcttggggccacagggagccaagtcctgaggggttccagccgggagggagctatgggtttctgtgtttggaaactcagctcattgcgtgataggggcaggtggctggggtgtggagggagaggtttggggctgctgtggggagctcacttgggctatggtggagggagtggagccctctcggctcctggccctgaccttctgaccttgccctttgtcagacctggctctgagggaccgggccgggatggagatgggcatcttcttgtggggagagcttgtttccagggtcattttatcacccaggctgtgcatccgggccgtaatcctgccagctcggaggctgagtcatgccacggcccggcccggcccgaggaatccccattcaggtcctgtgtggtctggttgctagagctggggcaccagcaggacctgggcaccggcttgcagggagggtgagattgtctggcacaagcagggtccaggcacaggcttgcagggaaagcgaagagaccagggcacaggcatgcagggagggcgaggagactggctggagcggaggcagctgggggagccaggtacgttgccaaggagcccaggacacaggccaaggtggcattcacagggggtccctgggccttgggggccaaggtggcattcacagggggtccctgggccttggaggttttggtggctgcaatcttagcctctctgtccactctaggctcttgagcccgggtcctgagctcaggactccgcaagcacaccgaggatgggtttccgcagggtctgggtactcctgggggcagcagcgctatctcccatccatgttatggggctgggacccaagggcagcagcagcatccattgtctctcccagttcccaaggcggctggaaggaaggcagcagatccctgacactttatcgatggggaaaccgagtctctggaggtcaaatagttgacccaaggtcacgtgg

SEQ ID NO: 17681 - DNA, 916 bp, Artificial sequence
  DNA replication origin
atggatggatggatggatggatggatggatggatggatggattggtgggtgggtagatggatggatgggtgaatggatgggtggatgggtgaatagatgggtagatggatggatggatgaatagatggatggatggataaattggtaagcgggtagatggatggatggatggatgaatggattggtgggtgggtaggtagatgggtaggtggatggatggatgggtgggtgggtgaatagatgggtagggagatgaggtggtgtatgcacagggctaaacaccatgagccttgccttggagcctctgattcaccatggtacacctgtgcacttgtgaaatgcagacaacttgtgaaatttacaaaaccacagttcccacctcttggaactacacccaatttattcatgtgatcagccccagtgggtgcctgccttggagtctcaggggacctggttaagaagatgggaagctctagccagcaaggagtgaagaggtttgcaaacacactcttgaccaagcctaaagactaaatccagaccgtgctcaggctggattgggcctgagggaggggaagactgggaagactgggagctggccttcttctcagggaggagtctataaggcagaggaagggatggagggagagagggaagggaaggagggagcaaagacacaggccaggcaagcctcctgagcaggaggaaacgtttgtgaaaggtgaaagaggcattcgaagggggattgagaagaagcactggaattgctggatgtctgggcgatacatccagcaattccagcacatgtctgcctgggcaacatggagaaccctcagccccaatggtccccgcctcatcaccagcctctctccccatgtgtctctgtgttactctttgcacacctcagttctctcctgcc

SEQ ID NO: 17682 - DNA, 943 bp, Artificial sequence
  DNA replication origin
attggatttctgttgaacagactctgcaaactctgctctctcctggagccaagtacaggacctaatccatgcaatttccagtctgtatttgctgaatgaataggtggatggatgaattctgggtgggtgggtggatgagtggatggatgggagggtggatggatggatgaatagatgggtgggttggctgggtggatagataggtgactgggtgaatggataagtagacagatgggtgactgggtgggtgggtggatggatggatgaatggatggatggatgactgggtgagtgaatgggtggttgggtggatggatgggtgtgtggatggatggatggatggatggatggatgactgggtgagtgaatgggtggatgggtggatgagggtatgtggatggatggatggatggatggatggatggatggatggatggattggtgggtgggtaggtggatgtggatggatggatggatggatggatggatggatggatggattggtaagcggatggatggatgcatggatggatggatggatggatggatggatggatggatggatggattggtgggtgggtagatggatggatgggtgaatggatgggtggatgggtgaatagatgggtagatggatggatggatgaatagatggatggatggataaattggtaagcgggtagatggatggatggatggatgaatggattggtgggtgggtaggtagatgggtaggtggatggatggatgggtgggtgggtgaatagatgggtagggagatgaggtggtgtatgcacagggctaaacaccatgagccttgccttggagcctctgattcaccatggtacacctgtgcacttgtgaaatgcagacaacttgtgaaatttacaaaaccacagttcccacctcttggaactacacccaatttattcatgtgatcagc

SEQ ID NO: 17683 - DNA, 1114 bp, Artificial sequence
  DNA replication origin
atggctcgggccagctgccggccatgctccagcccgacagcccaccaacaggggtctctcccagaaggagggaagctgtagctgggagagggggtccctaactttggacatgctgggttgtccccaatcgccctccgagctccagctgtgccttcccctgctcagcctgcatctaccccatctgaccccacaggctcctggacagaaatggcccggccttgcctagagctaagcttccactccaaggcagagctatgggggtccgggctggcaggggggccatggccaggccctcagggctccctgctttccaatggccccaggatcagcggtttccacagtgtcctgtagcatgcggctgggtgtctccatcgtcccagcatcctgtggggtgggccgagggtctgtgtccctctatgtcccgtggggtggaccccgggtctgtgtccccctgtgtcctgtagggtatggctggggtctgagtacctctgtgtcctgttgggtggagctggggtctgtgtccctctatgtcctgtggggtggggccgtggtctgtgtccccctgtgtcctgtcagctggggctggggtctgtgtccctctgtgtcctgtgtggtggggccggggtctgtgtccccctgtgtcctgtctggtggagctggggtctgtgtccctctgtgtcctgtgtggtggggccagtgtctgtgtccccctgtgtcctgtcgggtggagccggggtctgtgtccatctgtgtcctgtgtggtggggccggggtctgtgtccatctgtgtcctgtggggtgggccggggtctgtgtccctctgggtcctgtggggtggggccggggtctgtgtccccctgtgtcctgtgtggtggggctggggtctgtgtccccctgtgtcctgtcgggtggagctggggtctgtgtccctctgtgtcctgtggggtggggccagtgtctgtgtccccctgtgtcctgtggggtggggccggggtctgtgtccctctgtgtcctgtggggtggggccggggtctgtgtctctcacagtgtccccagcttctggtcactatctctgtccctcctgccctggggtcatcctgagctgggtcctgcc

SEQ ID NO: 17684 - DNA, 977 bp, Artificial sequence
  DNA replication origin
gtcctgtcatctccaggtgtagtctcagaaacgccttgaaatgaagcctgaaggggaagcccagttccatggtgtggacgagcgtgtctgccggaggcctcggagtcgcatccaccggtgtttattgacagctgactggtgctgtgccctgagacccaggccctgccctctggcactcagtctaccaggggccaaggcctgcaccctccctctgggctcaccttggtcaagcctctggtggacttttaaggcccacggggaacccccccacagacccccttcccactctgcaggtgggccgctgaggcctctgcagacgggcctgagcagcagggcctgtgcttgtcgaggccccatggctcccgccatggccagggtgagatgcagagggccacggagcctgcggtggggccctggggtttgacactggggccctgcctggaatggggccttggtgtgatgggagctgggggtggggtggagcctgcctgggccgaggggctgtctggtcgggagcgattcttcagcagcagagacttgagtcatggctggggcctcctggcctctggggggaccttaagacattttttccatggaaagtagctgctggctctctgcttaccggggagctctctgtcccctcccactgcctgctgagggtttggtgggggctgcttcacttctttgctggactttccactggcctggatgggccgagagctccaggcagggaccggacagccagactctggacccagtcccagcctgcaagtgcctgtcctctgagcctgagttttgccttctgccagggtgagggctctgggtgaggctagacgctgaatggcaaggactgggctgtgatgggacgctgggctccaggtctctgttaactctttaagggaaaggtggggcgggatatggagggagtggcgcgcatcatcctcccggagcctgcagaaatccaggcgaaattggca

SEQ ID NO: 17685 - DNA, 4023 bp, Artificial sequence
  DNA replication origin
aaatgggccctgaggtggacagatttggggtagcgtggctctgggaccacgcccgtatccgtgtgctatggaggtttctcgtcactgactatgataagagtccatcttccctggccactccagggagggatgtacagcagttgagttatttctagttcttttggggggctctgcttttattcagataaggggtttctgaaactcaaatgcctcctgcacaaaataattttatgccccagcggcgtgttctgaagtcccttcccctcccccagaccttccatctggcaggtaagcatctctgctttgtacctaaagaaacaagggctcagaaagattcagacctgctcagagtccctgagggggcaccatcagccacccaaagccaccttgccctgaggctgcacgccccagagtttgggagcacagctgcttggtgctgataggacagcgccccaggggcctccaggatggcagagccgcctgggagctgctcagggacagggtcgtcctctgctgatgcaccctggagcgtctggttgtcccagtgtaactccaggctgctggtaccggagtcttctcactttcctccctcccttctcacgggtcccctctgggctctcggctcatgtccctgcatgcaggtgggtgtagcagggtggaggggtccctggaatggggctgggggaagtagaaaatcaaaggccaccccggagctctgctttgcttcccgcctccccaagctggacacttctgcagggcccaggtcatcggcatacttcaggggcccagcaccaggtgaccccatctcccaagtgcagacctggagtggacaagggatccgaggccagtaggcccattggaactgaagcaagggacatgggcagtggcacatgtggcacagagtgggcactaatggaggggcggctgggtgagcggggcagaggcgcgtatggtgcagagtgggcactaatgagggggcggctgggtgagcggggcagaggcgcgtgtggcgcagagtgggcactaatgagggggcggctgggtgagcggggcagaggcgcgtgtggcgcagagtgggcactaatgagggggcggctggctgagcggggcagaggcgcgtgtggcgcagagtgggcactaatgagggggcggctgggtgagcggggcagaggcgcgtgtggcgcagagtgggcactaatgagggggcggctgggtgagcggggcagaggcgcgtgtggcgcagagtgggcactaatgagggggcggctgggtgagcggggcagaggcgcgtgtggcgcagagtgggcactaatgagggggcggctgggtgagcggggcagaggcgcgtgtggtgcagagtgggcactaatgagggggcggctgggtgagcggggcagaggcgcgtgtggcgcagagtgggcactaatgggggggaggctgggtgagcggggcagaggcgcgtgtggtgcagagtgggcactaatgggggggaggctgggtgagcggggcagaggcgcgtgtggtgcagagtgggcactaatgggggggcggctgggtgagccgggcagaggcgcgtgtggtgcagagtgggcactaatgggggggaggctgggtgagcggggcagaggcgcgtgtggtgcagagtgggcactaatgggggggaggctgggtgagccgggcagaggcgcgtgtggtgcagagtgggcactaatgggggggcggctgggtgagccgggcagaggcgcgtgtggtgcagagtgggcactaatgggggggaggctgggtgagcggggcagaggcgcgtgtggtgcagagtgggcactaatgggggggaggctgggtgagccgggcagaggcgcgtgtggcgcagagtgggcactaatgagggggcggctgggtgagcggggcagaggcgcgtgtggtgcagagtgggcactaatgagggggcggctgggtgagcggggcagaggcgcgtgtggcgcagagtgggcactaatgggggggaggctgggtgagccgggcagaggcgcgtgtggcgcagagtgggcactaatgagggggcggctgggtgagcggggcagaggtgcgtgtggtgcagagtgggcactaatgggggggcggctgggtgagccgggcagaggcgcgtgtggtgcagagtgggcactaatgggggggaggctgggtgagcggggcagaggcgcgtgtggtgcagagtgggcactaatgggggggaggctgggtgagcggggcagaggcgcgtgtggtgcagagtgggcactaatgggggggcggctgggtgagccgggcagaggcgcgtgtggtgcagagtgggcactaatgggggggaggctgggtgagcggggcagaggcgcgtgtggtgcagagtgggcactaatgggggggcggctgggtgagccgggcagaggcgcgtgtggtgcagagtgggcactaatgggggggaggctgggtgagcggggcagaggcgcgtgtggtgcagagtgggcactaatgggggggaggctgggtgagcggggcagaggcgcgtgtggtgcagagtgggcactaatgggggggcggctgggtgagccgggcagaggcgcgtgtggtgcagagtgggcactaatgggggggaggctgggtgagcggggcagaggcgcgtgtggtgcagagtgggcactaatgggggggaggctgggtgagcggggcagaggcgcgtgtggtgcagagtgggcactaatgggggggcggctgggtgagccgggcagaggcgcgtgtggtgcagagtgggcactaatgggggggaggctgggtgagcggggcagaggcgcgtgtggtgcagagtgggcactaatgggggggaggctgggtgagccgggcagaggcgcgtgtggtgcagagtgggcactaatgagggggcggctgggtgagcggggcagaggcgcgtgtggtgcagagtgggcactaatgagggggcggctgggtgagcggggcagaggcgcgtgtggcgcagagtgggcactaatgggggggaggctgggtgagcggggcagaggcgcgtgtggtgcagagtgggcactaatgagggggcggctgggtgagcggggcagaggtgcgtgtggtgcagagtgggcactaatgggggggaggctgggtgagccgggcagaggcgcgtgtggtgcagagtgggcactaatgggggggaggctgggtgagcggggcagaggcgcgtgtggtgcagagtgggcactaatgggggggaggctgggtgagcggggcagaggcgcgtgtggtgcagagtgggcactaatgggggggcggctgggtgagccgggcagaggcgcgtgtggtgcagagtgggcactaatgggagggggcggctgggtgagcagcgcagaggtgtggggaagagctgaggcatgacaccggggcctccaggagaggcagaggctgccggctctacccccaagaggccggcaggactcccttcctatccaggaagccccatgatgtcccatcagagctcatgacaccgatgtcatccacaagagctggccccggtgagtgtcaggtcctcacaagtgagagacatggccaggacccccacaatgcctcagctcctaccccatgtgctcaccagccctggcatccccttgcccaggaggggcacagagcatcataaaccatcctccatctcccccactgtgtcctccacaaaggactcaaacttccagcacagaacaggagctctgcctacagcggggtctccaggagccgaggctgcaaacccagaactaactggccacctaggtcccagactggcttccccaaggcccaggaaggagcccacctattggtgttgactctggaattggggccacaactgaggaaaagggccttgtgtattttctgtggccatggggctgtcagcttgtgtgctcacgggggttcctcctccctggccccaacaccaccatcacaatctccaaaaatgcatctaagctgtcaccatggcgtccaccctga

SEQ ID NO: 17686 - DNA, 3181 bp, Artificial sequence
  DNA replication origin
gtgaattcggtgtctgactctcctgtctttcttttctcatcggcgtgctcgcaatcctgggtctgggttctctctgtggatgaagaaggggatctgagctagaagcaggataatctgagctagaagcaggatccgtctgtggtcagaaattggctcctgggacagctggggggagtggccatgaccagggctgtcttttattgagcccagagccttttggacgggggtacatcacaaagtcatttccgcgtatggatggcctactaggtgccgggcgcagtgcgtctgctgactctctgaaaggagagtttgtttgttttctattttatagatgaggggactgtggagtcagtggtaaaatgatttgctgtggtttgaacccacgtctgaccccagagccactgtaacccctccagtatcccgaccacttcttcctgcctccacctgcctctcaggccctccggccacggtgcaggaggtgctgggtaagtatttgtcacctgattgtcagaggacaagccattgctaacttgggtgaaattctgcccaagtcctgacaagaaaatgggccacgggctcgggatgtcggacttgcattttcttggaggctgatggtggtgcccctcgcctggcccttgcctgggctacccctggaggtcttgacccgtgaggctgggaggtcagaggaggaatggaccctaccccaagcaccaggccggatcagagaagaggaggcctccagctaaagcctgcatgacccgcaagaagaggaggcctccagctaaagcctgatctgcctctgaagaattttcaatatgagcattaagaaacagtccatatggttcagaaaagcctgctcacgcccttcccagcatctgctgctgattaaggataagtgagttcacccgggggccctgagcactgctggtttgcgtgttctctacatggacagctgggattaaagcgagctccagggttttgtgcaatcctttaagataaggagtccatttgggcttttgagcagattgctccatgcagctgaagtactcctgagagtccggagtcagagcggagcccacacctcctgggtggggagctcgcagggaacgcggggccagtgaggaccgcattccattcactagtccattcattcccttagccaggttcttgctctgggctgggtgccctgcacggtgctgaggatacagcggggaaaaaaccaaaacagaacaaatccaacccaacctgctccggccccaacaagctaacagcctggaggtgttagccaagtgacccgagaaccaagagtgtaacatgggccatgccaagagggcgggcactcagttctgtgggggccagagttgcctcggaggtcagagagggcttcctggaggaagcggcatctgagtcaagattttgagggatgagtaggagttagtgaggtggagagctggggccgtagcctcgcctccgagacagaggagacaggctgtgctctgtggcaggagggagtggggccagtgcctggggtctgcacagaccagggagttggtgacccaggacagcagggaggaggtggggccgggggcagggccgcacggtggaagcaccgaggggatttcgacaatgaccacccccctatcccctagagggagagctgggagccaggctgcagtaatgtcccggggccagttgtggagttaaccctttagtccctttgagaccccggtgtttgggggatgggggtggggaagtgactgtgtactgaccctgacctgtaaggcagtatttcaatatctgaaaccctggcccagcagtcctggcggcccagccgcgttgaaaccctgggagcaaatggcaggattctaagtgtgagtggagagtgtggggtgggatgaaggtggggcagggacgtcaccagctgccactcggctaagctcccctgaccgcagggtgaggacagagcacacaccaccaggtcagaggctcccgccatcctgtggatgagagaaggcactgggtgctgggatcagggtgacggggggaagacggaccgagggagcggcatcctggcagtgccccgggagggctgcccttgcctttgcctggtgaagtcccctttgaagcctctttccaggcaccccgtttgttgagccttgccctggattttcactgcttaacaaagtctagttagtagctgccttcagacaggctgggtggggcttggcccctgcacctgcagtgtctgccacagtcgcatctgtggttcattctggaaaaccatcagccggagccacctgcagttttcttctctttttcagatgcgactaacactgcccttgtcaggaccgcccttgtcaggacagcctgcagggtccttagtctcaggtggcgtccctgcaaagcagaccccgagacaagggtctgggcacaagtggctgttctggaggggagtctaggatttgctgcgaggcaccgggggaagcaggatgggaagcagggagcccgcaaagcaactcagcctgctggggaccctccgagaacagaggcccatgatgtgccgagtggtcctgctgggatggtggatggcgttgggatggtgaatggcactggggtggtggatggcactggggtggtggttggtgctggggtggtggatggtgctgcggtggtgaatggcaccggggtggtggatggtgctgggatggtggttggcgctggggtggtggatggcgctgggatggtggatggcgctgggatggtgaatggcgctggggtggtggttggcgctgggatggtggttggcgctggggtggtggatggcgctggggtggtggatggcgctggtatggtgaatggcgctggggtggtggatggcgctgggatggtggttggcgctggggtggtggatggcgctggggtggtggatggtgctggggtggtggatggtgctgggatggtggatggcgctggggtggtggatggcgctggggtggtggatggcgccggagtactcagctaccgttcccatccccaactgttctgggggtccttcaggggctctggcactccagcatttcagtccacctcattcacagcctcagctgcccccggtggccagggaaacccttccaggaaggaaaagggaagtggggatgctctccggggagtgcctgcaagt

SEQ ID NO: 17687 - DNA, 2676 bp, Artificial sequence
  DNA replication origin
gcatggggcggggccgggctgcatgagggctttgggccctgttgaccccgtcgtatctagcagagctgcggcagaccgggcaactggggctctgatctgacggcaaccttgggctcctcagctgcaagctgggaacactgggtcccctctctctgggatcatgtgaggcgggaatgtttggcattttgggatttcgcaggtccggcagcccagggaagtttcaccaggcaagagggttgttggctggaagtgggtgtgagctcactgtgcacacttgggcctcctgagccgcattcgtgacctcaagggggattgctgtgggcagggctgggcccgtgtcactggtcctgaggcagcaggagccagggtgggtttgctgaaagaacccactggccttagcaacgcccctcgcaggagatgacgtggcctcagcagcaggactatgcagggagcgctcttctctgaaaggctgaccgaccctgagccagcctttgggggtgccacacaggggaagagggaccccgcaacaggacaggctgccaggcactggctctggcctccaaaagtcagcatcatggggaaatagaagatgggcatgtcctggcataaaacagatccaaggctgaaccagacacaccaggcacaagcatgcactgcctcaaaaataagcataacgggccgttttgaacaattaggaaattcgcatgtggaccggatcccaggggatgggaggggatgatcagatgaacaattaggaaattcacatgtggactggatcccaggggatgggaggggatggtcaggtgaacaattaggaaatctgcatgtggactggatcccaggggatgggagggcatgggaggggatggtcaggtgaacaattaggaaattcacatgtggaccggatcccaggggatgggaggggatgggaggggatggtcaggtgaacaattaggaaagctgcatgtggaccggatcccaggggatgggaggggatggtcaggtgaacaattaggaacttcacatgtggaccagatcccaggggatgggaggggatgatcaggtgaacaattaggaaattcacatgtggaccagatcccaggggatgggaggggatgggaggggatggtcaggtgaacaattaggaaattcacatgtggaccggatcccaggggatgggaggggatgggaggggatggtcaggtgaacaattaggaaattcgcatgtggaccggatcccaggggatgggaggggatgggaggggatggtcaggtgaacaattaggaaatctgaatgtggaccggatcccaggggatgggaggggatggtcaagtgaacaattaggaaattcgcatgtggaccggatcccaggtgatgggaggggatggtcaggtgaacaattaggaaattcacatgtggaccggatcccaggggatgggaggggatggtcaagtgaacaattagggaattcgcatgtggactggatcccaggggatgggaggggatggtcaagtgaacaattagggaattcgcatgtggaccggatcccaggggatgggaggggatggtcaggtgaacaattaggaaatctgcatgtggactggatcccaggggatgggaggggatgggaggggatggtcaggtgaacaattaggaaattcgcatgtggacgggatcccaggtgatgggaggggatgggaggggatggtcaggtgaacaattaggaaattcacatgtggaccggatcccaggggatgggaggggatggtcaggtgaacaattaggaaattcacatgtggactagatcccaggggatgggaggggatgggaggggatggtcaagtgaataattaggaaattcgcatgtggaccagatcccaggtgatgggaggggatgggaggggatggtcaggtgaacaattaggaaattcacatgcggagtggatcccaggggatgggaggggatgggaggcgatgggaggggatgggaggggatgatcagttgtctcaggtgctgatgctgtggttctgaaggaaactgtccctattctcaggagagggatatccgcctatttggaggtcaagtttcaggacgcctgcagctttcttccaagtggttattagaccagaaaggaggcaggaggaggaggaagacacgaaaagaggaaaagaaagaaggagagaggaggaagggggaggaggaggagacacagagacgtcggtcagaaggccagtccgactgggtggctggggacgtgaagtagagggacaatttacacactctctggacggggttagggaccctgagatgaatggtatgcccacagtgctagcgacagtgggagccattactcccacccactggtctgaagaaggaacggggaagattctgggctctgagagggcagttctaggcagagtcccttgacaggagctgcagcctccagccgaggtgccacatccctggccacgctgcagagagggagccgggaggaaacatgatgagtgcattgttgaatccaggtggtggtcgtatgggtaatcatgttctattatttcattctttgcttgaaatgttgaatgcttgaaaactttcataataaaaaaaaaatggggccgggcatggtggcatgcacctgtaatcccagctgctcaggaggctgagaaggaaggat

SEQ ID NO: 17688 - DNA, 2360 bp, Artificial sequence
  DNA replication origin
tcggtgtctggggagggcctggtctctcactccaagacagtgccttgaatgctgcatcctccggaggggacacgtactatgtcctcacatggtggaaggcaggaaggcaaaaaggggtctagctaggtcccttgagcccttttataaggacactgatcccattcatggggctgcagcccttataactcaatcgcctctgaagggccccaccctttaatactatcacattgggccttaggctccaacatgtaaatgctggggggacgcacacgttcaaaccatagcactcaccctccagcggcctgtctccaagtcagagtcttgcagcctggtcaaaaggcccctctgtcacccgtcaggccagcagcttctgggtggagcagccctgtgctgggaccagcgcagccggtggcgtgcgggtaactctcacctcctcccaggcccgctcagggacatcgcgcgcagagccagggtttggagtatctgccccggggaagtcgactcggcgcgtgctacaaagtgggtctgttttctaggattttgtttaccccagagagctaagattgttaaacatgtactagcccagcactgagtatatctcactttctgtgccaagcagtgtgcgcatgcttgtgtgtgtgcctgcgtgtgtgtatatgcatgtgtgtgattaaacacgtgtgttactgtgtttcaacctcactgctatcccgtctcataggtgtcatctccaccgatgaggaggctcaggtgagtcaggttaggcccctccccaaggccacgcacttaggatgtggcagagccgtttgagcccaggtatgtccgactcaggaatcctccttcttaaccgcactgactaccgtatgtggacagttgtgtttcccttctggcttcagtaccttctgtggctggcacccagaccatctctgactctggctatccgtagaatccatgcttccataagtctgttctctccgggcccctcgggaagcgggagatccgggagatccagggtgccagaacaccttcttgggctctcaccgactttctcaggcagctggaattccgggaaccctcaggtgggcacagggccaggccgcccctaacatcgtgagcatccgtctgggagtctacgcagccgtggttgtccctctgtgccagcctgaggctgggggtggggatgttgtggagggagcaggccatgggtcactggaggagctgagggtgcctcataccatttcttttggggacagtttgcctccagagtcctggcagggggtttgtgggagaaggcagggccccgttaccccacatcagctgaaataaaagaaacatgcggcacacacagtcagtaagacagagccaccgaggcagccatctgagggaaagtgacattttcactgggctctctcacccttgctgaagggcacaacctgttttgttttcagctgcaggctgggtggtggaggctgggtggagaaggctgggtggtggaggctgggtggtggatgctgggtggagaaggctgggtggtggaggctgggtggagaaggctgggtggtggaggctgggtggcgaaggctgggtggtggaggctgggtggagaaggctgggtggtggaggctgggtggaggaggctgggtggtggaggctgggtggtggaggctgggtggagaaggctgggtggagaaggctgggtggtggaggctgggtggtggcggctgggtggtggaggctgggtggtgggtggtggcggctgggtggtggcggctgggtggtggcggctgggtggtggaggctgggtggtggaggctgggtggagaaggctgggtggtggaggctgggtggagaaggctgggtggtggaggctgggtggtggaggctgggtggtggaggctgggtggagaaggctgggtggagaaggctgggtggtggaggctgggtggtggcggctgaggcctctctctgaaggtcatccctggcagtggtggctgtgcctgggaccctcttgctttccctgggggcctcccggaggaacagctctatggtgtttccgaccaatcccctttctttgggtcttgctggttataaaatgggaatattcatttcaagtgccgagccaatgcatattcttttcccaccatcataaaagacttgcttcctaatgacaataaccttcattgcaggccgtcgattgtcatctctgtttgtttttccactccaccttctcagctcctgtgccacctcccaccccacgtcttgttgacttcatgtttatccttcactcactcaacaagcacatgtgtccttagtgatgcccctgcagcccctgtcccatctggcactgtgtcattcaggtg

SEQ ID NO: 17689 - DNA, 1171 bp, Artificial sequence
  DNA replication origin
gcccacccccatgctctcagacttttgacaagtgctccccttgatgccaggctgtgacggtgaagacgccactcccagcaaagtcagagtgatcttcttcctgcctccccaggttctccagcccctcagtgctccctggggaatagcagctcatcaggggtgccgtccaatccccaatggggtttcctgtgcggctctggagggctctggttccctcggtctccagagaaacatgtgaggacagcgatggttttgcagtttctggcgccgcccgcaacacaactccaggttaataagaagagaaagcctctcctttcactttcttgccgaatgcctttccgggcaaagagaaggggaggaagaggaaggctggggagggggaattcatttcccagcaggggatgggggctgtcagccctcggggggcctgggtgggtctgagggagacacagagcctgggagtcctgcaggcctggcggagtgagcaggggggtgtgggggctgggaaggtggggagacaggaaggcacttcaggggacccaggtgggccgatgccctgtggatggagggcactccggaggcccagcaaacagaaagccagagatggacaatgctgggaggcgggcgtctagggtgtcaggatctctaggctgccaggacgtagaggagctatgagcggcacagcccgctggggttggtgggaggtggctccgcaggggcctgtcacttgggcttgagagagatttgggttccagactgccttgactgtgaccttgccctgggggtcagtgcctcatccgagagatggactgactccccctgctctgcgctcgtcacctgctgggaggctcaggtgagacggtttgggtgacagcagctcgggtgctgaggtgtccagttctgcaggactgaggaagcgccgctgttgtggacgccgcacctgccttgggcactgtctgtgtagagcgctgcccaggcggagccctggactgacagggccccccttgctctcctacccatccagaccagcaaacaagccctaaggtggacaagtgccacagcgactcaagggcacctccatcgtggtccacacagtgagccttgcccccatctatgccatggcaggcatcaccagcccctccctgcactcacagcattggcctcctccctg

SEQ ID NO: 17690 - DNA, 2274 bp, Artificial sequence
  DNA replication origin
cggggtgcagcagagctggggtcccacccgcctgccgctgagcgggggccaggacacttcctctgtctcctataccaagggccttccccagtgatgctttctgttcattcagtggtgtgtgttgagcacctgctgcatgcaggtcctgggctaggagtcagagggtcgcctgtgagcacctactgtgtgtgagtccttacctgagtgtcaggagggtcgcctgtgagcacctactgtgtgttggtccttgcctgggtgtcagaggggcgtctgtgaacacctactgtgtgtgactccttgcctgggtgtcagggggcgcctgtgagcacctactgtgtgtgactccttgcctgggtgtcagaggggcgtctgtgagcacctactgtgtgtgactccttgcctgggtgtcaggagggtcgcctgtgagcacctactctgtgtgactccttgcctgggtgtcagaggggcgtctgtgagcacctactgtgtgtgactccttgcctgggtgtcagggggcgtctgtgagcacctactgtgtgtgactccttgcctgggtgtcagggggcgtctgtgagctcctactgtgtgtgagtccttgcctgggagtcagagggtcgcctgtgagcacctactgtttgtgactccttgcctgggtgtcagggggcgcctgtgagcacctactgtgtgtgactccttgcctgggtgtcagggggcgtctgtgagcacctactgtgtgtgagtccttgcctgggtgtcagaggggcgtctgtgagcacctactgtgtgtaagtccttgcctgggtgtcagggggcgtctgtgagcacctactgtgtgttagtccttgcctgggtgtcagggggcgtctgtgagctcctactgtgtgtgagtccttgcctgggagtcagagggtcgcctgtgagcacctactgtgtgtgactccttgcctgggtgtcagggggcgtctgtgagcacctactgtgtgttagtccttgcctgggtgtcagagggcgcctgtgagcacctactgtgtgtgactccttgcctgggtgtcagggggcgtctgtgagcacctactgtgtgtgactccttgcctgggtgtcagggggcgcctgtgagcacctactgtgtgtgactccttgcctgggtgtcagggggtgcctgtgagcacctactgtgtgtgactccttgcctgggtgtcagggggcgtctgtgagcacctactgtgtgtgagtccttgcctgggtgtcagggggcacctgtgagctcctactgtgtgttagtccttgcctgggagtcagagggtcgcctgtgagcacctactgtgtgtgactctttgcctgggagttagagggtcgcctgtgagcacctactgtgtgtgagtccttgcctgggtgtcagggggcgcctgtgagcacctactgtgtgttagtccttgcctgggtgtcagggggcgtctgtgagctcctactgtgtgttagtccttgcctgggtgtcagggggcgcctgtgagcacctactgtgtgtgagtccttgcctgggtgtcagggggcgcctgtgagcacctactgtgtgtgagtccttgcctgggagtcagagggtcgcctgtgagcacctactgtgtgtgagtccttgcctgggtgtcagggggcgtctgtgagctcctactgtgtgtgagtccttgcctgggagtcagaggggcgcctgtgagcacctactgtgtgttagtccttgcctgggtgtcagggggcgtctgtgagcacctactgtgtgtgagtccttgcctgggtgtcagggggcgcctgtgaacacctactgtgtgtgagtccttgcctgggagtcagagggtcgcctgtgagcacctactgtgtgttagtccttgcctgggtgtcagggggcatccgtgagctcctactgtgtgtgagtccttgcctgggagtcagaggggcgcctgtgagcacctactgtgtgtgagtccttgcctgggtgtcagaggggcgtctgtgagcacctactgtgtgttagtccttgcctgggtgtcagaggggcatctgtgagcacctactgtgtgttagtccttgcctgggtgtcagggggcacctgtgagctcctactgtgtgtgagtccttgcctgggagtcagagggtcgcctgtgagcacctactgtgtgtgacttcttgcctgggtgtcagggggcgtctgtgagcacctactgtgtgtgagtccttgcctgggagtcagggggcgcctgtgagcacctactgtgtgtgagtcct

SEQ ID NO: 17691 - DNA, 1034 bp, Artificial sequence
  DNA replication origin
ctccctcccaaggaggcttctgaagctccctgctcctagcacacggggatgctcctgtggtgaccttctcgtctttctcctcctgggggcaggggcaccagccagggccaatttgcatatctgggaagggtgaaatggttgagtgagaaggcatcaccgttggagggcggtttgagtaactaggacgactccagtgagcttcaagggcctggacagcttagccggccaggcaaaagcagaggggctggggtgtgggggatcagaaggaaaggcccgagcaaagccacagagacaagcgggtgtagaatgagtgccaggagccaaggatggttctcgatttttctttctttctgagatggggtcttactatgttgcccaggctggactcaaccttccaggctcgaacaatcctcccacctcagcctccagagcagctgggactctaggcatgcaccatggtgcccggccaagggtggctctgctgggctggggaaggggaaggccggctgggaggctggtcagccaggtgagcacagccaggcacatggatcctgagggcgatcgaaagcccccaagtgttcttgcaggcctgggactgggcctccggcttcagaaggtaaagaggcactcttgactctatggttgcacaaatgcctgagtttttggcacgactccagaaaaattgctctggtgctggtggagaaggagccaagcctggagctggggagacaggcagtgtcggaagccactgctaggatccgggggcaaggactaatgtggatgcaagaaggggatgggggtcatccatgggtttggggtggtgtggacaaggggtggtggaggtgagaaagaccctgggctctggcttgggcatggtgagaacagagggtccgcccacagagagaggccctgggaggatccacacacagatatggtgcttaggagagggggcgagacggaggcagggacaaaaccctcggcctgtgcatgtcacccagataccactcagggcatgtccgtgataggagaggacc

SEQ ID NO: 17692 - DNA, 1058 bp, Artificial sequence
  DNA replication origin
ctacctcgggagaccttagagaggcagagcgggcatggcccagggcatagcgtgcacctggcacttcggagatgattcctgcatgcaaggctgagtcctcaaaggtgctcgaggcccccgtattgattcagtcactcaacaaatatgaatggagcacattttatgttacattccgtgctaaacattagggaaaccagccaaaaaagagaaagaaagagacaaagaaaaagagaagagaaacaagaagggctgggaagagagagaggagggcaggtgattgtaatgacttctggccgtgccgtcacccggcctggctgcgcccaggcgctccaggcgcaggtggaggatggagcctcagctcagcagggaccgcaggcatcgagcaaggacaacgggtcccgaggtcagcacagggaaacacgggcttgcagggagtaaatgacaaggtccccaaagggcggtgcatggcaagaaggggcggccaggtgacgcagggaggggtgagctgtgacatgaggccccaagggctgagctggcagaacccagccgagttcagttcagctgggaagggtagagcagcctagatgggggtgggggctgtcaggagaggcttctccaggtggagggaaagcccatgaggagatcagtatggccggggcagggttgtgggggtcagcgtggccagtgggggtcgaaggtaggtccaggtatagctcagccttgtaatctctgctggctgcagggtaaagaatggaatgagagagtgggggtgggacctcctgaccagggagatccgtggggtggagaagaggggatggatggggggtctatggggctgcagggatgagagcagtgggaccccagtcccctgcagcacctgccctcccagtgctgagtcccccacctgcccaccttgcccttcagcgctttctcgcggtggtcgctattcctccctctgggtggtccaaagttccaggggcatcggggagaacaacagaggaggaggatggggtgtgacttcacttgaacgtggcgtccacccagcccagcctctccca

SEQ ID NO: 17693 - DNA, 971 bp, Artificial sequence
  DNA replication origin
ggttccatgtctccattcagtcaccagatctccgaagtgcaccagctctggccagcttggccgctagcactgcagtgacaaagggggacaaagcacagaccccgcctttgtggagttccagtttggtggcaatgacacccttgtcagcagctggctgcagcaccagagatgccctgtacaaagcccatacaaagcggtgtgcatgccagagaggctgtgatgaatcctgtgggagcaagaggaaggctgggagagaggggcagagagaggagggaaagaagagaaagaggagggaggaggggggagggggaaggaaggagacagggatggaggcagggaggaaggcagggagagaggggcagagagaggagggaaagagaagagaaagaggagggaggaggggggagggggaaggaaggagacagggatggaggcagggaggaaggcagggagagaggggcagagagaggagggaaagaagagaaagaggagggaggaggggggagggggaaggaaggagacagggatggaggcagggaggaaggcagggagagaagggcagacagaggagggaaagagaagagaaagaggaggggggaggaaagagacagggatggaggcagggaggaaggcaggggggaaggggcaagaaaggaaggaggaaaggaatgggagaaggaggaagaggaggatggagaggaggaaggaatgatggaaaggagggagagaaggatggaggtcaggaaaggagggagggaagaaagagggctttgcgtaggaagaagtacctgtgctgaatgaggctggaaggattaaacgatgcctggaagctcaaacgttgaacaaagcacagaagccccttctagggaattgcccccttcggggaattgccccttccagggtgttgtgccttccagggagttgcacctcccaggaggttgtgtgtgggtcatcagaagatggagaggcat

SEQ ID NO: 17694 - DNA, 1238 bp, Artificial sequence
  DNA replication origin
tccaactccttctcgcctcctcctcgccgccgccgccccgcgacccgctccccgtgggcgctccgctcgagtgaggtcctgcgccagccgcggggacggagagtgcggacctcgccttcggcgcggagcacttttttcccccttttcctccctccctctctcctggaaggcagccgcggaggctgtcgatccccaacgcccgcagcaaatcagagcccggcgctgggctcggcgaggccagcccccgcctcccactgggcgccgcgggcgagggggtggggacagcgggcgagtcgcagcgaggaaggggctggcccggggcggagcggacgtggggcgggcgcggccccctgttctttctctgagagccggtaggcgggcgggcctggggcggcctcggagcccaggggcccaccctggtccccccactgttcccaccccaggtgcccgcacctggccatgctccaagaaccagtgcagaggggccccgaggtttgatcacttcgggttaaaaagaaagttgcagtttaccccgcctaactttttctttaacgtggaggagttcagagctcctcttctgggtggagactaaacttcccatccagccagatcagggcgcccaagactgtggcctacgtgtcaacccggaccgaggacctgcctcctaactgcagattggcacgggaccgagctggggtctgacttcccaagagctcccgggacctccatgtgcttggacgggaacatctgggttattaatcaggcgaagtttggctctgcggcccccaggctctcacccctcactcctgcccactccctggtggcccctctgcaataaaaaggaaaccaaagaaggcatccccttgggagtgacagctggcgcagggagaaggcattcctgatcggctgctctcggagaagagctggggccctgattctcctgcctggcttctttaagcccctcggggtctcctccagcaggaggcccgccagtctctgggtggtaggtgggcgtctctccctccagcttccccaggcctggcctccctgcacagcctcctgaagcctgacccacaccccttccccaagggctgcagggctagttttttaaaaggagggaatcagaatgaattaagaacgatttgcaaaccctgggccatccccattccctttgaacaaacaatttagccagagatgccagacagggctgggactcccctctccagttacatctccag

SEQ ID NO: 17695 - DNA, 1908 bp, Artificial sequence
  DNA replication origin
ccgccacaaagaagaacggggggtgccgaggtccccatgacctcctaaagtggtgcggtccctgctgagtgcgctgcccgggccgtgacccgcgcccctgtgcgtccccgcgcgcctccgagcgcccctgtgcgccccggcccgcgccccgccggcatggacgtccatacccgctggaaagcgcgcagcgcgctccgcccgggcgccccgctgctgcccccgctgctgctgctgctgctgtgggcgccgcctccgagccgcgcaggtaagggcgccccggggcgcggggctgcgggatggggcgcgcgcagcccgggcgccgctgtcatccccgggcgccttcgcccgcagaacttttcttccttggcctgtggaatgcacgggccaagaccacgaatgccatttgctgggggcccccccgagatgacgacacgcagacacaatgcccgcgggcgcgccgccgccccctccccagacgggcgggtcgggtggggctgtcgcgcgagccgaggaaggaccgagggctggatcagcaggaggggttgtccacgaggcgggcaaacttttgtcccaaaaaccttccttctctgtcccacatcacaggcgcccagcttgggccctcacagccctacagcagaacttcctctgctccaaaccgggcagggccgccccctagagttacagcccttcaaatcccgggactcctggggatggggggaatcccagaagcctgggcccccagcactgaacttcccccaggcactgtcactctaggctgagctggcgccctgctttccccagggacagcgtttcctgcagccttggtcacctaagtgttcgggggcactggggacccctgcagggtggtagacagccctgctcctaatcccacccccaaacttcttgatccctggaaggcagcttttcctggattcgctgctgagagatgggatgcgtggagcaaagccagagatgggcttgcaggcggggctgtgagtggttgggatgatatgcagatgtgggattccttctgccaagggtcagcccttagaaggaggcttgcttcccggggagggcgcttcaaggcggggactgtctgcgtccctgcctgggttctcgagggttcaactctccctggcgcagcttcctgacgggggagtttttctaggcatcgctcttggtagttagtggcggggtgggttttcacagactctcgaacatcagagcccccagccctggaaggtcccccgaatccttattgacaggcggggagatggaggctcagagctgtgtgctgccaggtcaggagaagtggcgggcagagcgatgggacggtgggctcagcgaacgtctggaccagcccgccgcctgccagcaagaatgcttctctctgcttcacgattggaagacaagtgggaagaatcattgtccgtgttccgcttgtcaattaaaacactcttttcctttttccctggcacgatcagtgcttgttgggctaactggatgagctggagtctgggtgtgggggctgccctggggctctgggggaggagccaggagcctggcctggctcccaggacctgggatctcatccctgggccgccaccaactctctcctgaccctgggctaactgggcttgtgtttctccaggggttagctgaaggtgggggacaacagaggtccccagaaaagtggagaggagaaggaaggtgtggtcagggactgtgccattgccgggggactaggccctgtctcagcgcctctggggacttttccccagaaactcaggagggagtccttcaggggaatcgtcaccctagacagctggggcagggcactgcctggggaccatgcaccggactgggcttggggttccatttccctccctgcccatctccccacctcca

SEQ ID NO: 17696 - DNA, 1270 bp, Artificial sequence
  DNA replication origin
gagatgcaggcgctggggggagggggcggctgtccactggagatgcaggcgtggcggggagggggcggctgtccactggagatgcaggcgctggggggagggggcggctgtccactggagatgcaggcactgggggaagggggcggctgtccactggagatgcaggcgctggggggagggggcggctgtccactggagatgcaggcgctggggggagggggcggctgtccactggagatgcaggcgctggggggagggggcggctgtccactggagatgcaggcgtggcggggagggggcggctgtccactggagatgcaggcgctggggggagggggcggctgtccactggaaatgcaggcgtggcggggagggggcggctgtccactggagaggcaggcgcgggggggagccaccagcaagtgcctgctgtcttctccatcttcggatctgccagatgttttctgagggttttctgaacacagttcttttgcctgctttcttttggccaagtgtgtgaaggaatgaaaagtaagattgcatttggggctgctgaacagtgtaacggggaaggagagtatgggaaatgaaacatgaccccaatatttggaaattgaggtcatctcctctacacgccattggttgactccagtcacgtgattgctttttgcaataatttgtggggagagtcggccaagttttgtgagacttgacaggtatcaaatggttaaatttcctctgactcaatcaagttggctggaaagacatccttttccatcctctgccccctccctccctctccccataaaagagcagtgagtgggaggagctcagaagccccaagaattccccaagccctctccctgctgtggtccagatttgccggaggggttggagttttggttgctacccagggctgtgcccacccagcagtgcggcagccccaggcaggggcgtgctcccagtgccaggctcacagtggtttctccagtgatgttactcctgggctgctcctgcggggctggccagagcctgctcttcaccccgccctgcagatatttctggactccccaccgccacgcctcagccgaacacagctggtgctgcccgtcccgccctgccttctcgctgcctggcctgtctgcctgccctgcctcctccctggaccgccccatcccacctcctgggagatagaccttgataggtggagtaggggctgtgcagagcagtgagctgccccgctggagggcgaggatgagtccccaacact

SEQ ID NO: 17697 - DNA, 2200 bp, Artificial sequence
  DNA replication origin
tggtgctgttcccctgcacacctggcagcggcactcactcatctccaaagcaaagaccccactatccggcaggtcttagggagcagggagaccctgggggtgggggtgagcttccagagaaggggtttcccatgggtttggccatgagattctgctgttgttgatgttcttattatgggaaggctcagacacagcgcagcaaaggtcgtgttctgcctggggccacagggaccagcccacagccaaccccgttccagccagaggccagcccacgcccccgcacccggtgattttgaagccagtccctgacatcagctgcgttcttcggtaactatttcggtctccgaaagaggaggacccctactccaaactcacctcagcttgctggccgtgtgccgtctgtgcgtctcccaagggcgcccccctcacccagacctcccctccatccgtactgtgctcggtccacaggaccaggctctgcagagccagggatctgtaggactgcaggtttatagggctggggatctgtagggccagggttctatagggatggtggtctgcagggctgggggtctttcaggcagggggctatagggctggggactctgcagggctgggggtgtctgcagggtcaggggtctctcaagctggggatctgtagggctgggggtgtgcagggccgggtgtctgtagggctgggagtctgtagggccaggcatctgtagggctggtgtctgtatggctgagggtgtgtagggctgggggtgtgtagggctggtgtatgtagggctggaggtgtgtagggctgagggtgtgtagggctggaagtgtatagggctggtgtgtgtagggctggaggtgtgtagggctggagttgtgtagagctggtgtgtgtagggctggaggtgtgcagggctgggtgtgtgtagggctgggggtgtgtaggactgggagtgtgtagggcttagggtgtgtagtgctgggggtgtgtagggctgggggtatgtagggctggaggtgtatagggctggaggtgtgtagggctggaggtttgtagagctggtgtgtgtagggctggaggtgtgtagggctgggggtgttttgggctgtaggtgtgtagggctggaggtgtgtagagctggtgtgtatagggctggaggagtgtagggctggggtgtgtgtagggctgggggtgtgtagggctgggagtgtgtagggctggggtgtatagtgctgagagtgtgtagggctggtgtgtgtagggctggaggtgtgtagggctggaggtgtgtagggctggtgtgtgtagggctggaggtgtgtagggctggagttgtgtagagctggtgtgtgtagggctggaggtgtgcagggctgggtgtgtgtagggctgggtgtgtgtagggctgggtgtgtgtagggctgggggtgtgtagggctgggagtgtgtagggctgagggtgtgtagggctgggggtgtgtagggctggaggtgtgtagggctggtgtgtgtagggctgtaggtgtgtagagctggtgtgtgtagggctgtaggtgtgtagggctgtagatgtgtagggctggggtgtgtgtagggctggtgtgtgtagggcttgtggtgtctagggctggggtgtgtagacctcgtgtgtgtttagggcggggtttgtagtgctggtggtgtgtggggctcgtgtgtgtagggctggaagtgtctagggctgggggtgtgtagggctgggggtgtgtagggctggtgtttgtagggctgggggtgtgtagggctgggggtgtgtagagctgggggagggtagggctggtgtgtgtagggctggaggtgtgtagggctgggggtgtgtagagctggtgtgtgtagggctgggggtgtgtagggctggtgtgtgtagggctggaggtgtgtagggctaggggtgtgtagggctggtgtgtgtagggctgggggtgtgtagggctggtgtgtgtagggctggaggtgtgtagggctggtgtgtgtataaggcaggggtttgtagggctggggttgtgttgggccgggcgtctgtagggctggtttatccgaatgcactgggtggccttgggctttagggcctgcacttttctgttttgtgcatcgatgtgggaggcagggtgagtccccacccgagggaggcggaggtggagctcagagaagcacagagcc

SEQ ID NO: 17698 - DNA, 1248 bp, Artificial sequence
  DNA replication origin
aggacccagagggtgccatgggtgctgtgcccaccaggctgtcctatggcacgtgggcttgtcagagcctctggcacctgcagcagggctcccctgtcctgccctccttgaatgtcctggcacagagggctggtaccaagacagcagctgcactgccattttgcagagggttggagttctctgggtctgtaaccctggcccggagttgcctggtgttttctgggattgactggaagcaaaggagggtgggcaggtccagcttcctgcagggtggggctttgcagggctcaccaccggatgccagaggatgccggagcttggagcctgggaccctcacagtggacaggtgcaggagccccggggccccaccttgcagcttcagattgagggtctgaggtggagcctggggcctgcggctcctcgtcctgcccgcccagtgcagcggcagtgaccagttgagggtactttgggaaactctgagcagaggagggtgggggcctgtgcctccctccagccctctgtccttctgcagagcctgtccctatcaccagctcacagtcacctcttggacttttgcaaagagagctcaggggatgaggagggaagcagtgattctcagggacaccgggagcttcggaggccgagagagcaggtttgaactcctggctgtgggatctccaacatgttacttaacctctctgatctgaggcagcttatctgcatatcagaggcaatagcaccacctacctggactggcagctgtgaggatctaaggaagcaatactggtgtggatgcaaagccctaggtgtgcccggtgtgcaggacatcgtcccgtgcagtgcaagcaccaggtgcactcgtggtattgataacgatgcctgctgcttttattgggatggtcgcagatggtatcatataattcttattagagatggctgttattttacatggctgttaatacggaggttgggaggcagtaattgtaacttttataaagtgtgaaagaaggactaaagctgctgtttgcagcttcaggcccagccagggacctcagaggatgctaaatggttggcacaaaagggccagaggttccaattggcagggcaaggggtgtacattatagataatatgggggacggggcagggggtgcactttatagataatatgggggggtgagacagggggtgcagtttatagataatatgggggacggggcagggggtgcactttatagataatatggggg

SEQ ID NO: 17699 - DNA, 1124 bp, Artificial sequence
  DNA replication origin
ggtagaggggtgcagtttatagataatatgggggtggggtgtaggtgtagtttatagataatatgggggctggggtagggggtgaagtttatagataatatgggggtggggtgggggtgtagtttatagataatatgggggtggggtgggggtgtagtttatagataatatgggggtggggtgtaggtgtagtttatagataatatgggggtggggtgggagtgtagtttatagataatatgggggtggggtgggggtgtagtttatagataatatgggggtggtgtagggggtgtagtttatagataatatggagggtgggttgggggtgtagtttatagataatatggggggtggggtagggggtgcagtttatagataatatggggggtgagggctgtggaaccttcctctgtattcagttcccaggagcttctccagatgagtttcctttgcccgggggtgccaggcctgacggggaagggcagggggtgggacaggacctgcctggactcctggagaggactctgatgtcttctggggagggggcacagagtcagtggcctggcttatggcctgggggccgtttggcagatgaataagctcagacttagaaggtgtgggttcctggtgtcacaggctggtgaggagtggggagaccaggcctgggagtcctggcctgtcgggtgggcttcactgacgagggatgggccgggcacggagatgctgctggctatggcggactgcactcggagtcctgtcgctggggaaagcaaccctgcccgtctcttgccaccgtcaggggacggtgttcaaaactgggtcttttctcagcctcagtgggctggaggggtcccaggctttctaatgcaggggctttctgcccagggcaggctctgaggaccaatgttcaccctacaaccgtggtggtgggcagctcgcccctctgtgagcaggcagcacccacgctgggaggttctggaccccggcctccgcagcccataggtttcaccattaccctgaaaatctccttgctcaccagtgataaaggaaagcagctccgaagtgcagacacccgctccctctttctttccttttctggctgcccgggtctccagttctgc

SEQ ID NO: 17700 - DNA, 1484 bp, Artificial sequence
  DNA replication origin
gactgtaccgtcggctgctgctgcaactggatttctcttgtctctcagttcaagccaacaaaacagcttgagaatctagttgtatctggtaccattcaaagcactgcagaaactagtaagttagccactcctggccgcctagtgtagacagtggaagtctgagatggtcgtaaaccaccctaacacaaaaatgccaatcgctatggtagaggaggcagcccagtgctatgacaaaatcatggacagatgaatggatgggtggataagtggatggatggatgaatggatgtgtagatgaatggatggaagaagggatggaaagaaggaaggaaggaaggaaggagaagggaaggggaggggaggggaggggagggaagggaagggaagggaagggaagggaagggaagggaagggaagggaagggaaggaaagggaagggaagggaagggaaaaggaaagggaaagggaaaggaaaagtgaaagggaaaaggagggagggaaggaaggaagagtaggtggaagggagggtggatgggtgggtgattgaatagatatatggtctggatcaatgggtgaaaggatgggtggatggatggatggaaggatgagtagatgaatggataggtgagtaaatggataaatgggatggatggttgggtgagtgggtgggtgggtggatggatggatggatggatggatggatggatgggtgggtgggtggaaggatggatgattggatgggcagaaggatggatggatggattgatggatgaatgggtagatggatggatgaatggatacatagatggaaggacagttggatggttggttgaatgaataggtgggtggacaggtggatgaacagtgaatgggtacatgagtatatggacacatggagtatggacaaatgggtggacagatggatgggtagattaatgatatggatgcacaggtgaacggatggaagaacagttggatggatgggtgagtgggtgtctgattggatggatttatagtttagatggatgggttggtatatacatggatatatgggtagattaatggtatggatggacaagtagatagatggatggatggatgcattgatggatgaatgggtgggtaaagacaccaatacacctttgctgatttaaactaaatttaaggcacccaatttcttgctgttctctcctgctaccctacctggtgttgagtgatagccaagctaaatgcctcacgcaaagaccaagatcacacagtgatcaggcgtttgcacattctgttcctcagacctggaatcctcctcttcccccgactcccactcttggtgaattcctattcatctcctagacctcatcttagacattgctacctctgaaagggctccttaagcctcatgctggatcagtggccatcctatgtgtttattcttatagcattagattgaaccatgtgaaatggccaatgtttgatcattctggcct

SEQ ID NO: 17701 - DNA, 782 bp, Artificial sequence
  DNA replication origin
gtgcatggatggtgcccagggtccagtcccccaacaacaggctcattgcagtggcctgccgccccggtgtgtgtccctgactcaggggtcccatcggcaggtgtgttggctggtgccagccccgggaagctgtctgcatccctgcagggcaagcacctgcttctcaccacctgctgctcctccatggtctcttcagagcctgtttttatcctggctgctgtcattcctgagctgatgtgcactcctgcagtgagcgacagagacccccatttccttccctgtggctgggcagctggaccacccaggatgacagcccaagtgatccaccaggactctcgcagtgcagacaaaatgaaactggccctcgctggaggaacgggtgggccgggccctgggtgaaggggctggagctaaatgccgttggaactgggtggcccctgaagtgtctgctttttgccaaggcagagcctgggaagagggagcagggatcaggctggttggtgttaccccctgctggggggcaggcgttagatctgtgcagggtgaggctccgaggcttgctgggtcagtcccattcagtggctctgtgttggggtcacgtggtatctgccctctgttatccgagatgcctttcaggccttcagttctcatcaattctcagttcatttggagcctcctcttcactacttgacacccttaaagtgataccctgccatcagcgctgggaaactgatcatccttttcttcctttcgctctctgggcctccttgtcttgtgtcttg

SEQ ID NO: 17702 - DNA, 1101 bp, Artificial sequence
  DNA replication origin
cctttcgctctctgggcctccttgtcttgtgtcttgtgtggaaagagcagtctccgaggccctaacctaccaccccgcagtccctccccgatctgtcccctgcactgtggggctggctagggggcactgccgggctggttagggggcactgccgggctggttgggggtactgtggggctggctagggggcactgcagggcttattagggggcactgcagagctagttgggggcactgcggggctggttagggggcactgtggggcttcttagggggcactgtggggctggttgggggcactgtggggctggttgggggcactgcggggcttcttagggggcactgtggggctggttaggggcactgtggggctggttgggggcactgcagggctggttgggggcactgcggggcttcttagggggcactgtggggctggctaggggcactgtggggctggttgggcactgcggggctggttgggggcactgcggggcttcttagggggcactgcggggctggttgggggcactgcggggcttcttggggcactgcggggctggttagggggcactgcagagctggttacggggcactgtggggcttcttaaggggcactgtggggctggttgggggcactgcggaggtgccccggtgctctccggtggtcagatctcaggctcctgccagccagtcccctcgcgaggccccactgccaatatgtccctcttacagataatgacaggcagcctctgggatgggacccactttgcccaggaccatggggcttgtacatggggggtttaggatccaagtcagtccaccccgggagtggggtggtgccgggtcaggtgggcctgtgcctgtggggagggtggtctagtgtcagacacagatgagccatagatcctttgcacagagaatctcataataagcaatgcagtgagagcagtgacactgtcatcttcaggaaggactaccccggaggccctttggacgggcccttcattcttcagcaaggaatgatgagctgggagccatgaacaagcgcagtgcctctgggtacctcagagcccactcagggcagccatccaggcgaag

SEQ ID NO: 17703 - DNA, 1707 bp, Artificial sequence
  DNA replication origin
agtggggatgttaggcttgtggtgcggatgaaaggaggcaaagccggtgcggcccgccccgtgctcactcagcgtggtggcaggtgcgccgctgtgtgctggcaggctctcctgcccgcgcgagacggtggctgttgtgatgatgatgatggtagtcatagtgattgtgcagtattttcatagcatcgccgtcagtgccgttaaccctgtctcattgaaaggggtgtgaagggtctacaagctcagtgggcaggtaggggagccaggacctaagcctgctccccatcgagacgccccgtctgttgggtgcagtggtgggggaggggccccgtttagtgcagtggtgggggaggagccccatttgttgggtgcagtggtggggcaggggccccatttgttgggtgcagtggtgggggggccccatttgttgggtgcagtggtgggggggcccatttgttgggtgcagtggtgggggaggggccccatttgttgggtgcagtggtgggggaggagcccccgtctgttgggtgcagtggtggggaaggggccccatttagtgcagtggtgggggaggagccctatttgttgggtgcagtggtgggggaggggccccatctgtggggtgcagtggtgggggaggggccccgtctgttgggtgcagtggtgggggaggggaccccatctgttgggtgcagtggtgggggaggggccccatttagtgcagtggtgggggaggagccctatttgttgggtgcagtggtgggggaggggccccgtctgttgggtgcagtggtgggggaggggccccgtctgttgggtgcagtggtgggggaggggccccgtttgttgggtgcagtggtggagaggcccgtttgttgggtgcagtggtgggggaggggaccacttgggggggcagccacatgggaagccgggaagggagctcccacagctggtctctgtcttccacagctggcctccgcctctgggcatgaattgttcggtcggtggtttggtgcctggaagaagcccctgtgggcctgcagagtcagctcggaggccaggttggctctgtttctcccccgtctaagggaggctgcctggctcttccccagacccaagcagacggtccaggtggtcaggccggtgacaccccacttgcagggcctgggtgctgtcgtatagaccgtgcgcctggggtgtggggctgtgtcttgccagccaggtgtgctaatgagtgagtcttgatcccagagcacatggaaaatctgtctcagaatcacttttctgccagcaccctccagtctgtttgaagatccagcagttgggaagggctgctctgttctaccactgcaccccatggtgcccaagcactaggctggatggggcactgggggctggtgcagtggccaccgcttgttcagaaaacccaaggctccgagatggaggtaaagccagagaggtaaagccacctgcccacagtcacacagctgggaacagtcagggcaggacttcagcccaggcctggatctttctgggttaagagttcccatacttaggtgaagaggggcacggcttggggtcccggataggaggcttctgcctgggtcctgtctccttattctcatgaccccttcttgcatctcctgatccaaatccccgctcttcagtcacatctcctgtgtcccctttcagcgtctcgttctccag

SEQ ID NO: 17704 - DNA, 1457 bp, Artificial sequence
  DNA replication origin
ccattctatgcatataccacactctgtttatccatttagctgtcggtagacatgtgggttgcatttatcttttggccattgtgactaatgctactatgaacacttgtatacatttatttgtttgagtccctgttttgtttggagggtgaactgatttgggtgaattgtttatgcatctgtttcagttccggagattggaattactggtcatatggtaattctagttttaactttttgagaaaccagacatcacctctttaaaaatactctcttccccagtggttgaggggtaatggcaaaggaggcagggtacctccaagccctcggggtctagggcgggtgagagtgcaggctgtttctcacaacaggcaaaagctgccagcactgcactggcatctggcaggtgctcaacaggtgtctggtaaatggatgagtgaatgggtggtggattgatgggtgggtgggtagatgggtggatagacagatgaatggatgggtggatgggtggaaggatgagtagagggacggagagatggatggaaggatgtatgtatctggatggatagatagatggatgaattaatgagcagatagatggctgggtggatggatggacaggtggataggtagatggatgaatggatgagtggatggatgggtgaatgggttgaaggatgagtggatagatggatagatggatagaaggatgtgtatgtgcagatggatggatgcatggatggataagtgaatgagtggacagacggatggaggagtggatggatagagggtttaatggatggatggacagatgaatgggtgaatggatgggtagatggatggatgggtggatgggagaatggatggatgggtgaatggatggaaggactggtagatgtagatggataggtggacagatgggtgaatggatgaatgaaagagtggatggatggatggatggatgggtagatggatggaagcatgtatatatgcagatggattgatggatgagtgaatgagtggacagatggaaggatggatagatggtttatggatggatggataggtgaatgggtgaatggatggatagatggatggatgggtggatgggtgaatgggtgggtgaatggatggaaggactggtagatgtagatggataggtggatagatgggtgaatggatgaacgaatgagtggatggatggatggatggatggatgggtagatggatgagtgaacggatggatggatggatggatggatggatggatgggccagcctagcttgagtgtcttttgtgagtggcagcttctagggagaatgtttggctctgaggacaagctcgtcttgtggcttggtctggactttcccctgcttcaaggcatggggctgtgtctcccaggtccccatgcgagtgctctgtgagctgctttttcatgagcgtctcttcttttccagggt

SEQ ID NO: 17705 - DNA, 968 bp, Artificial sequence
  DNA replication origin
cagtgagggagccggctgttgccatccgagctttgctgtcacggggcgtatcgggctttccgcagtgaggaggacgttgggagatgccaagtatacaggggagcatctgccagcatctctgggccctggccccggtccccaccctgtacgaggcacagggctctagcaggcccaggatgagtttggttctcgggttccttaagtgtgggtgcagctgtggtgggagaggagagaggagagctcaggggctcccccggggggtgacgcagtctgaggtcggcctcgggtcctccccgctctgggctgtcatcccctcacctctgaaattggggagggttgtgagggtgcgtgagcggcagtgagagccggagggtcacacctagcagggcccgggccccgtgcaggagtgtgtatgggtgggtgtcctcctggggaggaggctgtccagcctcagagccattgtcagaggtaaagagggtggggtgtgagcatgggcggtgtgtgtgtgtgcatgaacgagtgtgtgtgagcatgtggcatgcaggcacgggtgtgcttgagcctgcgtgtgtgtgagagtgtgtgtgagcgtgtgtgcatgcgggcacgggtgtgcatgagcctgtgtgtgtgagcgtgtgtgagcgtgtgtgcatgcgggcacgggtgtgcatgagcctgtgtgtgtgagcgtgtgtgagcgtgtgtgcatgcgggcacgggtgtgcatgagcctgtgtgtgtgagcgtgtgtgagcgtgtgtgcatgcgggcacgggtgtgcatgagcctgtgtgtgtgagcgtgtgtgagcgtgtgtgcatgcgggcacgggtgtgcatgagcctgtgtgtgtgagcgtgtgtgagcgtgtgtgcatgcgggcacgggtgtgcatgagcctgtgtgtgtgagcgtgtgtgtatccttccagggaaaggtgacctggtcatctcacattgctctga

SEQ ID NO: 17706 - DNA, 2609 bp, Artificial sequence
  DNA replication origin
acccttccagaatgggggaattttccttagaagatcacgtgtgcctcagccgggctaatgcaggctgcagactctcacctgagtctcaccacgatggcctgaaggtaggagggtgctggactgagcacccagcagcgcaaggcagggccacacatgtgggcagcctcaggacactgagccgaggtctgagctatcctcagcccaagtgctccaggtgaagcagcctcacgctcataccctcagggagccccgcctgcctgcagcctcagagctcgcacgcagtgggtgctcaatatgtgctcatcagtcgtgcaaaagggctggagctgagtcagggacagccttcatggctgtgctgtttccatgtggttgttggagaacatacatgtagcagctttggataaatggcaacagccaagccccttctcaaggcatcatggagggctgcagggcatgcttacgggagcaatcaacagagcagtggggtgtgggtggatgtgtgggtgcgcctgtgtgtttgtgtgagtgcatgtgtgtatgcgagtgcacgtgtgtgggtggagtgtgtgggggtatgtggggtgtgtgcatgtgtatgcctgtgtgcatgtggggggatggggggtgcatatgtgtgtataggtgtgtatgcgtgtgcgtggcgtgtatgcatgtgggggtatgagtgtgcatgtgtgggttgtgtgcatgtgtggggtgtgtgcacgtgtgcatgtgtgtgcatgtgggtgtgagtgtgggcatgtgtggagcctgtgcacgtgtgtatgcgtgtgtggctggtgtgcacgtgtatgtgtgtatcggggtggtatacatgtgtgtatgtgtgtggcgggtgtgtatgcatgtgtgtgcatgtgtgtacgtgtgtgtgtgcatgtgtgtatgcgtgtgtgggtatgtatgcgtctgtgtgcatgtgtgggtggtgtgcatgtgtgtatgcatgtgtgcatgtgtgtatgcatgtgggggtgtgtcagggtgtatgcgtgtgtgtgcatgtgtaggtggtgttcgtgtatgtgtggggtgtgtgtgcatgtgtggtgtgtgtgcatgtgtgtatgggtgtgtgggtgtgtgtgtgcatgtatgagtgtggggggtgtgcatgtgtggtgtgtgtgtgtgcatgagtgtatgagtgtgggggtgtgtgggtgtgtgtgtgtgcatgtgtggtgtgtgtgcatgtgtctgagtgtgggggtgtgtgggtgtgtatgtgcgtgtgtgtgtgggtgtatgagtgtgggggtgtgtgggtgtgtatgcgtgtgtgcatgtgtggtgtgtgtgcatgtgtgtatgaatgtgggggtgtgtgggtgtgtatgcatgtgtgtgcatgtgtggtgtgtgtgcatgtgtgtatgagtgtgggggtgtgggggtgtgtatgcatgtgtggtgtgtgtgtatgtgtgggggtgtgtgggggtgtgtgtgcatgtgtggtgtgtgcatgtgtgtatgtgtggggggtgtgggggtgtgtgcgtgtgtgcatgtgtgtatcagtgtggggtgtgtgggtgtgtatgcgtgtgtgtgcatgtggtgtgtgcatgtgtgtatgagtgtgggggtgtgggggtgtatgtgtgtgtgcatgtatgtgtgtgcatgtgtggtgtctgcacatgtgagtgtgggggtgtgtgggcgtgtatgagtgtgggggtgtgtgggcgtgtatgcgtgtgtgcatgtatgagtgtgggggtgtgtgggtgtgtatgtgcgtgtgtgcgtgggtgtgtgtgcatgtgtgtatgagtgtggggtgtgtgggtgtgcatgtgtgtgcatgtgtgcatgagtgtgggggtgtgggggtatgtatgcgtgtgtgtgcatgtatgagtgtgggggtgcatgggtgtgtgtgtgcctgtgtggtgtgtgtgcatgtgtgagtgtgggggtgtgggggtgtgcgtgagtgggggggtgtgggtgtgtatgcgtgtgtgcatgtgtggtgtgtgtgcatgtgtgtatgagtgtgggggtgcgtgggtgtgtgtgcatgtgtggtgtgtgtgtatgagtgtgggggtgggggggtgtgtgcatgtgtgcatatgtgtatgagtgtgggggtgtgggggtgtgcatgcgtatgtgtgcatgtgtgtatgaatatgggtgtatgtgtgcatatgtgtgtgggggtgtgggggtgtatgcatgtgtgggggtgtgtggtgtgtgcatgtgtgtatgagtgtgtgtgcgcatgtgtggtgtatgtggtgtgtgtatgtgtgtgtgcatgtgtgtatgagtgtgggtgtgtgtgggtgtgtgtgcgtgcatgtatgagtgtgtgggtgtgggtgtgtgcatgtgtgtatgagtgtgggtgtgtgtgggtgtgtatgcgtatgtgtgcatgtgtggtgtgtgtgcatctgtgtatgaatgtgggtgtgtgtgtgtgcttgtgtgcatgtgtgtatgagtgtgggggtgtgtgggtgtgtatgcgtgtgtgtgcatgtgtgtatgagtgtgtgcgcgcacacatgtgtggtgtatgtggtgtatgtgtgggtgtgtgtgtgcatggggggtgt

SEQ ID NO: 17707 - DNA, 1024 bp, Artificial sequence
  DNA replication origin
tctgcacacctagcagcttgctgggagcgaggacattccaggcctttccggctggtaccagagctggtaaacctggcgtatgtgaagcagccccaagccagagaacccttgtgcaccactgaggggaagctggtgtccaggctaacagctcatttctctaaccttgccttttttctcctctgcagggtgacgacggagaagttgggcccagggggctgcctggggagcccgtaagtctgtgagctgagtgggacggtgggggctcagtgtggagaaaggctttgtccaaggctcctgctggagcaggatctgggatcagccaggagcttagaagagagagagctcgacctgagaacagacggacctgggcatctcccagggaagccaaagagaggaggcacaggcgaggctggctggcaactccaggaggaagtctgagcctgcctacaggagcaagcctggccctcaagggttgttgtgggggtccaggggcagcgtggtggggtctgggggcattgtggggagtcgggggcagtatgtggggtccatgggcattgtggagggtctgagggcatcgtggtggggtccggggtcagtgtggggtgtccgagggcatgggggtggggggtacaggggcatcattgggagggtccagggtcagcatgggtgggtacaagggcattgtggggggtctgagagcattgtagggggtctaggggcaacatggcagggttcagtggcaccatagggggtccgagggcattgtggggggtcaagggagaagcatgggaggtctgaggtcattatagggggtcagggggcggcatggggggttcaagggcattgtgggggatctgagtgcattgtgaggggtcccggggcagcacagtggcatccaggggcattgtggggggggtcacacacctgaatcagcccgagcttgggcccgtttcaatggccacccttccagaggcagattcctccagcagactctgccccagccctgggcatgggaaagctcttc

SEQ ID NO: 17708 - DNA, 1475 bp, Artificial sequence
  DNA replication origin
ggtctgtgtgcaccttgcaaacttctagaattaaagagctggtaggtgctacagtcagtgcataaatttgcattcattcccaactctgcaagctgctgtgctttatttaaagggattgtgggacgccaacacaacgtgcacgaggcacagaaaatacaatgtcacagtgcaatgttcatgtctcacctcagttcagctcagcagtgtgtgtccctttctcccaaacaccagccaccctcctatggatatgggcgcgtgggggatggtggcaggggagggagcatgatgaaactccatttggctttctagagctgaagcctgtgaaatgcttaggaaatatttattgagtagagaggatggataaagagataggtggctgggtgagtggaggggtgtggataggtaggcagatggatgaatgggtaggtatgtgggtgtgtaggcagatggatagacagatagatgggttggtgggaagagaggtggatgaatggatgggtgggcaggtggggtagatacatagatggatggatgagtgggcaggtaaatagacaagtggatgaatggaggggtgggtttataggtaggcaaatcgatgaatgggtaggtgggtaggtagacacatggatagacataggtgggctgcttggcagagaggtggatgaatggatgggtgggcaggtaagtagacaggtcgatgaatggaggggtgggtttataggtaggcaaatcgatggatgaatggatgggtgggcaggtaagtagacaggtggatgaatggaggggtaggtggataggtagacaggcaaatggatgaatggttaggtgggtaggtaggcaggtagatgtatacataggtaggccagtgggtggataggtgggtgaatggatgggtgggcaggtgggtagacagttgggtgaatggaggggtgggtggataggtaggcagatggaatgaatgggtaggtgggtgggtgggtaggtggatagacagatagatggatagagagatagatggatagacagatagatggatagacagatagatggatagacagatagatggatagacagataggtgggccagtgggtaaacaggtgtatgaatgggtaggtgggcagatgggtaaacaagtggatggatgggtgggcagatgagtagacaggtggatggtggatgggtgggtagacaggtggatgaatggaggcatgggaggataggtagacaggcagatggatgagtgggaggataggtagacaggcagatagatgaatgggtgggtgggtgggtagacaggtagacggatgaatgggtaggtgggtagacaggcggatgagtgggtgggtgggtagacaggtagatggatgagtaggtggataggtgagaaggtaggtagacaggtaggtgggtggttgggtgggtgggcaggtggagtctggggcagaggctgtgcactggcatgcaggtggtcccc

SEQ ID NO: 17709 - DNA, 809 bp, Artificial sequence
  DNA replication origin
tagacagataggtgggccagtgggtaaacaggtgtatgaatgggtaggtgggcagatgggtaaacaagtggatggatgggtgggcagatgagtagacaggtggatggtggatgggtgggtagacaggtggatgaatggaggcatgggaggataggtagacaggcagatggatgagtgggaggataggtagacaggcagatagatgaatgggtgggtgggtgggtagacaggtagacggatgaatgggtaggtgggtagacaggcggatgagtgggtgggtgggtagacaggtagatggatgagtaggtggataggtgagaaggtaggtagacaggtaggtgggtggttgggtgggtgggcaggtggagtctggggcagaggctgtgcactggcatgcaggtggtcccccaggcggcccatgcagcatgactcattcctggcccagctctgatgcctcctccttaaactctctttcagggctctattggattccctggatttcctggcgccaatggagagaagggcggcagggtaaggatagcctggcccctgggcaggcagcttgttcggctgcctcggtgcctagcaagttggttctccagccgacggcctgtttatttctcactctcttgcttctgaaactgctctcctgaatggctggccttaagctcttgaacttcagcaccacgtgttggtgacactctccagacgctgggctgggcaggtatgtgataggaaggggcagaggcaggaaggaagtgtgctgagaaaatggagctttctaattagcaccacaatccagaaggctc

SEQ ID NO: 17710 - DNA, 1176 bp, Artificial sequence
  DNA replication origin
gaaagggcttgcagtcacagcccatgaccagctgcagaaggccatatcctctcccagacactctcactgcagtgcagtgtgaaaggtcccccagcacaggagcagcccaccggggtacctcacattccccatgtttctcacagtggtacctaagagtatttcagaagacagtgtattcccaaaggcactactcagggcttctccagaagaagaatgacagctggatagagacagatggagaggtggatgggttggatagatactgacagagatagacagataatagaagatggatggatggatggatggatggatggatggatggatggatgggtgggtggatggatagatggatggatggatggatgggtgggtgggtgggtggacggatgaatggatgggtgggtggatggatggatgaatggatgggtgggtgggtgggtgggtggatgggtggatgggtgggtgggtggctggatggatgggtgagtgggtggatggatggatgggtgggtggctggatggctgggtggctgggtgggtgggtgggtgggtggatggatgcatggatggatgggtggatgggttggtgggtgggtggatggatggatggatgggtgggtggatggatggatgggtaaaaggacagagacagagaggggtggagatggagataatagtctccttgggtctgtgctgccaacttacactcagaacagacttctttttcctattttgtgaatctggcagaacacatttgtttgctcataaggttttggccaggagggacaggcccaagagggagctgcaaccctgtagctctgtctgccctgggacagcaggatggggcataggaggatgggctgggcagggctgcaggatcatggctggggctacaaggcaggtgtgagctctgccatctttcggggagcatgtcccccaggcctgctctgcagatgctgtcctgcatgtacaccacagactggcctttctctgtccccgccatatgccccgtggacaaggccagctcagagtccaaggcctgaggaccatctctctcctgttttcccaagtggcaatgctcaggcactgtgatttcactaacaagcatccaggaccgctcctgcagggaggcctgggccagcgggggctccagaaggtgcagggagaacacag

SEQ ID NO: 17711 - DNA, 1126 bp, Artificial sequence
  DNA replication origin
tccgaaggggtgagtagctgtgtccctccatggccccagcggggcaggcgtcacagacagggccatgccgagggcttcaagcatttcttgtatatgcagctttaagactgaaagccagaaatgaatccgtttcatcagtgaaactgttctttcagaagtagacctgaaattgttttaagaaattttttagtaataaaataggtttgtgcagcccggggtcaggaagggttggagggctttccacctggcatcctgccgtcccagggctgggacttcactcactggttgataaaagcttttctccggtgactcagtggtcccactgacctgagacccccattaaaaccctttaaaggaattgggagcaggtacaataacgtgagcctgagacatcttccggaagctgccctttgcctcaattcttattatccagcctgtttctgtgggttggccctggtccctcctgagtgctttgttttgaagtctgtttagtgaagaattcggggtggggagctgggctctgttgagattttgtggcatgtcacttaaatacccacctctgtggcctttcggaggcctcagcgctgtagcaggagtttgtgtgcatgtggatggtgtgtgggcacatgtggatgagtgtgtggatgggtgtgtgaatggtgtgtgtgtgtgtgtagatgctgtgtggttttgtagttggggtgtatgtggatggtgtgtgtgtagatggcatgtggatgatgtgtgggtgcatgtggctggtggatgggtgtgtgtatgggtggtggatgggtgcgtgtggctggtatgtgggggtgtgtgggtggtgtgtgggtgtgtacatggtgttcgggtgtgtgtggctggtgtgtgggtgtgtagatggtgtttgggtacttgtggctggtgcaggtgtgtgggtgtgtggctggtgtgtggatgtgtatatggtgtgtgggtgtgtgtggctggtgtatgtgggtgcatgtggctggcatgtgcatgcatgtagacgggcgtgtgttgctatccctcaagcatgcacctgaggcaggtccagccttggcccaggcgaggactgagtctccctgttgctcctggaaggtgaccaagcctgcagctctcg

SEQ ID NO: 17712 - DNA, 1219 bp, Artificial sequence
  DNA replication origin
gcgtgaggatgagcctggccccggcccttagggaggccacgtgaggagcccggcctgggccctcggggagaccggaggctgcgtgaggaggagcctggccccagccctcggggagactggaggctgcgtgaggagcccggcctgggccctcggggagaccggaggccgcgtgaggatgagcctggccccagccctcagggagaccggaggctgcgtgaggagcctgacctgggccctcggggagaccggaggccgcgtgaggatgagcctggccccagccctcggggagactggaggccgtgtgaggagcctggccccagccctcggagagactggaggccatgtgaggagcctggccccagccctccagcccctgctgctgcccaggaagggtgcgctctgcctctcgttttgcatgttaggccccaggccagcgcctggtgctcagtcactgctggaaacgctcactgagggagggaatgaacgaatgaatgaatgaatgatggaccaagggaatggtaataaaagccagcatttactgcaggcgaggggtggggcatcctcatcccatcctcacagccttgcctggctgctgcggcaccagactgtgtgcgtgtgtgtgtgcgcgtgcatggtgtggggggtatgtctgtgtgaagggtatggtgtgtggtacgcatctgtgtgtgtgatgagtggtgtgtatctgtgtatgctgtgtgtgtggtataatgtgtggtctgtgtgtgatgtgtggtgtgtgtgtagtgtgttatgggtgtatctgtgtgatgtgtggtgtgtgtgtgtggtatctgtgtgtaatgtctgtgtatggtgtgtatctgtgatgtgtggtatgtatcatgtgcgtggtgtgtggtatctgtgtgtctgatgtgtggtgcgtatctatgtgtggtatgtggtatgtgtggtgtgtatggcgcattatgggtgtgtgtgtggtatgtgtggtgtttatcgtgtgtgtggtatgtgtgtggtgtatggtgtgtatctgtgtgatgtgtggtgtggtatatgtggtgtgtattgtgtgtgtggtgcgtatctctgtggtgtgtggtatgtgtatcgtgtatctgtgtggtatgtgtggtgtgtggcctgtatctgtgcgtgtggtgtgtagtgtgcatctgcgtgtgtgtgtgtgtgtgtggtagaaccttcctggggactgagacgtgtgcgg

SEQ ID NO: 17713 - DNA, 912 bp, Artificial sequence
  DNA replication origin
cattcaccctttcattcatccattcattcatccattcatccatctattaatctattcatcatttatccatccatccatccacacattcgttcaccctttcattcatctgttcatccattcattcattcatccatccattcatccatctattcatcatttatctgtccatccatctatccatccattcatctatccatccatccatctattcatcatttatccatccatccatccatccatccatccatccatccatccactctttcattcatccattcattcccccattccttcagtggcagttcattgaccacctgctgtgtgccaggcgggagcagcaggggagaacccaccctcaaggagatgccactccaggggacacgggctgaccaagacccacaaggcaggggtaaggtgtgcccagaggaatgagacctgaggaaatgtaaaggggaggagacaatgtgcatgtgtgtggttgtgtgtgtgtggggggggtgatgtgcatgtgtgtatggcacgtgtgtgcatgtgctatgtggtgtattttgcatgtgctatttgtgtttatgtgaagtgtatgtgtgttgtgtgtgtacctgtgtgtgtggtgtgcctgtgtggtgtgtgtgtgtgcctgtggggagctgtgcctgtgtatgtggtgtgtgtgcctgtgtgtgtggtgtgtgtggtgtgtgtgtgtgtggtgtatgcctgtgtgtggaggtggtgtttgtgcatgtgcctgtgtggtgtgtgtgctggcgtgtgtatggtatatgtgtgcgtgcctgtggggaatgtgcctgtgtgtgtggtgtgtgctgcatgtgtatagtgtgcatgcctgtgtgtgtggtttgtgctgtgtctgtatagtgtgtgtgtgggtgtggtgtgtgtgcctgt

SEQ ID NO: 17714 - DNA, 893 bp, Artificial sequence
  DNA replication origin
aaactgaggctcagagagtccagggatttcgctctgttctcacacttggaaggaaaagagccgagattctacccatggtctctggatttccagctcccggcccctgagtgaacaggagagccccgtgaggcctgggtcctggatctagaaccttctggtgcaggatgggcaagcctgggcggggccacagtcacgtcgtagcacgagcagggtcatggtcatgattggaaatgacagccgccagctccagggtgggccctttgatcctgggctgggcagttttcctcaagtcagtgtctttggaaattgcaggagaacgtggcccccctggacctcctgggaaggcaggaccacctgggcccaacggtaaggaggggacaagagtgagaagcggcttcaaggcccttccagacctggctgcagaggaacgtgaggcgggtcttctggggctgccacgctgtcctcgccagagccaacgcctgcccaggcagggctcttggggcttagtccagggcaggggtctcagtgtgggggaaggggtctcaatgtgtgtgtgggttctcagtctgggggagtggggttatcagtgtgggagctggtctcaatgtgtgtagggggtctcagtttgggggagtggggtcatcagtgtgggggcagggttctcaatgtcggaggaggggttcttggtggtgtagggagaggttcttggggtgtgtgttgggggaggggttcccggtgggcaggctgtggggaggtgttatcagcagggagggaggagctgtcaatatgggggagagattctgggatgggggagaggttctgattattcggggagggacttttagtgtggggaggggttcttagtgggggggctgtctgtatgggggggttct

SEQ ID NO: 17715 - DNA, 933 bp, Artificial sequence
  DNA replication origin
tgggaggccgaggcgggtggatcacgaggtcaggagatcgtgaccatcctggctaacacagtgaaaccccgtctctactaaaaaatacaaaaaatttagctgggcatggtggcaggtgcctgtagtcccaactactcaggaggctgaggcaggagaatggcgtgaacccgggaggcggagcttgcagtgagccgagatcgcaccacagcactccagcctgggcgacagagcgagactctgtctcaaaaaaaaaaaaaaaaaaaaaaaaaaacagccagcacggcccccactggagcacagcctttctatacagtccagttttactgctcgaagtccccaccttggtgtgagccaggaggactctgacacaggttccgtcgggggcgggtaggggggggaggcggcgattgggggcgggggtggcactgcagcattggcgctgggagtgaaggtaggcttacaggccacctgggtcacccagtaggtgcagcccggggagtgtggcacggctgtggaaagcgtcgggctgaatgcagatgcaccaggatgggtgatggtaaaagtcacacgtgcatgatgcaaattcggtggaggaagtaatgttcagagccaggtgccacagatgccatttacctaagttaaaaatacacacacacagattcattttgaaagaacatggttaaaataaaaagctatgcactaaacacaagaaagtgttgtttaggcatggaggagaggcagggaaagagaaggagtgtgggataaagggagagggagagaaaggagtctgtggggacgcggcactggtggataatggtgcctaccccggccccaggcctttcgaggttggatttttggcttctctggtgtccgctggtgtttgcagagccccagaacatcctcgcaccctgctctctgcagcagcattccccc

SEQ ID NO: 17716 - DNA, 1490 bp, Artificial sequence
  DNA replication origin
gccagtgcggggtcctgacgtgcagctgggctggggcggtgttcagagcaccgggctcctgtcctctctcctcacccgtcatgcagggacctccagccttccttccccaggctgctggggtggggaggggtgtggaagctagagtctgtgcagcaaacatgggtggtcgacactgctgtctgtcaggcggagcagccctagagcggcacagccggtccgctcccccgcatccttggagacagatggccagagcctctgctgggtgggggagaattccgcaccctcctggctggaggcgaggccgtgggccgccggctctgggagctccaggctctgcctcccacacccgctgctctggacacgcagcatcgctctgcggggagagaatggtggcgggcctggctggctctccctggccccccagggacctagtgggaacaagcactgcaggaccaggagagaaagtgggtgaggaagcgggggggggggtgtgggggtgagcgagtgtgagtgtgcaagcaggtgtacccggctatgcatgagcacagtggctgtgtgcaggggtgtgcctgtgtctgtgtgtgtgtctggtgtgaatgtgtctttgcctgtgtctgtgtgaatgtgtctttgtgtgtgtgtctggggtgaatgtatctgtgtctgtctgaagtgaatggtctgtgtgtgtatctggtgtaaatgtatctttgtgtgtgtctggtgtgaatgtgtctgtgtgtgttactggtgtgaatgtgtgtgtgtctggtgtgaatggtctgtgtgtgtctggtgtgaatgtgtgtgtgtctggtgtgaatggtctctgtctaaagtgaatggtctgtgtgtgtgtatctggtgtaaatgtctctttgtgtgtgtctggtgtgaatgtgtctgtgtgtctggtgtgaatgtgtgtgtgtctggtgtgaatagtctgtatgtctggtgtgaatggtctgtgtgtgtctggtgtgaatgtgtgtgtgtctggtgtgaatggtctttgtgtgtgtctggtgtgaatgtgtatgtgtctggtgtgaatggtttgtgtctgtgtctggtgtgaatgtgtctttgtgtgtgtgtgcctgatgtgaatgtatctgtgtctggtttgaatgtgtctgtgtgtggctggtgtgaatgtgtgtgtgtctgtctgaagtgaatggtctgtgtgtatctggtgtaaatgtgtctttgtgtgtgtgtgtggtgtgaatgtgcctgtgtgtttttggtgtgaatgtgtctgtgtgtgtgtctggtctgaatgtgtctttgtgtgtgtgtctgctgtgaatggtctttgtgtgtgtctggtgtgaatgtgtctgtgtgtgtgtgtctggtgtgaatgtacctgtgtgtttttggtgttaatgtgtctgtgtgtctggtgtgaatgtgtctgtgtgtgtgtgtctggtgtgaatacatctgtgtgtgtgtctggtgtaaccctgtcccaagga

SEQ ID NO: 17717 - DNA, 1519 bp, Artificial sequence
  DNA replication origin
tctcctggcacttgctgccagcaggagtgccagctgacactctcctgtgtgcacagcaactcagcaaggtgtacccagcccttaaaaacgctcatcctctcagccagcgagtcctccttcacagcgactatccaaagcaagtaaccatgtgtaggagaacctgtctgcattgctcacttgggaaaaacagcaagacagattgtattcaagccactggagtaagtgaaggactttagaaccaagctcagttcagacgcagtgaagacagctgtggatgcccagcccacgagcagagtgagggtccgggctggaaaccactcacctggttagacaccaagggcaggagttcctgttaaaggcaggccgaggatttagacattgatggtcaggggcgaggaatctgatccaatgcaaaggatgggagggttctcagtataacaagactcagccagccatggacacgaaggccaaggtcaaggcctagttgagacggggctcagcccaggctcgcagtgggtcacggagggaatctgtgccagtcagttgcctgcccacaaaggctcaccacaaaccatgctggtccctccgtgggaggatggttatacagggagaatgatgattatacagggaggagggccagtgagagaataatggttatacagggaggtgggatggcgacaggatgatggttatacagggagaagggacggcaagaggatgatggttacacagggaggagggatggcgagaggaagatgatggttatacagggaggagggatggtgagaggatgatggctacacagggaggagcgacagcgagaggacgacggttatacagagaggagggatcgtaagaggaagatgatgcttatacagggaggagggatggctagaggataatgatggttacacaagcgggatggcgagatgatgatggctatacaggtaggagggatggtgagaggaagatgatggttatacagggaggagggatggtgagaggaagatgatggttacacagggaggagggacggcaagaggatgatgatggttacacagggaggagggacggcaagaggatgatgatggttacacagggaggagggatggtgagaggaagatgatggttacacagggaggagggacggcaaaaggatgatgatggttacacagggaggagggacggcaagaggatgatgatggttacacagggaggagggatggttatacagggagaagggatggcgacaggatgatggctatacaggcaggaaggatggcgagaggaagatgatggttacacagggaggagggacggcgagaggatgatggttatacagggaggagggatggcaagaggatgatggctatacagagaggagggacagcgagagggttatgatggctacactgggaggagggacggcgggaggacgatgatggttatacagggaggaaggatggcgagataatgatcattccacggggaggacggacagtgagaggatggtggttat

SEQ ID NO: 17718 - DNA, 1165 bp, Artificial sequence
  DNA replication origin
tcccggtgccgtgcgcccgcatgcctcagcccttgggtggtcgatgggaccgggcacagtggagcagggggcggcgctcgtcggggaagctcgggctgcacaggaacccacggagccgggggaggctcaggcatggcgggctgcaggtcccgaggcctgccccgtgggaaggcagctaaggcccggcgagaaatggagcgcagcgccagtgggctggcactgctgggggacccagtacaccctctgcagctgctggcccgggtgctaagtccctcattgcccggagccagcagggctggccgactgctccgagtgcggggccgccaagcccacccccacccggaagtccagctggcccgcaagcgccgcacgcagccccagttcccgctcgagcctttccctccacacctccctgcaagctgacggagtgggctccagccttggccagcccagaaaggggctcccacagagcagtggtgggctgaagggctcaagtgctgccaggcagaggaggtgccgagagcaagcgagggctctgaggactgccagcacgctgtcacctctcaaagcgaagggtcctgtggcgctgggctggccatggatctgctgctgcttgtctcggcctcaggtcctgcctggaactaaatcctcagagctgccagtgaggccttgggccaggttccggccgcaggtgtcagagaagagagacggggggtcccttctggaactccacagcgaaaatctcttgtgatattcaaggtgggttcccacaccaaactgagatacacagaggctcaagaagccgatttcattaagcgctaagtcttcaaattaatttactacgaaaaccataaaccccttttgtacaaattcaaggatggctgctgagtccctgggaggtttgaggcacccccatccccccaccaccccttcttttcctgacgttcatgaggtcggaatggtcaggtcagcccaggacccaggcacaaaattagaaaagcccagctgtcggcaaaggaagcagcttaagaagcaataagaccagtgagactgaacgcaggtggaggatctaatgcaccctctgcaactgggcatgctggggaagggctgggagggaggccccctgagacggagggtctcccagaaggaggaaaaatcccctgca

SEQ ID NO: 17719 - DNA, 1398 bp, Artificial sequence
  DNA replication origin
gcttttagggtctggggctcttctgctgccgctgagcctgtgccatgggggctgttctgggcagggcggggccagggcacctgggtccccatcgccgaccttcctcacacgcctttcactctcggagacgcctctccatgcttgcagatgggcggctacctctcgcctgcgctgccggttcctgcttaccttgccaggagaaccctcagcactgcagtttccagagggctgcacccccatcctcttagcatccctggacggaagcccagtgctctaatctgtaaaagggggacaaagtgcacgctcagcaaacctcatggtgggggtgtttgtatccaaaattgtgcttcagcccctggcctggggtcacgggctgagccagagcagatgcaccctggaatctgccccagtcctgagcttctgctgtgcggcccttgccctgggagggaaggatagtggtgggcgatagtggagggagataaagagcctcgtccaccagctcaggaggggatgtgggccctgtttggtgaaaaaaatcacccacaaataaagatgagggagctcataggctggtgggagaggcagacatccactgaactgccacctactgaccttgcgaatgccatggtgcagtgtggaaggcagcagggagccgaggttaagacccaatctggctggtagggcaggagctgctctcacctgggcaggaagtccctttcagcaggtgcaggtggcagcagaaaggacttcaagactggagaagcctgggtcccagcaggtggtgagcgcagcagcccaaaagacttacctgtgagggacaccagaagtggggtgggatgcaggcctgtgtgggacagaactccccaggaatctgtgctcccccacacactgacaactgccagacggaggcttttagtgtcaattcccgagacagagaacctgaatggatggtgggcatgaggggagcctcgcaagctgagccaggtccccgaccagggcgggggaggaggaggaggggaaggtttgctacctggaggttgcgagatgctgagcttgttggggtgagttccggcccagggctcagggctcaggccctgctgccatctatccctccctcccagggcaagggccgcacagcagaagctcaggactggggcagattccagggtgcatctgctctggctcagcctgcgagcccaggccagtggctgaagcacagttttggatacaaacaccctttaaggcacaacatgggtttgaggctggacagcatgcacaagcccacgctcatgggtcacaggcacccacagctcccccatctagcccctcatctagaccccatctaacccccatctagtcctccatctagcccccatctaacccccatctagcccccat

SEQ ID NO: 17720 - DNA, 880 bp, Artificial sequence
  DNA replication origin
gaggctgttgaaatgatttgtgcaggaggagccagttgtacggtgtgcaggacccagtgaaaaataaaagggtgaggcctccaacagcagaggatcaagtcagcgtgagacctgctgcccaggtctcaggccgggaagccagccctgcggtgtgggccgcggcgggacaaaacgcatggaaccattgatagtggaaggaagcccgcagggcctgctcatggactagatgtagaaagaggagtgtcaggggcagcaccaaagcttcagcctgaacacctggccggacagagctagcgccgctggcacaggcaggctgcaggaggatggccaggaggcagagcccagtgcagagaccagcaggccctggtgttcagtcccaagacaggaccaggcgtttccgcagaagagaaacaaggcaggacctggtgccctcgctggggatgaggggagccagtaaggccgaggagagggtggtggtagagccaagcgacatgtgtgcagggaccggagatgccgtcacagcagttccaaatgctgccagatggagcaagacaccagcgaaggaagtcattggatcacgggaggcgctggatggagagggttggttgcgggatggaggacgcggactggggacagcaagtcagacagttctttgcagctgtttgggggtaaaaagggcagaggaaacagtgcagggtccggagggatggggctgggcagtttgggctttggttttccatcgttgctttttgtcagatggggatggcagcatgcttccgtgcctgtgggaggatccaggcaatgtcagtggcgtgatgggtgggagcaggaaccggtgggcagcagaactggcccgggcggggtgtgggtctggggaggc

SEQ ID NO: 17721 - DNA, 1927 bp, Artificial sequence
  DNA replication origin
cacatgttgggggagacacatgtgggggggagacacgtggttgggggggagacacatgcagcagggagatacatgcagttggagggacacatgcaggaaaggagacacatgtgggggggagacacatgccaggggggagacacatgtggggaggggagacacatgcagagtgggggacacatgcaggagaggaggcacatgtgtgggggagacacatgcatttggggggacacatgcaggagaggaggcacatgcaagaggggagacacatgcagtgggggagacacatgtggaggggaagacacatgtctgggggagacacatgttgggggagacatatgtgggggggaagacacgtggggaggggggacacatgcggggaggaaaacacatatggggggagacacatgtgagagggagacacatgcagttgggggggacacatgcaggaggggagacacatgccgggggagactcatgctggggggagacacatgcacgggggggagacacatgcagcggggaagacacacgcggcagggagcggtagggacacaggcagaggggagagacacatgcagggttgggggagacacatgtcggggggagacacatgcagcggggagacacatgcgggggggaagacacatgtggggaggggagacacatgcggggaggaaaacacacattgcgggagacacatgtgggggagagacacgtgcaatgggggggaacacatgcaggaggggagacacatgccgggggagactcatgctggggggagacacatgcacggcggggagacacatgcagtggggaagacacacgcggcagggagcggtggggacacaggcagaggggagagacacatgcagggttgggggagacacatgcggaggagcaggggacatggagatgcagcagagacagcttgaaggtgctggcctggaagactggagcagccacaggcctaggaacacccagggcctccagaagctgcaggaggcaggaaggatcctcccctagagcctctggagggaggacagccctgccaacaccttcgtcttggacttctcccctccagaacttggagagaatgaatctccgttgccttaagcttctcaggttggggtatcttctcaccatcagccctgtctgatgtaataacgctctctctccctcactagggctctgtttgccttcagggagctctagtgagggagagagagccttactccatcacacagtcagaaaagctaagaaaacaaagcagagtccagggcctgaatgaagccggggtgggattcacatggcgtcagggacaacaggctcctggcaggaaagcagggatgtccccaagcagcctcagggcagggcagtgcagccgaacaggactgagcgaggggagagaaagggggtgggatatgagaggtggtggggacctcatgacagaggacggagggctctcagccctgtgggaagcctctgccgggtcaggacctcagggaagattctgtaaatccaccctggccgcagggttagggaggcggcagggagactggaggatgcagttgagtggttgatgactgtgtggggcggtgctggataattcaggttggcccgaaagacttgcgggtgagttggatgtgagatttaaaaggaagcgggttgcccggcatagctcctggaatttgggcctgggcaacaggaagggcggaactgctgttccctggactgggaaggtggggcaggagctggctgggtctggggtaggctacaaagagccgtgctgcagactcgccaggtgcacaagcacgttagataccaagggacactgtcaggtggtgcagtatgagctgggaattcagagaagaggctatgctgagatgtaagtgaggggagcacagcaatgggagttcctgtcctg

SEQ ID NO: 17722 - DNA, 827 bp, Artificial sequence
  DNA replication origin
ggctgggtctggggtaggctacaaagagccgtgctgcagactcgccaggtgcacaagcacgttagataccaagggacactgtcaggtggtgcagtatgagctgggaattcagagaagaggctatgctgagatgtaagtgaggggagcacagcaatgggagttcctgtcctgcgctggaggaggcacctggcggggggccatggaggacagagccttgaaacacccaaccattagaaggtgggaaggtgcaagcctggccaacatggtgaaaccccgtctctactaaaaatacaaaaattagctgggtgtggtgcatgcacctgtagtcccagctacttgggaggctgaggcaggagaatcatttgaacccgggaggcggaggttgcagtgagccaagatctcgccactgcattccagcctgcagacagattgagactccatctaaaaaaaaaaaaaagaaagaaaagaaagtgggaaggcggtgaggcccagcacagcacagagcctggggaggagcagccagggagggacgagggcacgcaaggcaggggcatgcaccatccagaggaagcgaggcttccagggtagagggaggagagtctgtgccgggtgtcgctggttccctccagtcagatgaaggctggcattgccaccgttgcgtttgatgacgaggaagtcgctggtgagcttgcccagagctgtgtggaggagcagcctggagagatgggatgtggacattcatctctgcaaaggaggacagagaggtggggcgtggctgcaggggatgaaaggaaagacatttctttggtgaagatgggcaaaaacgg

SEQ ID NO: 17723 - DNA, 1269 bp, Artificial sequence
  DNA replication origin
agcacagagcctggggaggagcagccagggagggacgagggcacgcaaggcaggggcatgcaccatccagaggaagcgaggcttccagggtagagggaggagagtctgtgccgggtgtcgctggttccctccagtcagatgaaggctggcattgccaccgttgcgtttgatgacgaggaagtcgctggtgagcttgcccagagctgtgtggaggagcagcctggagagatgggatgtggacattcatctctgcaaaggaggacagagaggtggggcgtggctgcaggggatgaaaggaaagacatttctttggtgaagatgggcaaaaacggcaacatgttttcgacgagaggacaggtgtggggagacagagcagggagggggcaagctcccgggcccacggaatggtggtcctgcatgggggcagagatgattcacctcctgcaaggagcaaggcagggccaggcaggagtctgggtggtggatcttgtgatgggagctgagagttgggctgggccttcctcggtgcagtgagaatcatgtcatctgccgggggagaggtgtgaggaggagggccaaggggcaggggagaggtgtgaggaggagggccaaggggcaggggagaggtgtgaggaggagggccaaggggcaggggagaggtgtgaggaggagggccaaggggcaggggagaggtgtgaggaggaggacggaggggcaggggagaggtgggaggaggagggccgaggagcaggggagaaagagttagagcccctccaagggagttggggctgtgggcagggggaggcagagacaggatttcaggactcccttgggctgggaggtcatgaattcaaacagggaccagtccacaaggcggtgtgatttccctggccctgctcagctgtcagggagcagggaggggtggacagagagttgggtgtcgccaggaagacaggaggatgggcaacgccagggaactgagagcacaggagagacttctggaggaatcacagctggacaagcagggaagtgacgagggggagaccacggagcagggtttggtgctgcctgccccggctgaacaccggcaagtgcacgactgactcccgtgaacatcaaatgtgctcctaggctgcaaggatttagtgagagaatggcataagctcagcgcgtgcccaacacacagtggggctgagaactccaaaccacccaggtggtcccagaagcagagctggccaccctttccttgcttgacggcttccaaacaga

SEQ ID NO: 17724 - DNA, 1318 bp, Artificial sequence
  DNA replication origin
cggccggcggctgcgtggacgcggacgcgctccggctctggccccggctccgctggctccggcggcggcgcctggctcgtgtccccacgcctggattcagcacccggagcgggcggcgcgcgggctctgctgcgcgaagcctccgctctgcatatttatcgcgtcccggttccggcgcgtctgcctccgggcagggctgggcagggctgggctgggcgggagctgcgccctcctctctcctcgcctcctaatggctcccccgcgcgcctggcattggcggagagaggcgcgccctgcggagcacgaacgcgcgctgggctgcggtgggtgccaaaagtttgctcggaaggggcgggggcgggggtggcgcagagggacccgcgcgcctcgctctctcccggggaggagggcggcggccggcggggaagcaggctgggacaggatgtgacatcaaaaaggcgggggaaattgaactgggatagagaactccatcctggccggcctgagccctcgcgggctccaggtcccgggaatggggacagaggggttgcccgcgctggggacctgggcccctggacagggagtgggccgaagattggggggggggaatgacagctgggagtgggagggatgggatgttaagtcttgatgtctatggagtgacaggagataaaagctgaatgggtccttaaaattcacccttcaatgaggtaaactgaggctgggtcaggaaggatgtttccaggaggaggggtcagggaggaagccagggttagaaccctggtcacctggcacgcagccctgatgagtggggaggtcagcaaaggggtggaagcaggaacaagcattgggtgctgggctcctgtccccagacagggcatgtggacgagagtctgtctgtgtgctcctgggggtggatacgacgtgcctgtaaggggccctgtcatcgtgtgttaggttgtgacacagctctgccctccccaggtgccttttctgaaccaggaacctaagagaggagctctcccaccagggccggggacttccagaacccccttggctctgcccgtcctggtgccctccttccctggccctggtgggagagctcctcttaggttcctggttcagaaaaggcacctggggagggcagagctgtgtcacaacctaacacacgatgacagggcctcttataggcacgtgccaggaccacagggccccttacaggcaggtgcgtatccacccccaggactcccttggctccgcccttcctggtgccctcctcccctttcctccctctctatgtcccctctccctccaccct

SEQ ID NO: 17725 - DNA, 1842 bp, Artificial sequence
  DNA replication origin
accgggacgcgataaatatgcagagcggaggcttcgcgcagcagagcccgcgcgccgcccgctccgggtgctgaatccaggcgtggggacacgagccaggcgccgccgccggagccagcggagccggggccagagccggagcgcgtccgcgtccacgcagccgccggccggccagcacccagggccctgcatgccaggtcgttggaggtggcagcgagacatgcacccggcccggaagctcctcagcctcctcttcctcatcctgatgggcactgaactcactcaagtacgtgcatccaacgccattttcctccctgccaggcgcccggcccggcccctcgggagccccacaaagtccgggaacggctctggctccgcgccgccccgcgcccccggcctgggcgcccgaagtgccggggttggggagggggccagggcgctaggctggacctgggtgggagggaggggtgcaggctgaccggagacggcgctcctccagccccggctcagcagagctgacagctgccccctttttcctaggactccgctgcccccgactccctgctgagaagttcaaagggcagcacgagggggtctttggctgctattgtcatctggagggggaagagtgagagccggatagccaagaccccaggcattttcagaggtggcgggaccttagtcctacccccaacacacacccctgagtggctcatcctccctttgggcataacgctgcccttgggggctccagaaacaggcggtggggattgtgccgctgagacctggaagggcagccagcgtgccggccagctgtgtgcattgctggcttaatatgcagggcttggggggctgtggccacatgcccggcaggaggtgagtgaggagccctgtggcgtgctggtgtggggatcgtgggcatttcaaacgggcttgtcgtaccctgaacaatgtatcaatagagaaaggtctctgcttggtattctccattttaaagatgcatattggagctggcaggtcttgggggaggagaagggctgtctgtgagcgccgaactgggagggttgctttggcactatggtgctcggaagagcctgccagccgagggagccgggctgcttgggagtgacattaaaatgccctttcaatgatgccactgtgccacgctctgaactgggagactctggccctttggagttgcaagtccaggaagtgatgggcagccagtaccttggccccaagccccagctgcccctgacccttctttccttcctcccttcctccatctccctcagaataaaagagaaaacaaagcagagaagatgggagggccagagagcgagaggaagaccacaggagagaagacactgaacgagcttcccttgttttgcctggaagcccacgctggctccctggctctgcccaggatgtgcagtccaaatcccaatccagcagtggggttatgtcgtcccgcttaccctcagagcccttctcctggtgctgcccagacgatcagccagtccctcctggagaggttctgcatggcctctaggagaggttttcttggccccaggaaggcctggtggagggtggtggttgtgcactgttgctggacagatgcattcattcatgtgcacacacacacacacacatgcacacacaggggagcagatacctgcagagaagagccaaccaggtcctgattagtggcaagctgccccacaaagggctatgcctgtgtcttattgagacaccttggcaaagagatggctgattctgggtggtcctggacatggccgcacccaagggccctccaagccttaatggcaccctgaagcctcc

SEQ ID NO: 17726 - DNA, 1076 bp, Artificial sequence
  DNA replication origin
ggaccgacgcaatccgcccaggaaatgggtggatttttcctctcgctcggctccccgccgccccctggctgctggcagcgaggtctgcaaactccagtccgcccaggagttgggatcagggtgacatgaggagacggacacaccaccacccccagatcataaaatacccggcggcggcgcggggactccagctgggggcacggcccgcggccctcccgtcccggggcttctcccatcctcacgccggggcatccctctccgatccccgcagagggtccgctttggggcaaaggttgccggcagagagacggcgccgtcctgcctactggagcccttttccgcggtgattcgagggtcccagccagcctgggccgtcgcctgaaacccagcaggcagggcaggctccgaaaagcagccagactcgcgagggcctccagcgccaggggggcgtcggggcatcggtggagagctaaaggcgcccctgcgatcccagggcagccgcggtgccctaaggccttgcttgggaggaagggagccaaccggcactcctgacacctgcacagcaaggcgggggctggggtggtctgccgtggcccgcggtgcgcagtgagggccctgggagggcgcacacccggcaggagctgcataaggtctggggctcaggcctggacctcaggagctgaagggaccacgcccatgaacctggtgttggggaggtgggtgtgtggggcggggactggggtctgtggtggaggggtgtgggttggggggtgtccttactgactcaggggtggcgctcgagtcatggcgcccaggcacagaggcagggcaagtggcgcacgctgcccctcttcccggccctctgcggcgaccgcagcaggactcacgcgtgtcagtcccacctgaagcgcaggcctgactgggtcaaacacgttaatagggcttttgcatttacagaaggcttctaatcggagatgaaagccacttcctccggggccttccattaagctttcccagccatttgggaaggaaagaatcctccagatcactcactacactcttctctgcctgggcga

SEQ ID NO: 17727 - DNA, 929 bp, Artificial sequence
  DNA replication origin
ttcacaaatattttgagtggagacaaaccaggaaagagtcaaaatggggcctgcaagctagccaagccttggtgctggtgtgagcacacaggcatgtacacacacacacacacacacaaacacacacacatacaaactcacacactctgcgcagactcaccttctccagtagctgcctcagctgttttgtgcgggcatcccgtgaacacatggtctgctgtggagcgaccactgtgcagatacacctgccctcgctgtcctgggcagagctgtacacctgccagctctcctcagggttggtgggcagcacctggagaggggcggggcgggaagggagagggaaggagagaaagggagaccatgaggttgtgtatcagagccaacaaccaggggaaactgtccacatccacccccaaggaaaagatgggaggaaatggtcccaagacatgtttgacccaaagggaagaaagggtccctgggaacaaagaggcacaggtctcctgttagggggctcagggctggaaggatgtcaaagaggcaagaccctttacgttcttaaaatttaagttcaactcaagggatgtctggagtttgtcgtctggccaaattgatctgctgggtggatgggaggggcaactggaggccacaggctggactaggagcaaggcaggaaagcaaacgctgggtggcttgcagcgggcacgtatttcagaaacaggatatccttcccgtaagtcaagcacgggtggctggcaccaccaagcctcgccctgccgttccctgacacttgcagacgaagcacccactgtaacagccccagatccagcagcctattcgcccagagctgtgatgaaccccgagctacagcaacctcccagccggcagcgtggcacagaccgacccgagaaaacactaggtttccagctcct

SEQ ID NO: 17728 - DNA, 1117 bp, Artificial sequence
  DNA replication origin
cctgagtctccagttcttggatatgaaaccagcagctaatttagcccactcaagtgcaataaaatcacagacaaatgcggcggcctcttcgggcccttaccgattctttatatacaggctgagactaatctaaaaggtgattttctggataaaaccatgcgattcttagaccccttcaccttctcttgctcccctcactagcacaggcttttgggggagccattttcctcaaaggaagcaaaaagaaacacacgagtttaacgccaagagagtttctgtggacactgaggtggggtgagggctggggatactggggatcccatcagagtgctccagcactggctgctgtgtgtcccttaatgggccttaggtttcaaatctgtaaaacgggattcacataggacccacccctggggacctttgagagcaggccctgagccaaccctgaaaaagcaaaacggccgggggtgacacagggtcccagggctggggcagtgaggtggggacaatagggtgccagggctggggaagtggggtggggatggcagggggtaacacagggtccctgggctgggacagtggggtggggatggtgggaggtgacatggggtgcttgggctggggcagtggggtggggatagcagggggtaacacggggtccctgggctgggacagtggggtgggtatggtgggaggtgacatggggtgcttgggctggggcagtggggtggggatggcagggggtaacacagagtccctgggctgggacaatggggccgggatggtgggaagtgacacggggtgcttgggctggggcagtgggtggggaggacaggggtcttgactggtgggcaccaagcctccgtggggatggtggtgggaatgcaggggcagtgaggtgtggccctgggggctgctgacttctcgtggctccttgtcacccccatttgctgagcatggggtgctgggctgcaggctgagccctcgtgttcattacctcctctcatcactacagcaagcgccatttctcatattggaaaactaaggctgggagtagtcaggtgactgccactgggcctcagagggccaggcaggctgtgcctaaccaccttgctgt

SEQ ID NO: 17729 - DNA, 1558 bp, Artificial sequence
  DNA replication origin
ggacggcgtgcagggagctggagtgtgggtcggggtcgcctgcctgggacgggacggctgaagcccgtggctgtctccacatggcttccccttctgagtagctgggtcactgttcaaaggtctagggcccttcccttccgccactctgtgtcctgttcatggggctcctgccgtgtggaaggtcccaggtgggagctgtccgcccagcacagggaggaaggagcccctgcccttgtaaacggccaggggccccatggttctgtggctgccaggataggctgacggctggtggatcggggccataggtatccgttcatccactcttcagctcagttaaccaaataaccatgaatcaccatttgttcctgatgccattttgggcctgggaacacgttggtgaccaagacagcaaggcctgggcctcatgtacaggagggggagtggaaagggcaggtcagcggatgacaatgtcaggggtggtgagtgacaggaaagcagtggcagggagaggttgacagtgccggagagaggaggcagctgcaggagcatcttcgggacatcaccagggagtgagtccaggaagagtcggcccccgcaagacttcacccgagactagcaggacagagcagaggtgataatgggcagtcagggcctgaggggggtgcctttccatctgctctgactttcacattgaggcgtgagtcgaggtcagggtcagatgaaggggaggggccagggcatgtaggagggcttgcagggagcaggtataagcccgtcagtttgaagggtgggaaaccggttccctaggactgcgcagggtgggaagttcctgccagtcaacagaggaagggagcgagggggtcagggagatggtgctgggcaagtgggagtgaggggcactacctcaggggccatggaaatccagtggggcgaggcagaggtgggcaaggacaaggggcaggcaggaattaagagtgagaatgcggctgcagccaggaagtgaggtctgcgcgcagccagggactggagcactccatcaggcgagctggagagaagggggcttggaaccaggattcgggaggaggagctgctgccagggctgacagggtcaagggcatggcccaccaggagggtggctcgggtgggggacaagctggtaggcagggccaaggagctgagaggctacacgggagggagctgacccacaggaccaggacagggggcttggaggaggcgagcagaggagctggggctttgcacagggtgaggagagagggctcgaccatatgggaaagggaggaaccacccatgggcatggaaaacagccttccctggagagcctgcggaagcaaggcctcacctctccacacagccaggtgtcagagcgggctggagggcactcagaaggtggtgttcgtgggtgcagatttgcactgaagggcctcacagcagggtgcagggagggtgactggggttcaggtgggagcagtgtgcacggggcagaggtctcatggagaccccaggggagccagggtcagagccacgccctcttgcccat

SEQ ID NO: 17730 - DNA, 2809 bp, Artificial sequence
  DNA replication origin
actcagattgacctcccacagtgggccaggcccttgtccctgcctcacacggttggtacagtgcagatacagtacagtaccgggcttggcccctgcaatggctgagaaatatatgctctgtgaagattcacaacgaccgccccccaaacccagggacgacttcatctcctttggtcggagtatgcctccttgaaaagatggaggctgagcctctcttttggtcagaatgcctccttgaaaagatggaggctgaggctctcttcgtgagtgggtggaggaagaataaggactggggaacggaggagtcaagggcccaggcacagaccagccgggaacgtcagaggagggaggacggctctgctcatgcttctgggactatctatagagtccgtggatggcagcccgggacacagacttcatcccagctccaggggatccacagaagcctttacagtaggaagtgaggtccagggtgtaccttagccgggctaacacagccacagtggaggggaattactgaaagatgtaagtaaggccggtcaagagatggagaccagtgaggggctcctgcctgagggagagataaggatgggcctccgccatgagggagtagtggggtgtggcatgatggggggtgtggcatgggggtgtgatgtggcatggtggagggtgtggcatgggggtgaggtgtggcatggtggagggtgtggcatgggggtgaggtgtggcatggtggagggtgtggcatgggggtgaggtgtggcatgggggtgaggtgtggcatggtggagggtgtggcgtgacatgatgggggctgtggcatggggtgtggtgtggcgtggtgggggtgtggtgtggcgtggtggggggtgtggcatggggtgtggtgtggcatggtggggggtgtggcatggggtgtggcatggtggggggtgtggcatgggggtgaggtgtggcatggtggagggtgtggcatgggggtgaggtgtggcatggtggggggtgtggcatgggggtgaggtgtggcatggtgggggtgtggtgtgacataatgggggtgtggcatggggtgtgatgtggcttggtggggggtgtggtgcagtgtggtggggtgtgtgacacgggggtgtggggtgtggtgtggcgtgacggggtgtggcgtggtgtagatgtggtgtggcatagtgggggtgtggtgtggtggcgatgtgtgtggcatagtgggggtgtggcatggtggaggtgaggtgtggcataatgggggtttggtgtggtgtgacaggggcctggtgtcacagagcttggcatagcagtgggcagatcttgaagtggcgagggtatatgatatgatgtagtgggggagtgacagagtgcaaccaggggatggggaatgtggcatggggtgtggcagggcacagtaggggcatggtaaaggcatggcatggtgggggcttggtgtgtgtggcataggtgtgacatggtaggtgcggcacagtggggggtggcaggtgtggcaagggcgtgactcagtaggcatgccacgatggggtttgggggtgtggcaagggtgtgacctaggtgtggcatggtggggacatagcaggtgtggggtgagtgtgacatggcaggtgtggcacagtgggggcatggcaggcgtgtgcagaaggatggtggcatagtgggcatgcggcaagtgtgtcatgggtcatgcctcacggaggagacagctgaggtcaaggcacaggggcagggcggggtcgcaccctcctttcctctctgccacagcatctcagctctcccaactgtggccctgcctgagaagcctccaggggaggaaaggacccactgcttgcttgggagaggagagctttgatttgctgaagagctttttaccacctgacaaggagagtggtcccagcactcatagatctttagcccaagattctgaaaaaaaaaaaaaaaaaaaaaaacagaaaatcaaggacctactgacagatggtgcaaaatcatgctcagagtctgtgagcacgttgaactttgggtcaacgagcactgatggtctttcctggtgccctaagaaactgcatttcaaaaggaaagatgggcaaaaacgccagtgcccaagaagggagttgcttctgctcaaggagtggggttgctgagtgctatgtggagatcgggggaaggggaaactcaataagttaggcctggggggatcaaggaaggttccagagaggagcccacgtaggaagtggcttctgctgtagaagtggggttgctgagtactgtgtggagctcaggggaagggggaactcagtgagttaagcctgggaggatcaaagaaggttccagagaggaagggaaccatggatggtcttggaggagggattttcaggagggtggaagggcacttacaaaggcccaggggaacaactcactttggggaataggtatgcagatgggtgggggtggggtgtcgggggctgcagaggggccttggggagcatcacagaacatgtgggcagcacaggcatggcctgtgggtgctgcagagtcttggagggtctcaggcaggggactggggccttgaaccccgctctggcagttgtgtgaactgtggtggatggaagaggagaggaacgtgacccactgtgggagacagtgcgggggctgcagcaccacccagaccctgcctcacccggctgcgagcagtggcgccctaacccacagccctacctccccgccgctcctcggagctctctgctctcccgaggtttctgttcatcgctgcttctggcttctgcaactg

SEQ ID NO: 17731 - DNA, 1003 bp, Artificial sequence
  DNA replication origin
gggaggggaagtgggaagaagaagagggaaggggaaatgggaggggaatgggaggggaaatggggatgggaaacgggaaggagaaatgggaaggggaaatgggaaggggaagagggaaggggaaatgggaagggaaatgggaggggaaatgggaaggggaaatgggaaggggaatgggaggggaaatgggaaggggaagagggaaggggaaatgggaggggaaatgggaggggaaatgggaaggggaaatgggaaggggaaagggaggggaaatgggaaggagaaatgggaaggggaagagggaaggggaaatgggaggggaagagggaaggggaaatgggaggagaaatgggagaggaaacgaggaggggaaatgggaagggaaatgggaggggaaatgggaaggggaagagggaaggggaaatgggaggggaagagggaaggggaaatgggaggagaaatgggagaggaaacgaggaggggaaatgggaagggaaatgggaggggaaatgggaaggggaaatgggaaggggaagagggaaggggaaatgggaaggggaactgggaagggaaatgggaaggggaagagagaaggggaatgtgaaggggaaatgggaaggggaagggcacattaagagccagaacggttggagactttccctgttctgccccacttctgagatgagtgagggcgtttgtgcaaggagcgagccttcgtcaccctggtttcccgccacttcagctactgagattctctgcagacccacgatggacatggagcacatctgggaatgaactggaatttctcaagctgcagggccttgggggctgtttgctgctgaccttgcttggcggatgcaatgagatgcctgcagatgagggcagccacaggtgttccggccgtgcttggcctcaccgactggctgagtgtgtgagagaagaatttcctgtgttccttggtcacagggccctcttctgtgggaagggacccacagagcatgct

SEQ ID NO: 17732 - DNA, 1628 bp, Artificial sequence
  DNA replication origin
aaactggagaagcttcaaaaagaataaaggaggtaccaacgtccagatcccaggcccagggaggaggaggcactagcgggtgggcagcagggctgggatagcaccccagcctcacgacccttgcagaggctgagccagagagccatgcagaagccttgtgggtccagatttgggttgatgggaagaggcaggcatgggtggttggtgaggaaggcagagtggtgcagggtgatgggcaacaggaagcctggtgggagcaagggtaggcctggagaccctgggcttcacccccatcccacagggcagtagaggagactgaggcccaggacacagagcaggtcagaggcccagtcacaccagaactcgggacatcgccctctaggacacagggggctctggtggggaccaggggctgcacaaggatggtagagggtcttgaacccagcccgagggccaagtggtctagggaaggaggtggttctgcaggagagagagggcatgtgtgtgtgtgtgaatgtgcatgagtgtgtgtgcgcatgtgagtgtgcattggtgtgtgaatgtgtgtgagttgcattggtgtgtgtgaatgtgtgagtgtgcattggtgtgtgtgaatgtgtgagtgtgcattggtgtgtgaatgtgtgtgcgtgtgagtgtgcattggtgtgtgagtgtgcattggtgtgtgtgaatgtgtgtgcaatggtgtgtgtgattgaatgcatgtgagtgtgcatgtgtgagcatgggtgtggatgtgtgtgtgaatgtgtgggtgtgcctgtgggtatgcatttgtgtgtgcatgtgaatgtgtgtgagtgtgcatctgtgagtgtgcatgtgtgcatgtgagtgagcatgtgtgtatgtgaatgtgtgtgactgttcagcagtgtgagaatctgtgaatgtgtgtgtatgtgagtgcatgtgtgagtgcaggtattttgtgtgcgtgtgtgaatgtatgtgggtgtgcatgtgtgtgcttgtgagagtgtgaacgtggatgtgattgtgtgagtgcatatgtgtgtacatgtgtgtatgtacgtgtgtatgtgagtatacctgactatgcatgtgtgagcatgtgtgggtatctgtgtatgcgtgtgaagatgagtgtgggtgtgagtgcatgtgtgaatgtgtgtgactgtgagtgcatgtgggtgtgtgagcatgtgtgtgtgcatgtgtttgtgtgtgagcacatgtgtgtgagcatgtatgtgcatgtggatgtgtatatgagtgtgcatgtgtgtatctgtgagtgtgtgagcacgtgggtgtgagcatgtgtgcacgggtgagcgtgcataggtgtgtgagtgtgtgtgtatgtgggtgtgagcatgtgtgtgagtgtgcatgagtgtgtgcatgtgtgtgagcgcatgtagatgtgtgagcgtgtgtgtgggtgagtgtgcatacaagtgtgtgtatgagtgtatgtgagcgtgtgtgggtgtgtgagcacatatgtgcatgtcagtgtgtgtgtgtgagtgtatgtgggtgtgtgagcatgtgtgtacgggtgagtgtgcccataagtaggtgcatgtgtgtgtgtgtgagtgcacgtgggtgtgggtgtgcatgtgagc

SEQ ID NO: 17733 - DNA, 1411 bp, Artificial sequence
  DNA replication origin
gctcacagtgacatggatggtctgcaaggaagatgccccttggtggctgcgtggcaggggagaatacggcagaagctgagtcgtggtgcatctttgaaagcccagagagtgctccacccgcctcaggtcccatcctgggattcctgggggaaaaaaatgcctggagttgggccgggccatgggcatccacgcaggggcatgcgttcacttccagtgccttcctcccagctggtggccaggaggccctggtgaacattcccactgcctgctcctggtttacacaagggaaaccacttgattgactctgagaggcgcggggaagcagagacctagatgacctgagagaagaaaccctgagagtatcagggacagcatattagcagagagcagtcctggggtggacgtgagctgtgcagctgggaggaagcaaggtggctgcaagaccagggtgtgcgcacggtgggagggaggcggccccaggtcaaatgtcagttcacaacagccaggaggggtctccatctcccaagggaactgaggacaggaaaggacaaagggaccagacacgactctggagaggggctggcagagggaaagagagcagtgacagcttgatgctcactcactttgcccaacttaacctcaacatggagacaggtggagggacggtgctcctgggatgcagacctgggtctgcctctccctccttgggacctggggcctcccacctgccctgtctgccctcgcttgcccatctggagtcaggaatgccagcgtgcagactcttgagggtttagaggcagcggggcgcccacacggtctgtcctctttcaacagcagctatggccccaggcccctcctcccgcagggaatggggccagaggctccacatggggcttctcatcatgcctgtgcccctgcgtgtgtctgtagtcaggacatcctgctcctcccagggcagagtggctgctgtcatatccaaagtggcattggctcctgcaagggctcacggggaaactgaggccacccaagacctgcctggagctcgtcgctcctctggcttggtagaccctaggggtccttgggcttttcctctcactctggagcagcagagcagagccccagctggtgggggcacctgtggcagaggaggcgggctgcctgcgccatccagcaggccagtgtggagtccagcatccatcaggccggtgtggagtccagcacccagcaggctggtatggaatccaggcccgtgggtgctttttcctgaactttgtattggaggatgacaccaaacagctgactggctagaaacagtgtccagttgcacagtggggtttgctcttacttttggccacgctacctggtggccatcggaggcaggtcccggaggtggccccatgagcgcttgatg

SEQ ID NO: 17734 - DNA, 1241 bp, Artificial sequence
  DNA replication origin
tttacaaagaggatttagaccccatctttgtcaccaatgtcacttgccaactctgcgtggaccacctgcgcgtgccaggctgggctggggcgtaggggtccctccgagaatgggatgtccgaggtccccactcacacaaaactcatgttctagcaagcgtgcagggcgaggggagctgataattaacacgcaaatgggaaaactcaacttgaatcactgccacgcagagaactctgccaacgtgaggctgagcgcacagggctgcattgtcagggcaggagtctccaaggaggagccatttgcgcagcatcgtgaatgtcaaggagacagttaaagccggggaggcgcgccctgggcacagagggtcctgagcgcaaacactccaaggggccacccagccctgcagggacagagaggaccccagggaggcctgggcaggccagaggcgggggctgcgcccaggtggagaggaggcagagggcaggaggggacggagcaggacttcggacggctgtgccggggctgggtcggggaggggaagattgaagggcaaggcctaatgttgagttgtgtcgctaggtggagggcagagcctcctacccaggtggggagcaggggggcagcgaggagccgggaggggtcaggagatctgttttggccacacggaattcatgcagatgcatgaatccaggtggaatcttccagtaggatccggacaccacacacctggagtccagcggaggagtcagtgcatagagaggctgtttcaagctgagggccggatcttgccctggggggagcatgtggagggggcagagaaaggcccaggacccaggggcctctgcaatggaggatgggaagagggggcagcgggagggggggatgcaggggctacagacacggtggccaatgtagagagaggggcatgtgagtgtggggtccgaagagcaaagagacggatggagggtggaccatggcgggcactgcaagaggccagggaggacatggacaggggtgtggacttggtcctggtaaacgctgctgttcctgctcccggcagaggcgtcccactggaggtgggaggagacaggctggggtgtgcgggggcaggtgggaagtgtgagccacaggaggctacggtgaaggcgtgtagtggcttccagacgaggcatggggtggggatgggcagcaggtggagctagcgcccttggccacccccagggcacccccagtgcagtggg

SEQ ID NO: 17735 - DNA, 1474 bp, Artificial sequence
  DNA replication origin
ctcactgcaacctctgcatcccgagttcaagccattctcctgcttcagcctcctgagtagctgggattacaggtgcccaccaccacacccggctcctttttgtatttttagtagagatggggtttcaccctgttaggttggtctcaaactcctgacctcaagtgatccgcccacctcagcctcacaaagtgctgggattacaggcgtgagccaccgcgcctggcccagaagtatttcttgggcacctatagggccaagctctgaagtggaaaaaggaagaagcaagtagtttggggccagaaagaccggtgttgggatctcgctcccctgccccacctccaccagctgctctgcctacaatttctcatctgcaaaatggttggagaaaggccttgcgtccgagggcgacggcggtggtgccgaccgcatggggcgacggcggtgatgccaaccgtatggggtgaccgaggtgatgccaaccgtatggggtgactgaggtgatgccgactgcatggggtgactgaggtgatgccgactgcatggggtgaccgaggtgatgcccactctatggggcgacagcagtggtgctgactgcatagggtgatggtggtgatgcccactgtatggggtgacggtggtgatgccgactgcatggggtgatggcagtgatgccaactgcgtggggtgaccgaggtgatgctgactgcatggggcgaccaaggtgatgccaactgcatggggtgacttcggtgatgcccactgtatggggtgacggtggtgatgccgaccgcatggggtgacggcggtgatgccgaccgtatggggtgacggcggtgatgcccactgtatggggtgacggcggtgatgccgaccgtatggggtgacggcggtgatgccgaccgtatggggtgacggcggtgatgcccactgtatggggtgacggtggtgatgccgaccgtatggggtgacttcggtgatgccgactgcatggggtgaccaaggtgatgctgactgcatggggtgacggcggtgatgccaactgtatggggtgacttcggtgatgccgactgcatggggtgacggtggtgatgccaactgtatggggtgacttcggtgatgccgactgcatggggcgacggcggtgatgccaaccatatggggtgacggtggtgatgctgaccgtatggggtgacggtggtgatgccgaccgtatggggtgacggtggtgatgccaactgtatggggtgacttcggtgatgctgtctgcatggggtgacagcggtgatgccgactgtatgtgggacactcggacactcctccccaggagctgcggggcaggtgctcatgatgttgtcacctctgcctggaggtgtgcacaggccacgtggagctgaaatgggcctctgtgtgctgctcagcatgaacagggatggaagaagtgctcagccagcccacgctacctctcccagcctca

SEQ ID NO: 17736 - DNA, 876 bp, Artificial sequence
  DNA replication origin
ggactgctgggcccacagacccttcttccttggggacgaacccagtggggacagggagagcaggagagaagctcagacagagagcggctgttgaggagctagaacgggacccaggagccgtgctgtcctcacgaatgctatgagtgatggctgtgttccagcatgctccatgctccagggtcctggctgcaggatgatggagcggggctgcctgggccctgctgcctgtgacagaggccaggctcccctcaggaacccccaaactcctagtgaggcttccagagggcctgtcctcacccgagaaacatccctgccggtcacaacaaaggagtcacgtcctgctccctgccttcagagcaccgggctcagttgccagtgtcggcaaccccacaggacggggcgtgtggaacggagctccatggaggcctgcacacagccccacgccacaacagcctgggcttgcagcttgtcacgccccataaagggtagaaagcaagtgcacaagggtccggaggaagcggacgcccctgccccagggaggcagaaggaatctcagaggagtccccacgggctgggcctggctcggggcagaacggggtgtgcagggcaggacgggtgtgcagggagcaagagatttgacactcgggtagcacaacatggagacagcagagactgaagatgctgtccgtgaagacgggagcatgccaccccagccaagagcacctgggccaccaggaagaagcaggcagggtcctcgcccgggaacctccgtggggagcatggccctgccagcctggattcctgactctgccccccagaacccgaagagtgcatttctgtggctttacctcaccagattcctgttagtttctttca

SEQ ID NO: 17737 - DNA, 850 bp, Artificial sequence
  DNA replication origin
aggcagtttctgagctccgagggcctggtcatgatgttttcctaccagggccccttgctggtgtttctttggccactgtccccacagctgtgattttatgaaagcgccacttctgctgggcagggtcggggggaggcggatgtgacttgggaagcagaggtcagagtcagagatgaactgaagatgctgccagctttgaggacggaggaaggggtctggagccaaggaatgcaggcacctccagaactggggaaggcgggattcaaattctccccgaaggcctcggagggagtgcctggatttaggccagtgagacccatttcagcctcgccctcttctctgtaatgtgaccactgcgtgctgtttgaagccaccaggtgttgggacctgttgcagctgcaatgggagcaggaggagggggatccgggggtccggagtgcaccaggagggggggcgtgtcacgtgacatggagggtggtggggccagatccgtggaccttgtcagatgtttccgagcagcaggtggcctgatacagattgaaggacagagggctggtttgccgactacacgtggcaagagtggaagcagggggccaatggggccatggctgcacccaggaaaaggggacgctggcggcctggcccaggggctgtggtgggctggtgggtgacgtgttttaaaggcctagctccgagggcaccttgaccaattgtctgtgtggcaggaggttggaggggttgggaggtttctgcaaggactcccagccctttgatgtgagcattccagagatgggacactagagcatgaaagagcaggactgagcgtggctatggggttgaaggaggatcc

SEQ ID NO: 17738 - DNA, 1162 bp, Artificial sequence
  DNA replication origin
catgcacgcacacacacacacacacacacccctccaaatcccatgaacacaacaaatcgtctcctatacacccttgtgtggaattagcacagcctgacatttggaaggctggatggatggataaatggagggtggatggaaggatggatggttggtaagatggaagaaaatggattagatggatgagtgaatggttggatggtgggtgggtagataaatgaagggtagatggatgagtggatgaatggatggtaggtggataggtggatggatggatggatggatggatggatggatgaatggatagacagatgatggagggttggtggatggatggtggattagtggatggatggatggatggatggatggatggatggatggtagatgagtggacagatggatggatgttggttgagtggatggatggatgatggagggtgagtggatggatggatggcagatggatggatggatggtggatgagtggatagatgatgatggagggtgggtggacagatggatggatggatggtggatgagtggatagatggatgatggagggtaggtggatggatggatggatggtggatgagtggatagatgaatgatggagggtgggtggatggatggatggtagatgaatggatagatggatgatggagggtgggtggatggatggatggatggatggtggttgagtggatggatggatgatggagggtgggtggatggatggatggatggtggatgagtggatggatggatgatggagggtgagtggagggatggagggctgatggatggatggatggtggatgagtggatagatggatggatggatggtggatgagtggatagatggatgatggagggtgtgtggatgggtggatggatggtggatgagtggatggatggatgacagaaagtggattgcgtgcactagacatattctgtcctaggccttctcaaagagtatgttgtctgcagggttagaagccttcaaaattcctcacaacaagaactagacgacagttagggcactgcctcatcagcctttgcctttggccacaggagcagcagtaggtttcttatcctgacatctctgttatctccttttgagtcagagatgcccccggcaattacagaagaccccccttgc

SEQ ID NO: 17739 - DNA, 793 bp, Artificial sequence
  DNA replication origin
cattgttcatggctgaaaaaaaaaagttaggaacaaattttaagcaaacaaactaaagctcatggggtaaagcagctgagaggggagcatctggaggggaggcttttcataattcatattttaaaacgccaggctcaccatccctccatgttctcatgtttaattaaaaacagtgaaacattaattgaagcatctcccagcctcctggctctgaggcacccaggaagtgagaaacgggtcagagcaacttcatgctgtggaagggccctaggctggggagaaggagccgtcagggcagttctcccagccaagacttggtggggccttcaggagatggaaagctggcctctcagggcagaccccctaacggcatcctgtggaagcccctccagcctcagacactgtgcacatgtatgtgcatgggggcacgtgtgtgcagtgtgtgcacatgcatatgtgtgagggtgtgtgtgcatgtgcgagtgtatacgtgtgtgcatgtgtgtgagggtgtgtgagaggatgcacgtgtgtgcatgtgcgtgtgtgcacatgtgaagctgtgtgtgtgcgtgtgcgtgtgtgtgcacatgtgtggggtgcatgtgtgtgaggctgcatgtgtgtgaggctgcgtgtgtgtgaggctgtgtgtgcatatctatgagagtgaatgtgtacgtgtgtgcatgcgtgcatgaccatgtgggattgtggttgtgtgtgttcgttcatgtgcgtgtgtgggcgtgggtggtgtgtgtgcccaattccaattcccaactcgagctga

SEQ ID NO: 17740 - DNA, 2004 bp, Artificial sequence
  DNA replication origin
tgggtggccctgggaaggtggaacaacttgctagattgagtcctgccagggaggggggggcgggaggtgggaggagctgcagatggagagcagcagaaatgccacctggcgtccaggccctcccgagaggagcgaggggcttctccgtgtatctaaagggaacgtggcccagacaccagcaccctgcaccttgttgactgggagccgggtttcagtttccccacctgtgcttttcatctcaggggctggtggtgagaaaactgagcgtgccccagctttgtgccaccaccagcagctcctggagtgtgtttcctgggtcaggcctcccgggagagtctctaggatggagctgtcccaccgtgagacgctcgctggtggcctgggctgggggctggtgaggaccagccggggccagggcgctaggatcccatgacaaccggggcggggctcacacactggaacccaggtcctgtccttgccggacgctcgctcagcttggggggggcacagagatttgagaagctcacctcattctacccgatcttaacctcaccaagcccagggcctccatgaaaggaggatctccaaagaccattgtctttcctttagtcattcaacaaacatgtattgcgtgtctatctggtgcaggacccaaactacttgcctacatggagcagacattctagtgcggagggaagggtggcgggaagtaaatacactaaaggggaagataaggggacgcggtgacaggcaagagtgtaagacacggtgatgtgtacgagtcccgtctgctggctgggggctgctacttccaagtgcaggggctcaggtgtctttgtcaaggggtgacgtttgggttgacactcgaacagcaagaagacgtcaggagaaagcattcccagcagagcagaagccaggccgaaggctagcccccttccctgcctctctttctcgtaaggaatcaaggaggccttcaggagccgggaggcattgcctggcagtgagcaagcgcctgatgccttcctgagtcacaactcttcagagctggcttgaggaactcggcctggaagcagccgtgtactcatggacccctgtcgtgctctgctgtcctgtcctgcgctctgaatactctccggatactctcccagccatttctcactgaacagtgagataggagaaccgtgcaccttggtgggcgggtctggcccacagaggggtgtgttccttcactgagtgacagggtctgcagagtgccagggtgtgcttgccgggtgctggggcagggacacaacagtgcgctcaccgggcagcccaccaggagacgggcattaccaccctactccccaaactgcgagtcccggagcatctgactgattccagggtcaggagccccacccgggggaagtgactgtggctgagatcttggggatgggctgaccccctgggggaggagttctgggcacagggaacacggaagccgtgtctgactgtgggagtgggtacagtaaacatggaataaaggacccaaggggctgaggccaggacctgggggcaagaccggtggggttggcagaggacagcacatcctgagaagagtgccagcctccgacgacttccagcaggacagtggcaccatgaagcatgtatggtgacacattctctctgtgtggagggtgcattggagcaggtgggatgggagggggcagctgggcctaggggtgccggggggctggatggcagctggaggagggtgaagtctggactcgctgggtctttgggaggaggaggcagagccccggcccagagcctgcagggcggcctgagagcattctcctcgggcaggtgggagctgaagccgggtgtgacaggttggcctgagggtgaggccagaggaggaggtgccagggaggccccagggccaccaggggcatcatccaagcccagacctgagtgtgcttcttgaagggagtggccagtggtgaccccagggctgcagaggcgtgg

SEQ ID NO: 17741 - DNA, 1142 bp, Artificial sequence
  DNA replication origin
catagtctgtgttacagctggatttatacagtagtcaaagcaatgcctctcaccccaccagactctaggcagagtcttgtttggttgtgctggcttctctgtctcctggcatgtaatagctactcaattagtgcttgaggaatgaataagtgggtgggtgggtgggtggatggatggatggatggatggatgggtggatggaagaaaagaaggaaaaaagatgaatggatgggtggatggatggatggaagaaaagaaaagaaggaagaaagatggatcgacaggtggatggatgtatggaaggatgggtggatgggttggtgtgtgaatgaatggatgagtgggtggaagggtagatagatgggtgagtggattgaaggaaggaaagaaaagaaggaaggaagatagatggatggatgagtgggtgggtgggtgggtggatatgtgaatggatggatggatagaaggaaggaaagaaaagaagaaaggaagatggatggatgggtggatgtgtgggtgagtggatgaatgggttgatgggtaggtgggtgggtgaatggatggaagagtgggtgggtaggtggatgagtgaatgaatagtgggcaaatgggtagatggatagatggatgagtgggtggatgggtggataggtgaatggatgggtggatggatggatgactgggtggatgggtggatagatgaatgtgtggatggatgaatgggtggatgggtggatggctggatgggtggatggatgggtagatggatgaatggatggatgaatggatggatgagtgggtggatgggtggataggtgaatggatgggtggatggatggatgactgggtggatgggtggatagatgaatgtgtggatggatgaatgggtggatgggtggatggctggatgggtggatggatgggtagatggatgaatggatggatgaatggatggatgagtgggtggatgggtagataggtgaatggatgggtggatggatggatgagtgggtggatggatggatgagtgggtggatgggtggatgatgcatgtggagtgggtagatgggggataaatgcctaaagcaaaggtgctgattgtcagggcacacactaacaccagaagagtgaagagaaccaag

SEQ ID NO: 17742 - DNA, 1073 bp, Artificial sequence
  DNA replication origin
cctcccgtccggcgcttgagagacgtggtgtctggaaagtctgtcccatcccaggtgagtcacagcgaaggggccatgttggtgggaggcaggggatctggggaaagtggtactgccccaggaggggctgctgggaggggaggcaggggcgaggccctgtgcagaggcttctcccaccaggggagtcccagaagggcacagccacgccctccgatgccacgcctgcgcccacagaagccccgccttcctcccagctgcaggcgagtctgcatcctgggtcccatgggtgaggccccaaggagctgtggaggctgctgtggttgaccccggtggagccccacagccaccctgcccagaggccttcagcaactcctcagggaggagaggtgggggtggtgtggggcggggctgagcttggtgccctggggtccttggttctttcctcctcaggtgtcacctggtgcccctgcataggccccagggcccatcagtgcccagcagcacccagggacacacccagacatgtgggagcaacagggcctgggtggaggactgggggactggggtcttgccgggaaggtgcagggaaggagagagggaggcacggggcagacagggaaggggcggaagggtggggctggcgggcaatgggcactggagatggaggcaggctctgccagccacgagggcggggaaggtgaagtggagtcagcgtcctctgccagtgcctggaatcctgcaacctggaggcagccttgcgatgagctctgctgcaggcctgtggacgcgagccccactgcttcatggtcgcccactccctctgttagagtctgacctgagtccatttgtactggcagcttccacaacacccactgagacccacgccaacgcgccccgcccacgagaacccaggtcactcccgcttggtgactgcggaagaactttccgggtgtcacgttggtccagtcccaggtatagtccagacccagtgtctgggaatcagtgggcttcacaggcacacaccatggggtgtgcaccccaaagcaccgcagcttgtcacaagtcgggggacc

SEQ ID NO: 17743 - DNA, 734 bp, Artificial sequence
  DNA replication origin
gagcaagatggctcatgcctgcaatcccagcacttaaggaggctgaggcaagcggatgacttgaggtcaggagttcgagaccagcctggccaacatgggaaaccctgtctctactaaaaatataaaaattagccgggcgtggtggcgcatgcctgtaatcccaggtattcgggaggctgaggctggagaattgtttgaaattgggaggcggaggttgcagtgagccgagatggtgccacactgcactccagcctgggtgacagagcgagactctgtctcaaaaaaaaaaaaaaggacatgggaccaaagaatgggcagtgctcttgggggccaggggcggccaagtttaggagatagtgggggccggagagcaatctcccagaagaggaaggcgaacgatggtgaacatttctgggacagcaaaggcccgacccctccagggtccacgaattgccggcagccgtggccacgaggaccctgcctggggctctacatctggtgtcggttgcctattttttaaagttgtcggagagcggggggcacacaagagtgggaggggcttggggccttctgctgccagccctgatcgagaagtgggtacggcacccccaccccctcatgcgtcgtttagcaggggtgatggctggatttgcagagggaagttaggagttttcagggagcctggcagattttgttcaaggaaagagccatcaatcagggacgtagtttagggc

SEQ ID NO: 17744 - DNA, 1113 bp, Artificial sequence
  DNA replication origin
tctggcaggatgagagcagagcagttgggagcttccgtggagggcagcctgacctggcagatcactgaaggtgataattagaggctcaggctcacagctgcattagaaaagctaggaagcacaaagggcctcggcagggaaggccattagtcaccggcctaactgccctggccgggtctggttgacctgggcgaggacctggctatgcccatgtggctccaacttgtggatgctgcctctgtgggtgggcggcgggacaggctcaccccactggtgctggggcagtggggccagccaggcctcaccagcacatggacacctccctcctccctactgaagagctcgtggggtggagggcggcatcccgctctcccccttccttgtggagggacgtgaagggaggctgtgttggccacaggtcctccctgtggcccactcctggcccctccactggccaggctcctcttgttcccaggctggaactcctggcccgtgtggtcttgctgttccaggatggaatcgtcccatttctaaggggtacctgagaggagatagggcagggccagagaactggccatgaacagtgggaccctgtgggacaatggaaaatcaacaccctccaatgcgttggggacaagatttcccaacacatgcacccccagccttccctcccaggatggccctctgtggggagttttgggcttggtagtctggctgctggtgggtgagggggtgtggggagagggcaggagaggtggggaggaggcaggatgccagaggctggcgtggggctggtctctcggactcgtgtcacgaagcacctggatgtaggcacagaggccacaaaaccacacaaggccgaatgcccaaggggctgagagagcgggcggcggggactcaggctcggggagggagattttggtggcttcagagggcaggggactctggaacgtatgtggggtgtgcaagaagaaacagaaaagtccaagcactttgtggagtctctgtgctccacgaatcaagtagattcgtgtttttaaagaagcctagataaagaccaggatttctttgatgagtgcatttcggcggttggactgtaggtctttgaactgg

SEQ ID NO: 17745 - DNA, 1182 bp, Artificial sequence
  DNA replication origin
ccatgggcagagctagtttcacccaggagacaaggcctccaatatcttggctttgctgtctgtcctccaggaagccccacccctccacatgacacaacctccttgaccctcttagcactcagtgctgctgtcagccaacccttctccatgtggacggatgcagccactttgcttgtctttcaccccagcagactgtggctctgtgagggcagaaactagacctggctctttccctttgaatcttttcctcccagcccccagctctagactggtgtgtttgagttattccagggaaacatgtgcagaaggaggggatgcaattgtggatgggtgggtggatggatggatggatggatagaaaggtgggtggatgcatgtatgcatgcacaagtgaatggatgcttagatggatgggtggatggatggatggatggatggatggatggatggatggatggaagggtgggtggatggatgggtggtggatggaagggtggatggatgagtggatggatggatagaaaggtgagtggatgcatgtatgcatgcagaagtgaatggatgcttggatggatggaagggtgggtgaatgagggggtggatgggtggtggatggatggatggatggatggtggatgaatggtggatgggtggatggaagggtggatggatgagtgggtgaaagggtagatggatgagcagtggaaggacagacagaaaggtgggtggatgcatgtttgcatgcacaagttaatggatgcttagattgatgcatggatgggtggtggatggatggatagaaaggtgggtggatgcgtgtacgcatgcacaggtgaatggatggatgcatggatgggtgtgtggatggatgggatggagaaggggtgaatggacaggtggatggttgctcagaacataagcagagggactgtgtactgtgcagaggagcaagaggtacacagaggcagggtctgggcctggagccaagacgggaggcctaaggacaacaagcccagagaagcaagacatgcgccaagcagagccaagagccaggagtaattaagcctgcgtgcacagccctggagccccagcagccctgtcttcattaagatgctgaccagggaaatctcatcagagatagaaattctggcttgagctgcttccagccctggccctgtcacc

SEQ ID NO: 17746 - DNA, 883 bp, Artificial sequence
  DNA replication origin
agcttagaggccctgcaagggcctcttcaaggacccttcttctggaagcagaaggccctccgtggggaggggtcactgtcatccccgaatccggctggaccctgtgggctggaggtggccacgccgggtggccctgtggcctgtcccctaagagaggcagtgaagcctgctgtgcaacgcaggggcctctcggatcaggcaggcagtcccggtgcagcgtgggagccgggccgcagacctcccgacctgcgtggggttggaggctgccgggcagctctagcgggggttctggggaaccagccacctctccagcgactgcaccaccaggtctgcgccagtggcttcatgtatttaggtccctgtgctgtggagtgaattatgtccccgggttcagaccttggctcccagaccctgtgtggctatttggagacagggcctttggaggtgatgcagctcagtgaggttgtaagggtgggccccgatctgacagcgttaatgaccttctcggaagaggaggggaggccagagctctccccctgcgcatcccgggaaaggctgcgtgaggacgcagtggggcagccgtgagtctgcaatcgtgggtctcaccagacctggaaccagctggccccttcatctaggacctcccggcctccagaacggtcagaactgaatgtttaaggccctggtctgtggcgttttgttgtggcagtctgcgctgactgagaaagaatcttccagaaagaacctcgggcagctgagtcagtcaaattacctcagtttccccacagccgagaaggaccccaccccaccattcagagctgcttttagcatctgacactttgtgccccgcggatattcctgcattacttcggatctgaacacc

SEQ ID NO: 17747 - DNA, 1022 bp, Artificial sequence
  DNA replication origin
atatgagtttttaggcagaaaacagcatccatgtcaggctgttcaaattgtaagcttttggacagccatcagtcaaataaagtcaaatattggcttctgtgtaacaaaccaccccaagctgaattgggtaagatgaagcagccactatttcattatgctggcggagctggaggtcaggaattcacgcaggacgcaatggagtggctttgattctgttccatgttgtctggggtcaaatgggacggtgccaacactaaggggacttgaagctggaccatcacatatgtgcgctgagccgggctcagtggtgactgtccaccaaagcacgagctcgtggcctcctgtgtggcttgggtttctcccagcatgatgaccaggctcggaaagggagcttcttgagtcggagtgtcaggtgaggccactggcctgtgctgtccagtctccaaacacacctggcctcactgccactgcctgccattgaaagcagtcacagctggtccaggtttggcagtgggggtaaggggtagagaccccacctctcaatgggaagagggtcagtgtgggtaaggggtagagaccccacctctcaatgggaagagggtcagtgtgggtaaggggtagagaccccacctctcaatgggaagagggtcagtgtgggtaaggggtagagaccccacctctcaatgggaagagggtcagtgtgggtaaggggtggagaccccacctctcaatgggaagagggtcagtgtgggtaaggggtggagaccccacctctcgatgggaagagggtcagtgtgggtagggggtacagaccccacgtcttgatgggaagaggggcagtgggggtggggggtagagaccccacgtcttgatgggaagaggggcaaggacttggggccatgttatcgtttttagaggtgaggtctcgctgtgttgcccaggctgaatttgtttttgtttgtttttgagatgcagtctcactctgtcgcccaggctggagtgcagtggtgcgatctcgactc

SEQ ID NO: 17748 - DNA, 1031 bp, Artificial sequence
  DNA replication origin
cttgaaagtcttcccagttttgttttataaaaggtccagggtgtgtgcccgaggctggcggtggcccgggtgtgctcagcatccccgggcggcggggaacgggcagacccgactggatcctccctcagcgcccactcgtggaaggggcagatggtgcgcaggggcaccgcgctgcttctgtaagccccctgggccctgatccacacgtgtctgggagatgaatttgtgggttcggttcctgtctagaaagtgtcagagatttgataggatcaaaatcagagacttgccttggaggggtgcttctagtcatgccagcctgggaagctggagggccagttttgggtcaggaaacccattaaagaattgttttaatgccttcgtgaattttttcaaaaagcaattttttttttctcatgaaataatactctttcattaccaaactttggggagatgatctaattaataaggtgacttcccagagacatgggctgttaaggttttggcatgctgcttcacagtttttaaaacagtgctgtggtgaacagctttcatgatgcctccttagagcggctctgagcatttcctgcgggcaaatccctagaagaggccggcgggccaaagactatgctgcattttgccaaaatgccctccagaaatgcggggccagcctgccgtccacccactggtgagcgggcatgcccgcttgcctgtcctcttgccagccctgagatatgtcattgcgttatgtctttggcagtctgataggcgaaacagcccttttcatcacttgaatcctaatttctttgactgctggtgatgttgaacatcttttcattttattattggccatttggaatattgcctgtctgtgttctttgcccattttttatttttctgttgggctgtgtgtctttttcttagggattctaagagcttgttaccgtaaggaatttagctcttctctgtgctgtatgctactctgtacaagagcgtaaatgcaatgtatggtcgggcgcggcggctcacccctg

SEQ ID NO: 17749 - DNA, 960 bp, Artificial sequence
  DNA replication origin
tcatgggaatggcacggccgagttccgggggaggcgcgcggcccggccggacccccgcccgcgagagcgcgcccacctgccgccgcgcccgcgccccggggacgcccccgccccgccccgcccggttcggacgcggccccctccgcggggtgcggggcgaaggcgcttgggccgggccgagccccgtgctgcccgcctcccgtaccgcggccacctccggggggcgcgcagggggcgcggggtcgccgggaagttctgggcgcggggggcgtggccgtgggaaagcgctcggagccgcgggaagggagcgtgcggggccccggcgccaaccgagttcctccccgaagttcacgcggggctccgggctgagaccggcccgcccgcccctccagccccacagccttgggccggggtcgggggcggcccccgcgtgtccccgcggctgccccacccgagcttgcggcggggagtggacgcacgacctgcccggggcggcggctcctcgagcacacctgccgccaggttcgggggagggaacagtttctaggaactgccccggaccttgaggccgctgctgtttctgcttctgctgtgcactgaccatgtgaccttgaaagtcttcccagttttgttttataaaaggtccagggtgtgtgcccgaggctggcggtggcccgggtgtgctcagcatccccgggcggcggggaacgggcagacccgactggatcctccctcagcgcccactcgtggaaggggcagatggtgcgcaggggcaccgcgctgcttctgtaagccccctgggccctgatccacacgtgtctgggagatgaatttgtgggttcggttcctgtctagaaagtgtcagagatttgataggatcaaaatcagagacttgccttggaggggtgcttctagtcatgccagcctgggaagctggagggccagttttgggtcaggaaa

SEQ ID NO: 17750 - DNA, 1391 bp, Artificial sequence
  DNA replication origin
cggcgcgccgtgcaggccgcggcgggcgggcggcgggggctccccgaggcaggcggacggggatcggcgccggggctgctccgttccccgggcggggatcctgtctctggcctccgtgcgactctcggcccgcgcgccccgcgctcctggagccccaggtgaggcgcaggtgagggcccgcggtggggagctttggcccggcccggggcggccgctgccctccgagaatggccgcggcccggccggcctggagactgcggttcacgccctgcgccaggcggagcttccgggagggtggccgctctcccgggccccaagctcgctagtcctcggatcccagaaacataactccgggggtgcagacctgcttggaggcccggcctcttccctgggaggcgttcactcccgccgggccgaggaccaggtcgccgatcccagcggctagggtgagcgcgccctcggggaggggagctcccttgggggaccctgcccagcccgcaggccgtgagtagcccaagcttgggagtcaggggaggtcgggccggggcagccgggaggggctcaccttgccttcagttcccaagcacaggaaatggcggtgcagctttgctgggggacgcttgtagtgaggttgtaaaattgcagcttctggaaggctgggagctgaattctagcccacgcccacttctgggtggctggagcgggtcctcctgctgccccgcccgctcctgcaccggggctcctctccctggcctgcagaccctggcctccctaccctggggggaaaccccacctgggaggtaagaccgctggctgagctgcttttcggccaaccgagaaatgtagagtatttgggggcgtttctcacaggtgggcagactgttaggatggcgagggcccagtgtgggtgctttggttctctccagaaggttgatgtctggaccgagaaggtacccgagtgttctccaccgcttcctaaaatctgacaccgtgtggccttggggtgcaggtgctgggtgtccccacagccaccctcaagaccgtatcctgaggcagcaatttgacaaagcctgcacctctggcttgggcccacacctatctctaaggactgattagggggcttttcttgttttttttttttttttttttttagagccagagtctcgctttgtcgcccaggctggagtgcaatggctgatctcggctcactgtaatctccgcctccctggttcaagcgattctcgtgcctcagcccctggagtagctggaactacagacgtgggctcccacgcccagctaatttatgtgtttttagtagagatggggtttcgccatgttggccaggctggtctcgaactcctggcctcaagtgatccacctgcctccacctc

SEQ ID NO: 17751 - DNA, 1739 bp, Artificial sequence
  DNA replication origin
tgcctcatcctctctgccgtgctgccaaagacactggggggtttcttcccaggaccctcgccactgtctctcttggacttggagaggcagctcttcagcactggcgggcccctgtctttccagtctctccggagcccgcccagctgctccaagaagtgcgtctgggctgtgctgaacctgaccttcttcctgcacgcagccctgggctccctgcacctcttcttgagctttcgcttggaccttaacaagtccttgatggctgtgtccaggtcctcgtcactgtccagggagctgcttttgtcttcagagctctctttctcgtctaggcgccttgcctcgtctgtcttaccctggccctgtgacatgcgagtgtcgccagggcccctggcggtgccctcccctcccagggcctcactggctttgccctggatgggcaggtctcgcctctcatggccgggctcagctctcccctggctgtggtcggcatcctggctaccgtctttcaccacctcctgcattttcttgggcgtggatggcctcacatggccaccacctctacgcttccttttgcagcccagcagtgggtctggtgttttagagagaggggtcttgtggccgccggtctggctgttgaggccaggcggcaaaagtggaccctgggcagcctgcgggcagctctcacctctggccagcaaactccctgactgcgcctttagggccaaaaatgtccggatttcctgctcgatgctgtcatcgctgtccacggagctactgtcgccgtcagagcgggaaggcacgttcggggagtagaagagtgggcttgcggacagggacccgtcactgccctctacaggggccggcaggatcgtcttggagatgtccaggattgcttctgcacacatcagctcagcagatgtgtccgcccggcacgaggaccgttccacaaactcactcctggaagcagggctcgctggaggtggagctttggtttccttcaggagcttgggggcatggtcagtgtccaggccccctggaccagggtccatggtcttggtggccactagcttcttcttgctgggtgttttcctgtgggtctcgggcaaggcactttttgtggcactgcttgtgctgtgtgcgggagggtcaggcgctctctcctctcggagttggaccctctggggcaggtccccgtcggcctccttgcgtgttttctgcagctggtacagctggatggcctcctcaatgccatcgtcgctgctggagtcggacgcctcggacgcctgtgccgcactcatgactcgctttcccctccttgcagcgctggcgctccttttgatcccacctttattctgtgctgcttctgaagggcggcagggggttgccggcttcgtgctgccctcgttctcctgcgtggttgtgaccttggacctgaggcttctgggctggacgttcatcttcgctaaccggggaggtttgcggaaggcaaactccttctggacgcccagcaggccctgccgatgcaccacctttgtaggcggctcttggtgggatttcaagagtgacttggcggaattttcatttgtgtctggtttcttctccactgacccatcacatttttgggtctcatgctgtctcttctcattcagaaactgttctatttccgccctgatgctctgctcgaaggagtcatcgctgctcacactgaccggggaggcggagccctggtccttgctggatcc

SEQ ID NO: 17752 - DNA, 1026 bp, Artificial sequence
  DNA replication origin
ctgccaaaagtgcttttggtcagctgcccagctgtgccacagcgggcaccgaggcaggaggcgccagaggaacctttcacatgggctgcgggagcccgagcttcctgacccccagcccgggagcggagagggacgctggagcccaggccgaccgcacaccgccctggagcgacttcgcccaccagagtcggctgcccagcccgtgggtgctgcgctccgaaggcagagatgcagtgtggagggggggcgtcgggagcgagagagacaaggggtccgagggccccgcccggggcctgcccagcctgccccttgcgggcttctcgccgctgctgtccacccagctcttccactttggaaagggtgtctcctgggggggcaggcaggctggcctcttcagcccccacctggggctgcctctgcagggcccctccttctcggccttcagggaggcccaggccggacccagccctgtctttggaagcccacacttgctggcaaagaaggacggcggcccctggccaaccaggaaggcacaggcagggctgagtttgcatgacaggaggagctcgggctcggaggaaagcattttagacctgaggtatcgacgaagggtcaacagggatgaccaggagcaggacgccttgggcagtgacgccagtgacttcagcgacacctccacggaggacagtggcggcagctcagtagtgaaggtctaagccctcgagctgtgggttcgcgtcctgggttgcgtgcattcgtggaaagcggcgtagccgtgcgtgtgtgtgatggttccgtggctgcaaggaagggaaacagtctattatacatagccctgtatatatgtacaccaacatgaaacttttatttaacagacgtgtcctggtaaatatgatttttgtagctttttgtaaattatttaaagtgatgtaaaagatatttttggaaaatactgttgttcaattttgtagggtgttcctaactgcagttttctgtgttctgcatacaagtcttagcttaggaaac

SEQ ID NO: 17753 - DNA, 1144 bp, Artificial sequence
  DNA replication origin
caaaagtccaatcgttgcctgccgagtggacctgcagtgcttaaaccccgtcacccggctggcggggtcccaggccctggggtttctttcgcccgggagtccacgccctgatgctggggtggcccggtccccccgcgggtggctgggggcctggggctgcctcacacgacggtcccagcagggaatctctcgccgtcccgaccttcccggcccttggggagtcgcccggcaggttccggacccacccgcagaggaacccggcccacgcgcggcgcctttaaggcccctccgctcgctccccagtcacgtgacctggccgtcgcttggcaacaggacgccgccgagtcccgcttctcctccaggcacaatggctgaggaatgccccagagcgtgcgcggagcctgtggcgcccaaggccacggccccgccggagaggaccagcgactactaccgcgtgagcgcggacctgccgggcaggttcaacaacccggggtggttccggggctacaggtgaggaagctggggcccgcctggtcctggcgtccactgctcgatagccccgtgtgtgagagaccccgcaagacccccaaggtcctagctacagaaatcaagaagatcgagtggtcatccggggcccgcgctgtcatcgcccgccagtgagcggcgaccgtgctccctagagcctcatacaaggaagtggggataagggcagtggggggcagggccgtggggggagaaagcccagttgtggtctcagctccactgatttgtgtcgggtgagtctcctctcctctctaccctgaaactccgctgcggggcgtgagcacagcagcacctccactgtcttgctgtagactcagccagctctgagctgccacagggcattgcaggctaagaagtagtaagaaactcaattcctgtaggcaggtgcaaacatcttgccgtgctcatcacacatttggtccctcaacagtcctctagggcagggtctgttagtatcctcattctcgcattgagatgactgggatgtagaaggaacaacttggccaagatctaggagtataaagtaaagctatgtcgtgggcctgcagcctctcagtagcctgtcctactgacaggtaggggcagtggtaccagtagaagc

SEQ ID NO: 17754 - DNA, 2091 bp, Artificial sequence
  DNA replication origin
cgctggttgggctttctcgggaaggcgaccccccggcctgctcggccgagccgcaggacgcttggaagcgcgacggcccttatgatccgcgagtcggaggacagcaccggtaacactgggcgcccagccgagttgggtgggaacgaggagaggccggcagccgcgggggatgcgaaccctagaggggcctgggcgctgcacgcggtcgaaactgcgcgctccgctgggctcctcccactcccgtgctcgccgccgctcggtcctgcctgacgtagcacagcgggctgaggccaccgcctcaccatggatagggtgagagggagcgggcgggccagtggttagcacaggcttcgctccctaggggggtgtcactggaccaccgaggcccggagccccgagctcgcccaggcgggcccaagtgacctgggggcactgggcttggagtctgcccaccttgctggactcctgatggggactttctggctggccacctgagaccacaaggcggggaggtgccagaaagacctgagcaacccgctgggcccctctctttttctcctctgtcttccaagtaagaccaagggacggggttgaccaggttcgaccaggcttacccaggagcaaggtcgggatcagaacctggctccagccctctgtttcctgaaaaggtccctgtgcttccaggtctttcctggggctgctgggctcccggctccccacctcggtgtcacagaaggcacttgggagcaggggtgggcgggaactgcgctctgcctgtctctgctgccaccggtgggagacgcagcgtcgctcctcctccctgccgtagatttcaacgacaagattttgaatgagcccctcaagcactctgacttcttcaatgtcaaggaactgttttccgtgagaagcctcttcgatgcccgagtccatctgggacacaaagctggctgtcggcacaggtaggtgacacccccatctgagcccggggcggttcccaggaggaacctgggacctgctctggttctagggccacttttgaactggcctatgtcagttttaggtgattacagccccatcctcctccacatgggaatacagagccccacagagaagcaggagtttattcctcagcttggcggacgctcttgtgtgccttggtgtggcgctcacagcccttgatagggcaggcctgctgggggttgcaggactccacgggttcagaaatggaaaggctgagggcagaacctgtaaggttggtccccccggatcgggctgggccttctgggctgcggggaggaggaatgactggtcctgtattctcacatggtcattttgactgctgtggggggaggggatgggaggggcaggtgggaggccagggaggaggttggtgtgggcgttcagggtgaaggtggcggggcttaaatcgcagtagcggaagagctggagcagcaggtggacatgaggcagcagggcagagccagtgggccttgggctggggtgggaggtggctggggccgaagggatcaaacacctgctcttcgggtggagcctggtactggttactgagatggtgaaaaccaggggagacctgggggacatcacaagcttggttcctaccaggtatgaaccctttgctgccccagtggagaggtcacacggttaccaggagggatgggcctgggcccagggagccatcagcatcgggggctggcaggtgtttccagagcatcggaaaaggaggtccaaggtggagccctgggtgctccagtgtttggagtcagtgaagagggacagccgggggtaggggagatgtggttctctgttgatgctgctgagaagtgaattcaaggctgtgaccttggcaagatggaggtcgccagtgccttgatgggcagggttgcttgagaggaagggacagaacccagtgggagtagactggaggtgaggacctgggaaccgcaaatgtggatgactcgcctgtcacgcaccgagaggcgggggtgtctcccatgccccgcttttctcagcccaggccagcagtggtccagtgctttggatcagggttccccgcccaggcttggccactcc

SEQ ID NO: 17755 - DNA, 1554 bp, Artificial sequence
  DNA replication origin
tgctgtcccctccccccacgtccagcctcacggactcagcatcagtgctgagggcactggtggctctgcccagtcccctctgggtggcagctgcgcttggtcccaggccttccggtcttacttgtgcaggaccgaggagtggagccctgcccccacccccgcaacccctacagcctgagctcagcgggcggctgacctgcaggaagcaccccgggaccttcaggcccagcctccagcacacacccccctgctaggcccctcccactgttggcctgtggcacccaccagggagaactgggtccaggctggttccctgtccttcctcctgcttcccacccagtccctgcacccaaaagagcacccagccagcacctctcaccccgagggaccccacagacaggcggagtcactgggaactgctgaagctctttatggagaaccaggagagggggcgcagggcagggggaaggcggggggtggtaggaaggggtgcagccagccgcgttctgcaggggtggggagctttttccatgtccctgtgaatgacggaggtgctggatggtgccgtccttgggctgctgaggagccaaggtgtcccctgccctggaaagggggggagggtgagtgaggccaggacagcaagggtgggagggggatgcaatgtgggggcgcatgtgggctcttgggtgctgcagtgtgggggcccatgtgagctctcaggggcatggtgtggggggcacacgctgcactcttgggggctgtgatgtggagggcacatgcaggctctcgggggctatggtgtggggggcacagcaggctctcaggggtgatggtgtggggggcacatgtgggctctcaggggcatggtgtggggggcacatgtgggctctcgggggctatggtgtgtgggcacatgtgggctctcgggggctatggtgggggtacacactgggctcttgagggttacggtggaaggcacatgcgggctctcgggggcgatggttgcgggggcacgtgctggatctcagaggcaatggtgtgggggacgtgcaccgggctctagggggctatggtgtggtgggcacatgcgagctcttgggggcgatggtgtggggggcacacacggactcttgggggctgcaggtgggggctccagcctctagattggagcggatggagcagggaccacccccgcaggctgctgacagagctccctgctgagtgaagtggcatcagggtgactgcaggccaaggggagggtgcgggaaggacagcgatgctgtccaggattctggctctgcccacacctgggcaggtgaccttgggcgagtctccaaactctggtccccttgtgcagccagcaaggggcccatctgacacagcgagcacaggcacgcctgccactttgctgaatctttgagcaacttatcgggtaagtggagtcacaggcatggccgagggtgaggggtgctgaggaggaacccgaatctcctgcctgctcctgcccatgtgactggggggtagacaccgtctccaccagcagccagcaaaggc

SEQ ID NO: 17756 - DNA, 1160 bp, Artificial sequence
  DNA replication origin
gacgcccagtgacctgccgaggtcggcagcacagagctctggagatgaagaccctgttcctgggtgtcacgctcggcctggccgctgccctgtccttcaccctggaggaggaggatgtgagctgggttggcgtgggcggatggaggagccaggtggactcctgggcagggggcagtgccaggggccctgctttaggaggtgtcactgaaggctggcttctgaccccgtgctcccagcctggggtggtggtggaggggtcctattgttcctccagcagacacggccccccgaggcccagggccggagcaggctcggctcaggggttcctgctgcactgacgcctgaagcccgaaggtctcgcagggttgggccctgtggagggagggctcacctggtgctggggcccgggggtccatggggtgcagacatgccctccttccactgggggctgggagccctgagcagggggctggctctaactcactccagctgagctctaactaaggtgcaggaacccagcctgcctttaggggtggcagccgggcaccatgggtgtctggttatagctgcaggcctgagtgccagggtcagagtagaatctgggccacccatggtgggctcacggccttggcctgctccagatcacagggacctggtacgtgaaggccatggtggtcgataaggactttccggaggacaggaggcccaggaaggtgtccccagtgaaggtgacagccctgggcggtgggaacttggaagccacgttcaccttcatgtgagtgttgcccactgcagggcccctcaggccactttcgctccccgccccagacccacctggtgcccattgccccatccacatttcgggtgttgggaagagtcaccccctgccttggagggaaacagccaggacatcctgaagctcggtggggtgggggggcagtggaattttcaggttgccgggtcagggccatgcaccaggtgagctgaggatgggccaggtgtgtcctgggagccgctgcccgagtgtctcctgttttccaggagggaggatcggtgcatccagaagaaaatcctgatgcggaagacggaggagcctggcaaattcagcgcctgtgagcccctccccgaccccccactccccatgcccaaccccggatgca

SEQ ID NO: 17757 - DNA, 1334 bp, Artificial sequence
  DNA replication origin
gactctgaggtgccaacctcgtgcctgaccctgggggggtctccctggctgtgtgggatgggaagggccagagcagatgtaccctcgaaccccgggaacccaggactctgggcttgtccagtgccctcctaaaggctcactcaccctagtgttcgagaacgcagcttcctgcagagaccaagaaaaacccagggattagaaggcgccctagaccagggcccagaccccatcgcagcccagggctcagagccccagaccccatcgcagcccagagcgcggagccccagaccccatcgcagcccagagcgcggagccccagaccccatcgcagcccagagcgcggagccccagaccccatcgcagcccagagcgcggagccccagaccccatcgcagcccagagcgcggagccccagaccccatcgcagcccagagcgcggagccccagaccccatcgcagcccagagcgcggagccccagaccgcatcgcagcccagagtgcagaccctccaacgacgaggatgctaagcagggcccagagcccctgcgaggagactcggggcacacggggaatgcgggggacatgggaggacatgggggtcatgggacactggagatcacacagagacacaggggaacacggggtactgggcacagccgtcctcacccgtctgcaggggcatgaaaatgtcctcctccgagagtcccttgtgctgcaccaatttcttaaattcttccagggcctccaggttggtattaggattcctacctgcaggtgaggtggccaggtgagccaaggtggggacagcggcacggccctgcagggagcagatgctaaaaggagacgaccacggcccagcatcaggacgggggagaggcccgagagtggatcagagctcaggggtggggctggggacagaagagatggcaactgtccagcaccaggcaagggggagaggaggcctgagaatggacaagagctcaggggtgggactggggacagaggagacggccaccgcccaggtgagaggtccccaggaaaggggacagtggcagggtccaagccactcagcaaccccagggggacctgggcagctcccaaagccactctgcagggtcataaccctcacctggagggaccttgtgtcccagaggcactggctgccctgccgccctggagagtccctgccccatgaagagctctgttaagatgctacctcccccttaaggtgaggcccctacacctgagaccccacaagcggcccttggcaggttcatgtcaccgagggccgtgtctgtccctgcctggcccaccccactcccacttcaggaact

SEQ ID NO: 17758 - DNA, 1243 bp, Artificial sequence
  DNA replication origin
gccagggtgggccaaggatctcagagaacagggccagctctgccttgctccaggagtgatgacggaggtgccagtgcccctctctccagtgctgccactgagcccaggctgctaaagtggggccgctcggaggatcccactgagacccccggggcgggagccctgtggtggacccactgctgcagctctgacgccgtgtccccactcccgccctcccagtggcttcccaagtgctcctgcccagagccctgcccgtcccaagctgagcctgagatccgagggcggctcttccggaggcccctccaggacatcacgcagccccacagcctgttggacatcgtgcctcttgtggtttggcccttgctaggtccaacatctccccagcttcccttgtggctccccctcccagcaggcctcccagggagccggtgcgagcccctccgtccccacagataggcctgcccagagctgggggagaagctctttatttggagtcaggtgggtgggagcagggaagggtcatggctggagggtaggtccaggtggtccgggctctgtgtctggtggtagggtgggctctggaggtgcagacccgggggctgctgtgctgggaagaggagcagaggtcagggaggctgcagggtagggcagaggccaggcccagagctccctccccaggctctgcagcttccacatcggccactgctgggcagcctcggggctccagagcagcctcagctcctccaatgactgggcaggcctctgagcatccttggtgagtgggtgggggggagtagaccgagtggggacaggtgcagggggcgatgggccgagctgacacctgagggagccggagggaggcctcgctgtggaaaggccgaggaggaccctcactcgggctggcaggtgcaggaatggtaaaacaaaggacttcccgaatgtcccaggaattttgggtgggcagactctgaggtgccaacctcgtgcctgaccctgggggggtctccctggctgtgtgggatgggaagggccagagcagatgtaccctcgaaccccgggaacccaggactctgggcttgtccagtgccctcctaaaggctcactcaccctagtgttcgagaacgcagcttcctgcagagaccaagaaaaacccagggattagaaggcgccctagaccagggcccagaccccatcgcagcccagggctcagagccccagaccccatcgcagcccagagcgcgga

SEQ ID NO: 17759 - DNA, 1000 bp, Artificial sequence
  DNA replication origin
tgttgggaccaggaccctcgggagtgaggttgtctgggagaggcccggaagctgccatgttgctgaaataacattggaagaggtcattttcagcaccgagtgagtgaggctgagctcagagaccagatgggagagagggttggggtggaaaagacgcagagggagctgggaagggagctgggctgggggcacaagctgaggagcatccggaatgccacctttttgagatggtttgtgacaaacgtgaagggaggcagtgggcgggtccacgtctccgcagggattggcatgtttcctgcccaacactttatgtgcgagtttcctaaaagctggtgggtgggcgggaaccatccaggaacagggctgaggggctcgggggtgggccaggaaaaggggggcggggtcaggaggctgctggggggtgggcagaggcgtgggggcggggccaggaggcagagtgggaggcagaggcgtgggggcgggtccgggaggcggagtgggaggcagaggcatgggggcgggtccgggaggcggagtgggaggcagaggcgtggggtgggtgtggtgacagtgtctggtttggtctccttagtgtcagcatgaggggccagagatgcttcaggggaggcaggagaacctgtcccaagatggccctgcgtccatcagcagaagaggagcctggccaggggctgccgggggtgcccgccctgtgaggcctgaaggaccaggtcaagcctttatgttggggggttgacataggaggatggccgggcaggagtggacagagcttaggcgctgacccgtcaagggtgggcgacctgcccttgccggagtgctgcctcgtctgatgactcagtcctggctgctggggggtgaccagcccgcaagtgaccagcactgccccttcccaagacaatcaggaggtcctgaacacaaacagctcagccccagcctctgggccagctcccacctcgttcctggcccccccgaggatccacac

SEQ ID NO: 17760 - DNA, 800 bp, Artificial sequence
  DNA replication origin
acagatggggctgaaggggagcccactaggaggtgcatcaagcaatgtacctttttttttctttttctttttctttttctttttctttttcttttttttttttttttgagatggagtctcgctctgtcgtccaggctggagtgcagtggtgccatctcggctcactgcaagctccgcctcctggcctcacgccattctcctgccacagcctaccaagtacctgggactacaggtgcccaccaccacccatggctacttttttgtatttttagtagagacggggtttcaccatgttagccaggatggtctcaatctcctgacctcgtgatccacccaccttggcctcccagagtgctggcattacaggcgtgagccaccactcccggccgcagtgtacctatttttaaaacactaatgaagttggggaatagagaaatggcagggagattggacaggaggacttaggtctgaaagatgagtcataagttacaggcaaaatggaaaggccaactggaggaagatggaaatattgttggtgacacccaggggtatttgtagaggtgtggccttgttcagaggtgtcctgaaggtcagagctgtggggcatcaggagggaggtgtccatttggcagctacatacaagaacctagaatttaggagatgcacatccaggatgaagctttggaagtcaagaaagggtgcccaagacaccaggagaggctgagatcccccagaagaggaacaaaaacaggagccattttggcatggagagagatggagggcgggaaagggagatagtc

SEQ ID NO: 17761 - DNA, 2601 bp, Artificial sequence
  DNA replication origin
cttcccagaaaacgctgttcctccgtttccccgcttcacaggtgtccaccgcccctcccttgtctgcagggagcgcagtctcaaggtaaagtgagcacacctgtgtctgatcgtggtcacattggctgctttctgtgtgaccttgaacacagaacaccaccttcctgaacctctgtattctcactttcaggacaaaaatatcgctctcataagagggtttatgaaggcgagggttgcaggaaaatgcttcctctatgttttagttaagtctctggggttctttgggcctgttattttctggtttggttctcacacagtgaaattctacacatggtcttgaagcttccagctgtctcattagcaatgctagctggggacctttcacaggtgcaagagggaacttcgttctgagaggctatttgcaggaaactattagctaaatgctaaaaccattcacaagaataaaacactaacagtgggtccagatggagaagctcatgtggatagttgcacctgtaaccagacacagctgggcttcagtggtttgcttcggggcacagtgacctacaggaaggtagggactgctgtatgtgtgcattttgctgctgtatccacagagtctagaatggtgcactacctgatcaccatgccatgaatatttgttggtaaataaatggatggacaatggataatgaaagggtggatggtggatgaatagatagtgaatgggggataatggaagggtggatggtggatggatagtgaatgggggataatggaagggtggatgggtgagagattggggatgagggtagatggatagtgggtggatgattgtgggtggatagatgaatagaaggatggataaatagtggatgatggacggatttatggatgaatgaatgagcggtggatggattatggatagatgaatggggaagcagagaggtggatgaatggctggatgaataggtaaataatggatggaagaatggatggatggaagatgggggatgtaagtcaatgaatgatagatggatgaaggtgtggatagatggatggatgggtggaagatagacagtgggtggtgaattgggtgtgaatggatgacaagtggactcatgatggtaagaggggtatgtatggctggatagatgaatggactgattatggttggattatggtgaataaatggatggtgtatggttgaatggaaggatgaatgatggatgcatatgtgggttgatagataaattaatggatgaatgggtggatagatggtggatgggtggatgtatgcatggatggtagatgaatgaatactggttggggaatgggtgaaagatggatgatggagtggatgaataaatcgtgggtgaatgggggtgtgaatagatgaagaggtggccaaatggctagatggatgggtggaagataaatggtggatggatggtggatgaattgatggtggtgaagggggaatgaatggtagatgaatgaatggaggatagatgataaatgcatgtatatatccataaatggatgaatgaataaataatggaataaatggatgaatggatggattggtgggtggtgggtgaatgaatggtggatagattgatggatgaataggtgggaggatgggtgaatgattgcatgggtgaatggatggatggatggttggttgggtggataaatgggtgtgtgtatggattgatagatgggtagatggatggaggaatggatggatgggtggatgaatgattaaatggaatgaatggctggatggatgaatggatggatgcaggggtgaatgagtgggtgattgagtagacagatggacaggtgaatgggtgggtggatggatggtggatggatagatgaatgaatagatggaagggtgggtgaatgggtgaatggatgggtgggtgagtgggtggcaggtgaatgaatagtggatagattgatggatgaataggtgggaggatgggtgaatgattgcatgggtgaatggatggatggatggttggttgggtggataaatgggtgtgtgcatggattgatagatgggtagatggatggaggaatggatggatgggtggatgaatgattaaatggaatgaatggctggatggatgaatggatggatgcaggggtgaatgagtgggtgattgagtagacagatggacaggtgaatgggtgggtggatggatggtggatggatagatgaatgaataaatggaagggtgggtgaatgggtgaatggatgggtgggtgagtgggtggcaggtgaatgaatagtggatagattgatggatgaataggtgggaggatgggtgaatgattgcatgggtgaatggatggatggatggatggatggatggttgggtggataaatgggtgtgtgttttgatagatagatgggtggaggaatggatggatgggtggatgaatgattaaatggaatgaatggatggatggatgaatggatggatgcaggtgtgaatgagtgggtgattgagtggatggatggacaggtgaatgggtgggtggatggatggtggatggatagatgaatgaatagatggaagggtgggtgga

SEQ ID NO: 17762 - DNA, 1401 bp, Artificial sequence
  DNA replication origin
cccgggacctgtctacatatgtagcagccccaaccccaggccaaaccatggagcaggagagccaaggccccaagggtgagcccaggactctgggtgacacccgagctggctctggctaagaagaggccttggaagaagcccttgccagcccagctccaggctggaaaagaggcctgagtatatctgggacctgagcagaggggcctcctgtgtggctgacagcaccctgggtggttctcttctccttccctgaagtctccataggaaggggtcctaccaggcccctctacagagcagagaagggctctcctgggcttggggatgccctgccccactgccgcacctactccttgagggacatttgattgcaggggtggtgggggtgggtgggataaggtggtgggtggggtaaggtgggggtggcgagggtggtggggtaaggggggggtggtgggggtgggtggggtaaggtggggaatcaggggtcctgctgtcaatgatccttccccagaatcagcccccaggccctcctgagagggaccccgtctcccagcctgttctgccaaccatgcagacactcatcctggaggagggggtcttccatgtacccctcacttcccctatgactccttgacccagcctctcctggtagagatgctgcttcccaggccagcagcccagggtcccacatcacggagcccttgcctgtctccttggacgccacccgccaggtgtggcccagcgagagccagagggaaccgtgggggctacacccacattgccacagagacctgggcatggctgagttagggaggactccaaggggcagcgcccccgtccacaggcccccgtccacaggccccgtgacatcagcgtggacacgcgcctgtcaggttcattgtgtgcacggccgggtccctcctctcatcccgggtgttcatgatgtagtagtggtccgtctccacggacagatgcagacctcctgctcccccgctgggaggggcggaggatgtgctcttgtgagctgggtggttgcgccctttttaagttgagtctatgagtctgaaatgctaataatttctgtccctctataggaaatgggaggggccccgagtcagaagctgagagcactcggggaggcaggatggtggcagtgagtgggtgagccccaagtgcatctccaggccggtgagagtcccccccagatgctgcttcctccgctctggctgacggaggtcagaggggtcagatgctggccttggacagcttctctgcagggctgatgaaaacacagcttccgggatgccacagaggccactggactctgccagggcccggcgaggagaacgtgccttgtaaatgactccaaaatgccagggagggaccacgggcccaggaaat

SEQ ID NO: 17763 - DNA, 768 bp, Artificial sequence
  DNA replication origin
ctgatgtgcacaaaagggctcccctgtgactctaggaccctgcccctgcaggtcctagagtgagggacccctgcttatgtgagaggagcccccacctcacccccagcttcaggccggaggggcttatgatcccaggcccacccctgagccccccaccctcactcacccccaccctggaggagaaggcctcatcctgtgcccaggacacaggaaatggcatctggagcagccaaccccagagacgcgggcacatggccagctgggcttttccagatgccccaggattccagcccatcgctcagggtcagccctggggaatggacacagtggggtctcttccaggagcccagaaaggcgacctcaggctatgggcggggctggtacattacccaggaggcaggactgagcaggagctcatctagacgcggcactgttctgtgggaggagagggggcagtgggggcgtcagtgggaggggagacttagctggggacacagcagtcccagggccagaggttgggggatgatgggagggggacgggaccccacctcagggtgcctttgcatccccaggggagccctggggagaacatgggaggggccaacgaggagtgacgggtgctgccctgagtcctacagggccagcggggggcttgggctgggacagtggtggcttctcctccagccgaggctgggcctgtcttgggtggagctcaccttccgcctgggtaacgtccaggaagatccacatgtgcacgggcagggtcct

SEQ ID NO: 17764 - DNA, 766 bp, Artificial sequence
  DNA replication origin
caaaggcaccctgaggtggggtcccgtccccctcccatcatcccccaacctctggccctgggactgctgtgtccccagctaagtctcccctcccactgacgcccccactgccccctctcctcccacagaacagtgccgcgtctagatgagctcctgctcagtcctgcctcctgggtaatgtaccagccccgcccatagcctgaggtcgcctttctgggctcctggaagagaccccactgtgtccattccccagggctgaccctgagcgatgggctggaatcctggggcatctggaaaagcccagctggccatgtgcccgcgtctctggggttggctgctccagatgccatttcctgtgtcctgggcacaggatgaggccttctcctccagggtgggggtgagtgagggtggggggctcaggggtgggcctgggatcataagcccctccggcctgaagctgggggtgaggtgggggctcctctcacataagcaggggtccctcactctaggacctgcaggggcagggtcctagagtcacaggggagcccttttgtgcacatcaggtcctggagcctcggcccctgtgcggacggagaggatgtcgccttcctgggagggacaaggaggctgaagaccaaggcacgtttcctgggacgctgggacctcctgggtctcagcctggggtctcctgtcctaagctgtccctctttgaacaataaataaccccgtcccctgagtctgtgctggcaggcgcgtggggatgcag

SEQ ID NO: 17765 - DNA, 1496 bp, Artificial sequence
  DNA replication origin
gcccttttgtgcacatcaggtcctggagcctcggcccctgtgcggacggagaggatgtcgccttcctgggagggacaaggaggctgaagaccaaggcacgtttcctgggacgctgggacctcctgggtctcagcctggggtctcctgtcctaagctgtccctctttgaacaataaataaccccgtcccctgagtctgtgctggcaggcgcgtggggatgcagctgagggcaggctgtggggctggggaactcggggactggcagactcaggggctggggggatcggggactgggggactcaggggctggggtctcagaggctggggggcacgggggctggggactcgggggctggggactcgggggctgggggactcgggggctgggggcttggggcctggatgactcaggggctgggggactgggctggggggctcagaggctggggggctcaggggctggggggcttgggggctgggggactcgggggctggggggttgagggaactgagttcatggtttctgtattgtaggccctatcatatttggggatcaagacactataggaggctttaaaattttcaggaactagataagagtgctgctgagatggccagagcttgccattcatgttggaggtccaggccacacaaaggacaaaatatgaaaaatcacagacccattcattgaataaatattgatataaaaacttaaatgagtgttttacaaatcaaattctgcactatttaaaaaacacaaaccccatgacctccagggcatctctctggagcataagggaagttgctaccaggaagagctttgctatcagccttcatctgctcataaatgccattgatcttttctgggctaatgtgaaataaagagatttcccctggattgaggaactgaacaaaagaggtgagatatgggagaggaatttgtttttcattataaaatattttgaacatcacaaaaggaaaaagaatatgcaacaacagaaatagatttgtcaataattgtaacatgcataactttaaattttcaaaatatagatggcatggatacatttccaataaaatatcaatgaccaatattggctcaaaaagtagaggaaacttagaaagaacaatcatcatagaaaaaaccagaatagttccagatcttctgtctgtggatgagaataaaaaacctttatctgatagttcctggctcatacgatccattccagggcatagaaaaagacggtgagttgctcagctgccctgataacaaaactggagaaggaagatacaggaaaaggaaagctgtcaactttcagaatcaagacacaaatatctgaataccttattagcagactgaatctaacaaacgtatttaatacatcatgatttagcccaaaaaacaaagaacatttcaatattagaaaatgtatcaataaaagccaggtgtggtggctcacacctgtaatcccagcactttgggaggccaagataggc

SEQ ID NO: 17766 - DNA, 1086 bp, Artificial sequence
  DNA replication origin
agctgccgcccatggctgactcagtctgagctcccacacaccctccagcgctgagctggccatgcttgagtcaaggggccggggaccgatacagcatcctgcatcctgcctacaccccctggggccctggggaggccccaccctgcactggctcagctccgcatgcaggttccagaagtggccatggctgggcagggctcagcgcagcgcgacagcttctggcctccatccctcttcctccttctgggtgcaggatgtcactcaacagcagccacagtcaacctcaagtctgcctgtttgcttgggccttagggggtcctagcgctccctgtggaccttccagggcccagctgctgccctgggtctgtgatttctgcctctgggcaccttcccctacttcccaacctccctggtgtctgggtgctggcctgagatctgtgtgcagggatgagtgcaggtacgtgtgagtgtgtaagtgtatgtgtgtacaggggtatgtgaagcgagtgcaggggtgtgtgtgcagatgtgtgtgagtgcaggggtgtgtgtgagtgcaggggtgtgtgtgtgagtgcaggggtgtgtgtgagtgtaggggtgtgtgtgtgagtgcaggggtgtgtatgcaagtgtgtgagtgcaggggtgtgtgtatgcaggtgtgtgtgagtgtagggtgtgtgtgcgagcatgtgtgagtgcagggatgtgaatgcaggggtgtgcatgtgcaagtgtgtgagtgtgcacgtgtgtgtgcaggtgcgtgtgcaaatgtgaggtcggggtgtgagtgcaggggtgtgagtgcagatgtatgtgcaagtgtgtgagtgcaggggtgtgtgtgtacaggggtgtgtgcaggtgtgagtgcagatgtgtgtgcaagtgtgaagtcaggagtgtgagtgcaggggtgtgtgagtgtgcaagtgtatatgtgtgcagggctgtgtgtgcagggggcagacagaaggggtgactggagacaaggcagggggcaccaagaccaggtgccagtttcatgccatctggggtgggaggaggctgtggctcttcctgagacctcagtgggagctt

SEQ ID NO: 17767 - DNA, 949 bp, Artificial sequence
  DNA replication origin
atcctgggctccgaggagtgggcgttggctggtctcacctgccacacaggtacagctgtctgtgtttacctggcagccccgctgggcttctgcagagagcagggtctggagctgggctcacttagggctcttggacctcagtggggacatatgcgtttgctcacggagcatggaggccacctctctggagggtccccagcagacccaggtgaggtgggtcacagtggaggggagctggagtctgagaacagcctccgtggggtcatgttcctgaaggacacttgagggccaccccagcagccctggggaggggggtgcatcggaggcacctgggactacagtgctccactcattgtataagttttggaggcctctggcgctgcgggcaggagctcagggggccatgtgccccctcctcaccaccctgggtgtgctccaggcccacaggccaggctggggcacactgctggcccttggctgttggttggcaggtggttggcaggacctggagacgcacagagggaagaggccttcccagcaggggaggggaccaggagagaggcagggttgggctcagctggggagcttccttgagtccctgagatgcaaaagggcttccagggggacctggggacagtccaggccacaagccaaggtgaaggaggtggaagggaggctgagggcagcagaggggtgaggggcccaggcaggaagactccagaaccgccagacctaggctcagggtgggggacatgggcctgtggagcagaaaagaaaaaggtggtgattctgaggacttcactcattcattttgaaatcaatcaatcagtaaatcaatcacatagcacaaaacagccatccctcactggcatcactgggccttctgcctccccatgttggctgtgtcctgccagggccctgtgctctgtggaaacccactccccttggg

SEQ ID NO: 17768 - DNA, 1754 bp, Artificial sequence
  DNA replication origin
ggtgcctgcctccagtgaggggacagcaggttcctttgcccatggatccaggaagctcccacaagggagtggggtgatcttccccaaggtagagagggcagcagcctcggggcctttggctgcatgcccagtgggcacaggatgtgtgtggacgggccacagagtgggccgccctgcagggctggaagccgcagggcagcagggtataaagggggtgggccgagggctgaggcgtccacggcaaagatggctctgcttctgctgagcctggggctgagcctcatcgcagcccaggagttcgatccccacaccgttatgcagaggaactacaacgtggccagggtgtgtctgcgttggggtctgtggggaaggggccaggcttcaaggcacctgtcttcccccagcctggggtctctgacctgtgaccagggcaactggtccaaggggagcccacctctcctccccaagctgtgacagcagcctgggagagcaggggttactccgggagggtcgggtgggagaggcctgggagagtgactggggccctgagaggttagagggggccctgggagggcagaggggaaagctggagagtggagtggcggccagcagggagatgggggccctaagaggacagaggggttcctagaagtataggggagacctagggaaaagagggggactcagtgggaaagggtggagcgggggaccttgagaggacagagggggacctggaggggcagaggagagacctgtggggcagagggggccctggaagggcagagggcattctgtgagcagaggggggaccttgggatcaaaggggggatctggggacataggggagacctggggggcagcgggggccctggaagggcggagggcattctgtgagcagaggggcgaccttgggggtaaaggggggatctggtgacgaggggagacctgggggcactggaagggcggaggggttctggttgggagccagatgctaaggggccgggccctgggagggaagactgtgggcgctaagcatccccagggctgtcccgcggccccccacccactggagctctttgtcttcaggtttcaggggtctggtattctattttcatggcctcagatgacctgaatcggattaaagaaaatggagacctgagggtcttcgtccggaatattgaacacttgaagaacggcagcctaatatttgatttcgaatacatgtgcgtgttgcccatctcagctggcatcaggaagacccatgcccctgccaccccaacgcatactctcactcttgcacacacacgctcgcacactcactgacttgcactctggtgagagcctgagcctgtgcgtgtgacccttgggggcagggtgaggtgggagcagggacttggtctgcctggcactgtgctcttccctgaaacatagagatgaaatcgcccccttccaaggctggggtgaggttcgaggagatgagggtgtccggtgggctgcagcagggcccagcccaagaacttggggctgtggaatgaggcctgggcattgggagggtgagcctgtgccctggaggaggggtgctctctgccatcgcacgtccagggggctggagctccactcccggcatcttcctggctggcttccagggtgcagggggagtgtgtggctgtggtcgtggtctgcgagaagacagagaagaatggggaatactccatcaactgtaagtggaagccaggctcctcctggtctcacag

SEQ ID NO: 17769 - DNA, 1780 bp, Artificial sequence
  DNA replication origin
ttctcagagatgaggattttaaaaatatacctaacaacctgaaacagcagaatagtgctcacctgtgaggaggggaggggatagtgctgacctgggggtagggggaggggatagtgctgacctgtggggagggggaggggatagtgctcacctgtggggaggggaggggatagtgctgacctgtggggagggggaggggatagtgctcacctgtggggaggggaggggatagtgctgacctgtggggagggggaggggaggggatagtgctcacctgtggggagggggaggggaggggatagtgctgacctgtggggaggggaggggatagtgctcatctgtggggagggggaggggatagtgctgacctgtggggaggggaggggatagtgctcacctgtggggagggggaggggaggggaggggatactgctcacctgtggggaggggaggggatactgctcacctgtggggaggggaggggatagtgctgacctgtggggagggggagggaatagtgctcacctctagggaggggtggggataggtttgggggtgcagaaggactgctgggtggccattgcacacgtgtatgccttgtgagaattcagtgagttgtgcattgatgtttttgtgtgttacatgctgccaaaaataagtagacaggaggccccagcgctggtaagaggttgatttgggcctgagtgtgggcagagctttgggggtgcagtgtttgcacggggaagggtggcatggggctgggtgaagcaagggaggccagcccagaagtggtttcagtgggccctgaggccaggtgcccgcagccccactgggtgggtttgctcggccaccactcagccactcggcgcctcaggaacagaagggggtttgtggatgctcccctctttccctagtggttttctcttttgtccccaatgccttttcatgacccatctggagagcagatcttgtgcaaggtgaggaagagcaggagagccgagggcttgggctctgccattgggaacgctgctggggctgccaggttctggaagcttcctctaattctcagcttcataggagatttgagcagcagcagcggttgaatttgcagagcactttttctgcgcggaagcagaggctgggttggcctcactgggcctggggatatgggggctgcaggtgagggaggggagagaaggcctgggcctggcctgactgcgggagacacagcctcagggaaggctgggcgggcagagggcctgggaagctgccaggagctcaggcaaaggcctggagggatgggggcagggtggcccaccaggagctggggagtgaggggctctgcgggggagaagggggtgacagtggctgtgcgtggcaccttgggaccggccaagtggatttgtgcttgtgtgtacctggcatcgacatttgctgaaaggaggtcaatgctctctcgccgtcgaagtctgatgttggcatgggtgatgggtggcctgccagggtggaagaaagcagggggcaggtagctggatttaacatttcacagccccagccacggtcatacctcagccacaaccccagccgtagacacaactacagccacggccgcagccatggccacccaccccccagccacagccacagccaccaccactgacatggccacagccacggccacagccacggtcactgcaaccacagccatggctgtgaccacagcctccaggcatggtcactaccacggccacagccacagcccccgtcactgccccagccc

SEQ ID NO: 17770 - DNA, 671 bp, Artificial sequence
  DNA replication origin
taaggcagacgccagtaaagtgaccagtggttcacaggagggagaccctcccccccgcactcccaccccaatccccgtcttcctcaaaaatgcccctggagggtcagactccagcctgtggtgccggggacacatcccccaggaaacctctgggctgaggcaacaccaagtgcagaataggggtgacctgtgtctgcggtgacctgtggctgtggtgaccagggatagggtgagccaggggtagggtgagccggagatgaggtgagcctggggtgagttgagccagggatgcgatgagccgggggtggggtgaccggggggtaggatcaccgggggtaggttgagccagggatagggtgagccaggggtagggtgagccgggggtggggtgagccgggggtggggtgagccgggggtggggtgagccagggatagggtgagcctgggggacggtgagccgggggtggggtggcctgggggtggggtgacccggggtgggccagcgtggggtgacactcgggggagaaggtcagcagggcggtgagggggtaggaatcggagctgctcagtgggcccagctaccaggagccccggagggtcctcgacggatttgtgcatgagaaaccagatcgcttctacctggggtgggcagctctgctcccgggtggcct

SEQ ID NO: 17771 - DNA, 791 bp, Artificial sequence
  DNA replication origin
cccccatgatccagtcatctctcaccaggtcccacctccaacactggggatcacatttcgacatgagatttggaggagacgtccagactgtagtaccgtgtgtgcatgtgtgtgcacacgcgttcgtgggtatgcacagcttcgtgctagtactcgagtgcgcatccatatgttggtgtgcgtgtgtgtgtgtcccatgtgttggtgtgtgtccacgtttgcactgtggttgtgtgtgtgtactgttgccatgtgtgcgtttgtgtgctgtgttgtatgtgcgtttctgttcccatttgtgttggtacgcatgcttttgcactgtgcaaactgcagttgtgtgtgtgcatgggtgcttgtgccaggtgttggtatgtgcatgtctgtgtgcagtgtgcacatatgtgtacggtattggtgtctgcatgtgtgtgtactgtggtgtgcatgtgtgtgatgtctccactgtggtgtgcatgcgtgtgtgcactgtgttggtgtgtgcatgcatgtttgtgcactgtcggcccgtgtgcattgtgtgcactgtgttggtgtgtatgcatgtatttgtgctctcgtgtgtacgtgtgtgcactggtgtgtgcatgtgcatatgtgtgtgctgttcgcagtgtgtgtgtgcactgtgctggtgtgtgtgcatgtatgtgcactgtgttggtgtgtatgtgtttgtgctcccgtgtgtgttggtgtgcgtacatggttgtgactattggtgtgcatgcctatatttgcactgggtgtatgtatcagccctgctccgg

SEQ ID NO: 17772 - DNA, 775 bp, Artificial sequence
  DNA replication origin
gcgtggggtcgctccgcagctgcgagttcatggcgtcccggtgctccgagccctacccggaggtctccagaatccctaccgtcaggggatgcaagtgaggaattgggctggcggccaaggggttgggggcccaaggcctgtacccaggggttcttccgcaagttgctgggctccacccatcctgggcctcctggggcggagccctggaccctgggagaggggaaggggtgcagagagggccgggccgtgtccctacgtgacccagtcttggcttccacccgcaccccaaagacgcccattctggcatctgggactcctggtggccttttctggggttctcagggcccggtgctcttggctttctcggcagcggctccctgtctggtgccctctcctgctgcgaggactcggcccggggctcgggcccgcccaaggcccctacggtggccgagggtcccagctcctgccttcggcggaacgtgatcagcgagagggagcgcaggtgagtggtggtgcctcccaggggtgagggcgctgtaaaggggtggagcgggtgagattatgttcggggctgccaccaggtgtcaggcagctgggaggggctcgtggcctgtgcccaggagaaggacagactgcacatctccaagtaaaccagaaaagccctgttggggaacatcctgcagcccctctttatcctgaagccttggcctcttgaggctgtgcacctgtgaccctctgtgcttctgactgcctctgaccctcgctgtcttttcca

SEQ ID NO: 17773 - DNA, 841 bp, Artificial sequence
  DNA replication origin
aaatggaggcgtgggcgactggggagcaggcgggtacccttccccctccctgtgtccctgggtcccccaggcctgggctaaacaactcagcccagcccgcccactcccaccaggggctgggctcctaagggcagagcccgcatctccaaagtgcccaagggcaccgagaccaccgcataagtgggaaccgaggcgacccccgggaaggtaagggtagaggcagggccacctgggctggggccccttcccctggcgtcctgcgggggcatagagtgggtggaccccccgagtccctttccagcaccttctttgcaggaacgcgggtcacgtgggccccgggctggctgcgtggggagggctagagcgcatgcgctatgggggcggattgcaagtgggggtggggtgggctaggtggaaagcacgtggcaggtgggcagagcacacgtgagggggcggggctgcctgcggaaggggccgtgcgcgtggggtcgctccgcagctgcgagttcatggcgtcccggtgctccgagccctacccggaggtctccagaatccctaccgtcaggggatgcaagtgaggaattgggctggcggccaaggggttgggggcccaaggcctgtacccaggggttcttccgcaagttgctgggctccacccatcctgggcctcctggggcggagccctggaccctgggagaggggaaggggtgcagagagggccgggccgtgtccctacgtgacccagtcttggcttccacccgcaccccaaagacgcccattctggcatctgggactcctggtggccttttctggggttctcagggcccggtgctcttggctt

SEQ ID NO: 17774 - DNA, 1729 bp, Artificial sequence
  DNA replication origin
gggaagggtacccgcctgctccccagtcgcccacgcctccattttcccccaaatctagtacgcttgcagacgctgcgcctcagggtagggtcaccatccacacttctgggtcgcccagaaccaggggcatcttgtccccaccccaggccaccatcgtccgtgctcttcctcccgctgagctctgccgggcaccctcggaaccgtctgtcccttcacctggccctgcccaagcaccatccccgctttatgccctggggccccagctcgacccctcacctcacactctcaacaggtttctgcgggatcgcgggggtcctgcccatccaaattcagaaagctccggcgccaggtgtttgctcacctccccgctgaactccaggagccgccctgcgctgggcttgagtcccccagtacatacttttggggggatgacggagggaagggggaggtggagacccttcctctttcacggaggttgcggggggccctcagggaagcagaggggacgagggtggggggtgaggctggactgttgggaggacatccctggcctggctcgtgctgaggtcgtagcgggaggaggtggggtgggtggcaggggctctcctcccgagaggggaggcaagaaggagcccgggcaggtgccaccacacggggacgtctgtccggggtgccccagtctcctgtggagaaggcgcggctctgggcctcgggctggcatcctggactttgggccaaagatgggtgaagggtgtttggagcagagggaggttatgtaatataaggtggtgtctccatccctgctccgcccagccttggctgcaggtcagacatggaggaggacggggttggagaggagggcaaaagctctcggggacctgggcccctctcccggccctgcccctggccagggagggatggacgggctggcgatctggggctcctcagtggcagagtggggccaagtttttgtttccctaaagccctcggaatgtcatcaaacctgtgactctcctgccgttgacaacacgtgtaattactgctaattaatcacagatgcagatggtgcggcctctcagttttttctgagttccccaggcaggagggcgttggcagaaaggccaccatcttgccccggcggcacccgcccaggggtggtgggaccccggcagcagcaccggccaatctagggacctgaggaaaaacccccaagatgcccacgagctgtgtggcgggggcacaggctgaacctctgctggggacttagcatcctagacttccccgagtgttccccacccacccctcaaaagcatctgtgttcagcctgctgcctcctggagaaacagggaaggaccctctggagagacactggggaggccagggaccacaaagtacatggcatgcgccctccaaatggacctggccctccccctggccctcgtgggcacagtcctggcttagtgaggggcctggtccaccctgcaaaccaacaaagctctggggacagaaatcgcagttctccagagctctgtgtgaggctgagccagggtgacgcatgtgtaacagtgtgagcacgtgcacgggaaagggggcccgcagggggaccctctgcttcctagtctttggcctgcagcatcttaagttggggcccctccccacccgtctaaaggtgctgtgtgtgcccgtctgggtgagagcacagggcggggtgcagtcatccccctccccc

SEQ ID NO: 17775 - DNA, 1399 bp, Artificial sequence
  DNA replication origin
gggaggtgctgacggtccctgggcgcagcggctggacgctggcggtccgagcagcgcatgtgccctgctgcccgccaaggacccagagccccctgagcccccgcccaccacggagccctcccaggggtgtagggcccggtggcggcgcgcttgggcttttctagccattgacgaaccccgtcctgtttttcggagttttgagggctcagagggccgcggcgggagcggatcgccctccctaccccgcacccccgtcccagcctgggccagagccgccgcgggtcccggcgcggccggcagggggcgcgcgcggacagacgcctgcacccgaccctggaactggcgtcttttcctcgctaatctgcgaggaaaaaaaaaatgtttttcagggcaacgcgagggaagaaggtggcggctcccactcgcttctccctcgggtcgggtccgagctgccaggccgcatgccactccctgacggggcgcggaccccggggggcgtctgccgggaggcgcgcggcgggggctacaccaaccggaccttcgagtttgacgacggccaatgcgcccccaggtacagtctgctgcgccctccccacgcggggaggccccggtctaacctaagacccccaagttccccctcaggctcccgcaccctccaggacccgccattcccagggccatccaacttccccaggacccgcgagtgccctcccaaccaccttggggaacaggggcgcccctcagggtgggccgcactaatcagcaggtgccgaggcagcagcgtccgtccccatctgtcctcgacctggtaagaagctggggggagcggccgtggctacatgggggtcctgagcatctcccaggtgtggggagtggcagggaggctgggggcggtgcagggccttccatctcccccagcccctgccccaccccagcttggggaggaaggttccatccttcttgtgtggcatggcagtgctcggccagggtggggtgcccggcgaggttaccccacacagtagggggtttccagagcaaccttccaaggaagagtccccagtgggaagtgggctaagtggctgtcagatgagggcgggagtcctgggttctggtcactcctcgttccccgctggcctatccctgggaggagagggccagttgagaatggcattcaggtgacctggagctagctgttccctgtgcagtgtcctgggatgccatgcgtctgccgtccacccagtgaccagtgcagaggcacggaccggcagctgagtgggacagtcctgagcggaggttgccccagggtccaggttccccatcctctcccccatccctcagctcttgaaaacaggcaagtctgcccctcaccctgtccccagagccagactccagggaaccc

SEQ ID NO: 17776 - DNA, 973 bp, Artificial sequence
  DNA replication origin
ctgggggtttgagctggggcactggagtggggtggggtgtccaagcacctcctggcccctctgaaccatagcaccaaggctggcatcctccagcacccaggaaagacagaggcctgctcaaggcctggcaccaagacctatggactccagggcctgggttctgaccacgctgttgcctggcaccctcctccccatgtgagagctggtggggaaacccgccccacagagctccccccaccaccaggcagcacgaaggttcttctttctgcagctgaagccacctgcctgggccgcaagccttggcctcacctggagctcagctccccgctcccgagcccagccaagcccaggtcctgctccctccccaagcctgacgcctgacatccctccactgccggcggctgctctgcctgcagtgtgacagggaatctctgttgcaacggaggccagctcagtccagcggggaggaggagctgtcccgggccggtgggcagggccaattgggagagacaggtgtctggaaggacccggaggatgaggcctggagctaaaggctggaccctgaggacactgtcctgccggctcgtctggagcaggtcaggcccagcagggtaggtgataaactccagcagaatggccagggagggcaacgctaggctggggagggagatggtaggggccggccagcccacaaagatgagggcaatccaggacccccttggggtcattttctctgtgcctgacaggcatcccccggatagtccctcagagcacgtccaggctgtgcccacttcccaaggacatcaccaagtcactgtccaccctcagagcacctgctcctcacacacgctgtaccccggactcccccgggtgccaggtgggtgctgtgcctgcctcttgattctgggaacctcctctccagcctggtccctcaccagaggcagcccttaaagaccatccgccctacctcctc

SEQ ID NO: 17777 - DNA, 1016 bp, Artificial sequence
  DNA replication origin
ctccgtgagccaggcaggcgcaccgtgggcacgtgtgtgagagctggaggaggatgtgtggggcccgccagccagcttgtgtgaccttgaagtcaccggtcatgagtctggggaaaggcaggctgggctcagcgtgcccgtgctaggtggctgggtgccaaggcccggttaaatgggcatctttcaaaggtgtcttgggacctctcccagctgtgtgtgtggataaggccacccatgttcacccagacccactttcacctgtggaacttggaagtgagccagcggggctggaactgaggccaggatgcgattggcccagggaggtgagaccagtactagcagctggcaagtgtaacaggtttgcaggggacagtggcagggcagaggccgcgagcttcctggggtaggtccctgggaaggccctccttgagagggggcctccagctgctccctagatcgggggcgggaggtgggggaggtgggagaggagggtggcctcactggagcagaggtgggggcatcaggagatggagggcattgcaggaccagggtctggactggcacaaggcgggcgccccgggaggagcagagggcctggaggagcttctgggaactgtgtctgtgaggttggtccatcccagcactgagatgcagtagctgtgtcagctctggcgagtcacttcacctctctgggcctcagtttcctcatctgtagaatgggagtgctagcatggaccttacgaggttgtgttgagcccatgctgacagcacatacttggtgtttacaaagctgtgttggcgtcgggagcttgcacaccagccagttcgtctttgccttgtcacgcaccagcctgtgttgacacgtcagagctaagcatttgtccggtgacttcccaagatggattcttaaaagtggaattgcccagtcaaaagattcccacagtgttaatgtttgccgcatggcccacggcccccaggggtgagaatggctcctcctcacaacagtgccggggtgt

SEQ ID NO: 17778 - DNA, 1970 bp, Artificial sequence
  DNA replication origin
gggggcgcgcgggaccggccgtcagcaccgcggacagctccgggcgtgcggcggcgccgggacggcgaccccagcccccaccccgcgcccggtccctacctgtcgtcgttctggaaggacgggtcgcccagcagcaggtcccggaagcggtagcgcggcggcaagggcagcacctcggagtccaggtcgctcatcttgaagccggcggtgtccaggagcgcgccgtcccccgcgcagggccgcctgcgggcacacgccagcgcccctcagcccgcgtcgggcgccctcgcggacgcgcgcagcccccggcccgccaggcccggcccgcgcagcgcagcccgcggccaccgcgacccaccgggcgggcgggcggccgggcgggggcgggcctggcggcacatgcgggcgggggcgcgcgggaccggctgcgccgggctggggctagggcgggggctgcgcaggggcagggggcggggctccctccaaagcggccccggggcctggcaggaggtaagggggacgggagctgtcatggccagctcagggacaggcgcgcaccactcctccctgatcccccaagagccaggatggaggccctccccctgctctgaagccccgccacacccctgcaacccctcccaactccccagctcccctccccgtccccagggtctttgccgaggccggctgctcaatcttccttcagggtccagccccagagacccccgtctcagaccctcaggctgttgaggggtgagggtggagtgaccaggaggcctaagaagacacccttgtttgcagcctccccaggcggagcagctcagctcaggtcagaaccccggggggctgccaggccctctgggccctgagctgccctgccactgtcaccaggtgagggatcaaagggacacagagagctggcagcgcaggttaggggcatcgtggcacaccaggtagagtgggaggacccctggtggtctgcagttcttgggggcccaagcaggtgtcttccaggggtcttgcatctttcctgtccccatgtcccccactgaagtgagttttggctgctccaggagaagcaggagctgaggggcagggagctccttacctggcccaggccggcccttgttcaaggcttcgaggccagcaggagagcagaggggggatggagggggctggctcccccacgggcaggggcaggaggctctgaccatacccagctccccgtgctgtgcccgtaggccctgcacagaggccactcatttggaacaccaggtccagggatgctacaaaactctcctctctctcctcaagtcgggaggggtgggcacattccttgagcccccaccaagtgcctctcctgtgtcccctaaccctcagacaagcagcaggcaaggagctatgggcaccccaggctgaagctgcaggcagcaggtgcgtgccccaaaccctgctccttgttctgaggtcacaggttcaacccccaggatctggcagcatttaaaaaataacattttcctaactgcatcagcgtagctgcatgtttttccttagtcacaagctggctgggccatggggaggtgcaggcaggcaggggaaccacgtggccaggggtcggggctctattttcttgattttgtgccttcctcactgaaagcccctttcaatggcaaaaccccaagagactgccggctcctcaggcgtggctgcctcctcccgtccccaccccgtctgccttttgagcggctctggttcctcctcctggcctcaaggcccagtcttggcagggcccatggacaagctcaggggcttggaccttggcttgcttcaggagtcaccaggggaaggaagtgcaccaggagtccagagacctggccccacccctgctccccagatgtggcctggggagggtgacaaggacaagatgcccttcttcccttgggaagctgctttgacacttgagcgagcac

SEQ ID NO: 17779 - DNA, 1576 bp, Artificial sequence
  DNA replication origin
ccccagcccggcgcagccggtcccgcgcgcccccgcccgcatgtgccgccaggcccgcccccgcccggccgcccgcccgcccggtgggtcgcggtggccgcgggctgcgctgcgcgggccgggcctggcgggccgggggctgcgcgcgtccgcgagggcgcccgacgcgggctgaggggcgctggcgtgtgcccgcaggcggccctgcgcgggggacggcgcgctcctggacaccgccggcttcaagatgagcgacctggactccgaggtgctgcccttgccgccgcgctaccgcttccgggacctgctgctgggcgacccgtccttccagaacgacgacaggtagggaccgggcgcggggtgggggctggggtcgccgtcccggcgccgccgcacgcccggagctgtccgcggtgctgacggccggtcccgcgcgcccccgcagccgccggcgcccttcaacttttcccggcttctggggacgcagaagtttcggagggggtgcgggcagggggaagcatcttctcgggagggggtctccggaggagggcgcgggatgctcggagctgcggagtcttccagagcccgacttggggcgcggaggcggagggcggcctggccttccggtgtctgctcccaacccccagcaccccagtttttctggttttgggggcaagccagggccggaagcgccccggtggcggagcccgcagcctggctgagggctggcgtcctccaggctcaggcagcggtccttgattaattattcaatgagggagcttgtccttcaggttcgtgacctggtcacttattccgagtcaccgtgtccccgtcccctcaacatctcctgggctaaaaaggcaaaatgaattgtgtctttcagttaaggaccaacaggatgagcccatgggaataattcatccgctgagggggctggcaggaagctggaagaaatgttgcttttctctcctccttttccccaaatagctgtcttgggtaaacacccagcactttagctctgccaggctctggggaggcgcttttttgcctgcaagtgaaggcaagtgctctgaggactcacgcggagctggagcccgcgggggcttcaggtcaggaaccgctcctcttccagcgtgtagggtacggcagggtcggggttgtcactgtctccagggctccgtcaccacccagccctgggctcagctagcaaatccgcactttcccccaacaacgcagttattccggttagcacacaaagtacacgaggttgaaaatggtcaggacacaaacagctttcagaataatctactgctgaaaccgcagctgaaaaagaaatcatgtttgtaactagagtcagtcctagggactgtatccatgaggaccatgaagatttgtaaaaagggggtcttaaaacccctctgcctgcggggaatggaatattctaccagacctcccataacatttggttgtgtgaaccaagagtcaggagtggggactgagcccagtcttcatccactcagaatcagggagtgagcgtcctgcagagaggccttttaaacttggtttttcatcttgt

SEQ ID NO: 17780 - DNA, 1408 bp, Artificial sequence
  DNA replication origin
tccctgtgtgggcagagggcagtcagccaggctggtcccagggcggcgtgcgtggctgggaggctctcctgggagccacacaaagcttccctaggccgaatccgtggactcaacatctttctaagccagcaccagcccctcagatgcctgttcagctgggacttggttaattcttgaaaacggcagccctgggagatccttccgatattgggcaggaagtggtgtccatccgcctaatggtgcctggggctcccagatgactcgataacgcctgtggctgtggttgatcaaattgtaatgctgtattcctgagtgttcaggagtggacagcagaggcttttgctgtccgcctagagagaaccatgcccatccctgggagaggagaagctggcatgggatttcacaatgagtccctgatcctgggtgtggttttttaaaattgtggtaaaatacataaaacagaatttaccgttagtgacatttagtacacaacactgtgccaccctcaccactgtaattcgagaacatttgtataccctagaaggaatctccttaaccactgggactcactccccaatgcccccttatcccccagcccctggcagctaccgatttgcattctagcggtcttggcgtgctgtgcccactgggcacatgggttgtgtgccgatggtattaggaggtggaccgctggacgtgtgtggctgtgtgtgctagctagtgcgtggctgtgggtcctctccaggaaaggcccatggggtacagggcatctgtgccacccccacaagtgccctgctctctctggttggaaatgaagtatacagtgaggttctattggagggagagtggccagggattagagcttcggggctgtgtggtcgccatacctgtcctgtggcgctgtccctcaagatggcctcagagatgctgtgctgcataccttttctcatgtgtgaaggatgggagtggacctggccctgtggtggtggtgtgcataggacgggaggggacctggcccctgtggtgttggtgtctataggacaggaggggacctggcccctgtggtattggtgtctataggacgggagggaggggacctggccctgtggtgttggtgtgtataggacaggagggaggggacctggccctgtggtgttggtgtgtataggatgggagggaggggacctggccccagtggtgttggtgtctataggatgagagggaaggggacctggctcttgtggtgttggtgtctataggatgagagggaaggggacctggctcctgtggtgttggtgtctataggatgggacagggaggggacttagcttccctctgagagtggttccccacttctcacctctgagaggaagcttgggcctggtggagatggtggccttgggcaccc

SEQ ID NO: 17781 - DNA, 1602 bp, Artificial sequence
  DNA replication origin
ggggagggaacaggcaggtggtgacaccccaaggtggggaagacaaaaggagcaggcggggggtggattatgacacccattctggacattctcaaagtgcctgccaggtgacatctcgtgggtgggcacccacgcctggtgctatggggggctgccagtctgagactgtcagtctgagacccatctgggtctccggctcagcagtgggatctgaagccccaaactagctggggtcacctcggtggagtggtacagcctgaaactggccaagtgggagaggagtgcagggctgggcagtgtgacatttacagatgtgagggcaggtgtgggggcaggtgcaaaggcaggtgtgggggcaggtgtgagggcaggtgtgggggcaggtgcaggggcaggtatggggggcagttgtgggggcaggtgtgaggcaggtgtgggggcgggtgtgagggcgggtgtgggggcaggtgtgggggcgggtgtgggggcgggtgtgggggcaggtgtgagggcagttggggcaggtgcaggggcaggtatggggggcagttgtgggggcaggtatgaaggcaggtgtgggggcaggtgtgagggcaggtgtgggggcaggtgtgctggcaggtgtggggggaggtgcaggggcaggtgtggggggcaggtgtgagggcagttgtggggcaggtgcaggggcaggtatggggggcagttgtgggggcaggtgtgaaggcaggtgtgggggcaggtgcgggggcaggtatgagggctgcactaacccaggacaacaaacaagcatagtaagaactggagatgaatgactcagagccgacaaggagagggcaggtcagcatcacagacctcctggagggtgtccaggggagtcacagaggaggtacaggcggtgctgctccccacactgctcctgtcttctgagtccaaactgggagtgccggaatcctcacccttagccctcatcaggaggcaaccagggggtgtgtcctgactttggtcactgtctggctggggagacaccagggctgacccttggactgaggtgagacctcttgattgcccccagtgggagaagggcatggagccccaggaaggagggaaggaagaaggaaaggaaggaagggagaaaaaagagaagagagagagaatgagagagagagagagagagagagagataggttggacttcagcagacaaagaacccggccaacaataaaacaaaacccagagaagaaggaagttccccaggaggaatttgggcactgtgtcaacttgataaggacaaggtgcaatggaagccacactcgaagatgagatgagcctgttcatctcagcagccagtggcagagggggagaccacagaactccagaagcaagcggagagcccacacgccatacagttatgactcaatgagcccaagccaggaggaacaggagaggcatggctgaaattggattatagacacagatggctggctctgaccagcacagcaaaggcacaacaagatccaggcaccggaggaagggtgaggacacttccactggaggattgcttgtacccctgggtagaagcctcaactagtttttggtatt

SEQ ID NO: 17782 - DNA, 1743 bp, Artificial sequence
  DNA replication origin
acgtggtacagcagcaagttgcgaagatcctcctcccctccccgcaccccaggcggcacctgctgcagccggctgtgggcactccatggacaacacggcacagatgttctcttgtcacataactctcatcctgtacttcaaaggccacgagtaagtgaagacccactgcactctcgaaaagcaggaacggaaaaagtcacagcactgcatcatggagcagccgccccgggtgggcgcgcgcgtttgcctcctgcgtgaggcttcctccagcactgcggtgggctgtgggttcgttcccagggaatgtgagcgagccgcatccgcagcccaggcaccctccctcccagcttcctccccgccccagggtgaccatgtatgggcagccctgatgtccatcggccctttgtgcagtcatggcgcggtgaagggccctgcaggcggcgcccaggggtggtgcggggctccgcctggtctgtttactcacagcacagcatggggctcactcagcagcacgcccaggagaagagcccagcctcattctttacagccgttctggggcactccacaggagggttgaagggggcttccatctgctggtgctccccaacaccaggggctggcagagggtactcgtgctttgcaggtacaaacagcgctctcccctggggtagacccgagccacgacaggcagccagggcgacatgcataggagcgtgtgctcagaccacacacagtggcttttcaggggattttccttactcagccacatcggggagggcgctagggcaggtatcgggagcgccagtgagttggtcattttctgagcatgatggcggctcagcgtttggacccccagagggagcagggccctgtgcctcagcctccctcgagtggtccagccctccctcagcatgggtgctgaagaaatggaagcctgtgctgcctgtcagggacctgccgctggagttttacccccaccccatccgcgttggccacccaggcccctgtggcacgggtgcatggaggcctagtgaggtcagaaaccgtccagccaagggtggggggattcagggtgggggaacaggcagccggctccgggagggcttctggtgtgagtttggggcgggccggcccactccctggagttggtgctgtcagggggtcctaggcccacctgcctcccacaggcctctgtactcactgggccctggctgttggttgggggaagaaatagagacagatccctggcttgcaaggactccaggtctggggtcagagcgtggacaagtccggagggctctgccacccggcactgctgaggacaggggcgcatctgacagcctcctgcctctaccgagctggcttcggggcagctgggcctcccggtgccaataccccccggctgttacctgcctgtcacctgggcgagtcacctggagccgcgtctgtgacatggaagggaacggttacaaaagccacatcatgtgagatgtgcgggcccagccaggcatctggggcagaccagcgctgcacacacacaggtgggatctgtgcccggtgcccagcctggcatacaggcaccatcccggagtgcccccatgggctgtgccctgacagctttggaggtaggaattggggggtgaggaccctggtgaggacaggcaaactcagccatcacccccctggccagggtactacacccaccccacaccagggctgggggctaggggtgggcacagcttg

SEQ ID NO: 17783 - DNA, 2162 bp, Artificial sequence
  DNA replication origin
gccaccagccctcgcggctcctcccctccccccgtgcgcgactgtcattgttaccattgcttggcttctgccaaagcagccgcagggccaccgggtgcttgaaccttctccatggggcgtcctggcggtggtttgagccgggcagtcctccccgccctccccagccccccagccccggcacccggccgttccactgcgcggcggcgtggggagggcgcggcgcgagctgagatggttccgcccggcgccgcccccgctgcccgccgcccgccgcccgccgcgccgagcgctcccgcaggatggcgcgggccaagctgccgcgctcgccgtccgagggcaaggcgggcccggggggcgccccagccggcgccgcagcccccgaggagcctcacgggctcagcccgctgctgccggcccgcggcgggggctccgtgggcagcgacgtgggccagaggtaggggcgcgcgggcctgggaccccgcttgtcaaatcgcgcttgcatcctgctcgggctgcgctggctgggctgcacctgcgttgcctgcagcccggggaaggggggaggccagggtctcccctcctaagcccaccacagcgccctgcttcctgccgtgtctccagcctttgagagcctgcgggaccccccactccccccacgtaggggctgaacacggcggggctgcaggtgagactgcaggggagggaggaagtggacccagctctgtgccaggcactgggggcccctgcccgagccctgtcccacaggagccccgatcttgttggtgccagcgccactttgggggagacagggccggcatccgtgtccccaccccagaggtgagtgaggccgaagcctgcacagcaggtcagggctgggacacagggctcaggctgcctggggagccctgctgtggggtatgcttgggctggtgtctggtgcttgtggcaggaggggtgcaggtggccgtcctctggggatggttgggcaggtggagcagcgcctacccctccttggctcttccgcaagctcagggtgggacacagcacccccatttcacggatgaggacaccaaggcctcatctgcagcagcaaattcctagccagcacctttcccgtgccaggagccgttctagatgctgcgggggaaatgaggatgaatcagacctggcctggtgtgggcacatgtcgtgggcacggaacctgttcctgggagagagaggtgcaggccaggccgggacagaagagccggggactcctggggtgctggtccttccgggacaagcatggggagatgggcaggggccttccaggtagcggaagcagtgagggctgaagtttcatcagggctggggggcagggctggcagagcagggcctggcagatggcagggccaagggtgcccaggagcctctcccttacccctcctacctggctgtgggctgttgggcccctcccggcacccccatttctagctcttcacagcagccctgggggggcactgcccagcttagtcccatttgcagaagaggcggttgaggctaaggtcaagcacctggctgcagcctcctgcagctaatgggcagcctccgccagggaggcgagcactggccaaggccctggggaccacagtcccctccccctcctcttcctggatgctggcgtggggggaagggggagggcagtgatcctggaagccctgctacagccagccctcaaggggcaggttccttgccccatccctgttcctgcagggcccatagggatagcaggttctgcccaggctgcgtctgagcccgcagtgcagtgcagcatgggagctgtagcctaggcccacctcctccaggaagccctcccgcatgttcatcccagccctgtgggctatgcactgtgctgacggtttcacatgggtggcctcgctcatcccccggcagcccctgaggtgcagagtccttatagcctccttttgcagagcagaggtaatggagctgctgcccagctgggctgagcagcccctgggcctggagcattcatacaacagggctcgcgctgagatgagtagggcaggctcctgagcagaggacttggtaggtttgttcttctggagtgtggatctcacggaaaacacaggcgaggccagagccgagaggcaggtgtggtctgc

SEQ ID NO: 17784 - DNA, 1566 bp, Artificial sequence
  DNA replication origin
tcctgacccccagtatctcagcacgtggctatgtttggagacgaggcctttaaagcggtcattaaggtaaagtgaggccatgagggtgggccctaatcccacaaaactggtgtccttataagaagagatgaggacacagacacacatagcgggacggccaggagaggacacagggagaagatggtgtctacgagccaaggggaggggcctcaggaggaaccagccctgcccacatcttgagctcagacttccagcctccaggactgtgagacaataaatgaggtgtgggcccagcaaacacccctgaaagacagggcctggtgtcccccgagggcctgggaacacagccccacccctgcggctgggcactccctgtgcacgctcctgggtcaaggataaaccagccgcccaaacaggtgcattctagggtgggggagaaagagcgcagagcactgtgtggaaagaaggtgtgcagcccggagcggggcaaagccagaggagggcgggggcacctcaggggtgacgggaccatactcaggaggggccctcctgggagagaggccatctggggcaagctccaaggggggcttcaggcccaggggaaggggtgtgccgagccggtgtgaacaccatgaagagggtggggcgccgggcgtgtgcccggggtgaggggggcatggaggagcagccaggttcttggagaggagaggggcaaccatgaaggtctggatctgcaggggagggaggtcctggcaagggtgtccggggtcggggggctcaggggaccatctcctgagccaaggaacatcagggcgaggggcttggggcggggccggggctctgcgtgccacagctggactgacagacctgtggctgccatagacactggggtgctgggcacagtggcaggagaactggaccacgctagacctcaggctgtgtgggggcctcaggcttgctccctggggtcaaagagaggtgccccacctccctcagggatggtgtgggggcagaacacgcagtccaggtgagctcctcagcatgggccccctgcccagtgcagtgctagggccagaagagtaggatggggctgggggaacggccccggagaggatgtggggagggggctgtgttggtgccttaagtcaggcatgaggctgggagaccccagctgggaggggcaaggccgcctaggtccaggggtggtagggacacagaggggctcagggcctcctgatgcagcggggtctcactgagaggccctgtccccccattgggcacttttactcaaaagctttgcagtgatggtctcctgaccccaccactgaagccacgctgtctaatcagctcccaatccctccccagcctcacacaggggagtgagaaggaaggaggagaccccggagctcagggtcaggggagctggactgtgtgggaggagggacagaggccagcctgcagcacccataagtgggcacagggtgttaggggagctctgggcaggggcaccaggagcaagtgccctcccccgacaacgcctcctgtggctcagtccctggtgggcag

SEQ ID NO: 17785 - DNA, 1288 bp, Artificial sequence
  DNA replication origin
cgttttcatctcctttttgtggtggtgctcggagaagtgggcggccacagttcattaaaaattaaaagcagaggaggcttcattaatgtctctggcatcgcaggctccagtttctcagggagtctgccaggccccagcgtttctctgcctccacgtggagggtgccatctgtgcaggtgggcactccccgctgagctccgtgggggctacccagattggggcccacagcccctcggtgaggggaccagggtctggctgggctctctccctaaggggggctcagtgctcttgtttctggggtgccaggaggaggtcaaggggcctcaaagagaagctgctgggggcgcgactagtcccagaccagcagccctcgaccccacggtgtctggggaggaacttggctgtccggaagccagtgaggtcctggcaatgggcagggttgcatctctctgtttcctggctgtggaggccaaggggagcccagggggacgcattggcttcgtggtcttgccaggcagctgcagaggcccaaggcccagaggtccagctgcaccaggtccacggggaggtaaagggaggagcaggagctccttggaggcctatgaccgatggagggttgggggcgtggccggagctggctggggagatggagctggctgggtgttgccttggagtggagtgtggggcgatggtcagggcggagctgggcacccccgcctaggaggagtggccaggcaggagcccaaggcccagagggaggtcagagggaagaaacatcctgagggcagagctgcaggacctgctgatggctctggtctaggggaggggagggtacaggagcctgaggttggtgggggatggttggcctggtgccatcaggaatggagaattctgcctcggggagggggagccggtggatgccagagggtagagtggggctggacggctgccagcagagccagttgggaagtcacccctgcgtggcacttaattcccgggctgggtgggagagaggcacctgtggcaagccctggggtcccccaaggagaacggagcggaggggagaacaacagagctcggggaggccgtgctgagaggcccagggagtagaggagattctggggtctggtcaccgtgaagggcatggtgaggctccctgccggagaggagagggtgggaggcagtaggagcaagtgaggtgagcagaccccccgcgttgaggcttttgccatggagggcgggacagtggtagggaggcggggagggtgggttcctaagctccatgctt

SEQ ID NO: 17786 - DNA, 1421 bp, Artificial sequence
  DNA replication origin
ccatgagcagcggcgtgcatgggggttgaggggtgtctgggaaccagtggctggggccataggtgagcctgagggaaggggagcggcactggctggaggggccccacagctggcctgcgaggtgggtgcagggatgaccacttcccaccagcccatcttccctgacagcccttgaggctgcagtggcccatagccttggagcacagccaccagcggcctccagacagagcagctgaccatcagctgtggacagcctgtatgacgcaggtcctacggcatgttctgagcacttgcggtgtcctgagcaccatccccagggccatatgggcaactttacctcctggcaggtgccctgcacccacggaggcttgggcgagggtgtgtggagtgagtgccgcaccctgagccccaacagggcggcctggagggcccagactcacagcagcgagtgcccagggctgcggggaggaatcttcagaggagccgaggctgggtcggctgtctgctgggtgtgacggaccccaggaccctcctgggtctgaggtggagggagtggtcctgctgggccctgacttctcaactcctgcagttggaaagttggaagaagtcagtcaggttggggctcccggcgtgtccccagcctgagtccccactggccctgagcctccatgcccctctctgcttcttcagggtccaggtggagttctacgtcaacgagaacaccttcaaggagcggctcaagctgttcttcatcaaaaaccaaagatcgagtgagtggggtgcctggagggccactcccaggcagggaggtgttgagggcgccgggagcaagcctggcgatggcgaaggctggggctgtgagctcagggagagtccatggggtgggagccacctgagtgctgcgggggcatttggaagcagggtgggggtgggtctgcatggtgagtggggcacagggtagccccctcttagcttcacactgtctgagaccagggcctctgcagcgggactcgtggggacaccgtcctgcctgctggacaccaggctgggtggggcaggaccatccataggtgccagcaaggtctcccctgtggccacgccctgcctcccacccctccatacagccccaccctccccaacagctccctgccccgttcccagccagagcttggcatcatgctccccccgggattgcaggtgaggacttggggggtttccccaggggctccacattcacctgcctgctccccaatccctatcctgtcctccaagaagtggagtggcctctagaaatcccctgcaccccaagttcaggcacctgtaaggtggggccagggacagagcctcttggaggctgacccaagagcatcagcccccaaacaacgcagggcacacagagctctgcgtgcagcccgggtgtg

SEQ ID NO: 17787 - DNA, 1128 bp, Artificial sequence
  DNA replication origin
aagagtgctcaggcgctgaggggctctgcagccacgtgtgtggtgtggttgtcaccatccagccatcggggtgaaccctgccagcatgctggtcccccctctggctgcgcagagcaggttcttccctggagagaaggcctgactgccgggagcctggcttctggggacctaaaggcgtccatgtaaacttttgctcaatcccccttttcacctgttaccccgtcacaagggggcctggcatccccaggccagagactttccctctcctaagaatgaacctcctgtctttgtctaggtcagaagagggcagaacccactaggagagtttgagaaggagaactgggccctgactgactctcaagctactttcctaggtcactccccaccccaagtcccagggtcccctggggcttctggtttcacatccccacagggcccaagtctgttgtgttcactgcccgtcccctagcacagcgtccaggacatggatgggggtgggaagatgggtggatgatggatggatggttggatggatggtggatgatggatggatggacggacggacggatggacggatggatggagtggatggagggatgagtggatgggtggataatggatggataggtggatgcatggtgggtagatggatggatggatggaatagatggatggagggatgagtggatgggtggatgatggatggatggatggatggatgatgcgtggatgggtggagggatggatgttggatggagggatgagtgaatgggtggagggatgagtggatggatggagagatgagcagaaggatggagggatgagtggatggatgatggatggatggatggacagataagtagatggatagatggatgagtggatggatgatgagcagatggttggagggatgagtggatggatggatggagggatggatggatggacagatgagtagatagatggatgagtggatggatagagggatggatggatgagtggatggatggaggaatgagtggatggatggagagatggatgatggagaagtggatggatggatgagtgagtggaaagatggatgggtggatggatgatagatggatgtccagatacttctgtgggcac

SEQ ID NO: 17788 - DNA, 1334 bp, Artificial sequence
  DNA replication origin
acagtgtcttccagggccggtgaggctgagggtggcccccccaagtcccagctgcaccccccgccccggcttacaatcatgttttccagcgcgtgcttggccagccagcagttcagaaagacggggatgaacaggttccgcagcggcggccagaagatctgtgaaggggacaggtcagggctggggctccagggcccgcactcctggcagctggggctcacccaccgtgatgatgaagggcagagtgttgatcatctccaggacgaaggacacgcggaagatctgctcccagatgttgccctggggccaaacggggggtatcagcgggggcgatggagggtgggggtggggcccagcaggggaggggcagggtggggaagagggcgaggagcccaccctggaggtcagtggatgaggctgggaagtgtggggaaataggagagggtgggggaggtgggggaggctggggagggtggggagggtggggaccccctgtgaggtgccatcccgggcaggcactcactttgtagctgaggtagatgagaagcatcgtctccaggaagcttattatggccacgatgacctgggagtcaggaaagggaaggagctctggagcaggccggggctggggctggggcctgaccccacaggcctcgcgggcaggtaccacacaaagccaggtgtgtgtctggggtctgccttgaccctcactcccatgtcaggacagtcttagccaccaaggcctttggctgacccccgccagggccgagggcagatggagtcttgaaaccatggtcctcctgggccgcccactctaggcccagggtgggatggagggtgcagtgggtgaggcaggacgctcaggaagacaccagagagcggctatcccgctgccctggtggggagggaacggagatggaggctcagtggacctggttttcccccacggaacccctctcagcacaggcatctactgacccctctggaacatgataggggtgggtgtgaaagaccctctctggtctcagatggagacatgggacccagtcatgaactaggtcacccacccaggagccagccagggacctggcctgtgcactctccaccccaggaaaacagcaaggacacagatgggtcagtggagggagagattcaggtggtgaagcagacagagggggtcaggaagtcctcagggatccctgggaaaattgtgtggagagcagtagagcctgggtcggtcctcagcactcactgaacctgggacccctgcttactgagcctgagtttgtcttcagcattcactgagcctgggttccctacttactgagcctgtc

SEQ ID NO: 17789 - DNA, 822 bp, Artificial sequence
  DNA replication origin
ccccagacgcaccgtcacccacgtgtgcacatgcgccctgccccagacgcaccgacacccacgtgtgcacacgcatcctgccccagacgcaccgtcacccacgtgtgcacacgcgtcctgccccagacgcaccgtcacacatgtgcacatgcgccctgccccagatgcaccatcacccacgtgtgcacacgtgccctgccccagatacaccatcacccacgtgtgccccagacgcaccagcaaacttgacgtgaaacttgttttcaggtttgaggatctggacgtagagggggcagttgggggcgaagtccttcacggcccaggcgcgcaggatggtctggtggtcctggcggggtgggtggttggtcagtgcagacgggctggcctctgtgggctgctgggcggcaccggcagcctggggcaggtctcttccctcagggacccccgctccccggccccacggtgcccctcccgcctgggcagggcctcagcctcactcactgcagccgtgcggtccacctcgttcctgctgctgaggatgaagcaggcctccccattgtccatcctgcaatgcaccagggcctgagcgtgggtggagcaggggaggtgggcagtgcagccgggggtgcggaggtgaggtggggaggacctcctctgggaggaggctggtgcagcaggtgcacagaaagagactgagaggacggctggatggaaggcggagaggatggaaggcggggaggatggaaggcgggaggaggcccctactctctgctggtcaggagtcacagtgccccctcagtgggcatccccatactgcccccc

SEQ ID NO: 17790 - DNA, 907 bp, Artificial sequence
  DNA replication origin
tggaccgcacggctgcagtgagtgaggctgaggccctgcccaggcgggaggggcaccgtggggccggggagcgggggtccctgagggaagagacctgccccaggctgccggtgccgcccagcagcccacagaggccagcccgtctgcactgaccaaccacccaccccgccaggaccaccagaccatcctgcgcgcctgggccgtgaaggacttcgcccccaactgccccctctacgtccagatcctcaaacctgaaaacaagtttcacgtcaagtttgctggtgcgtctggggcacacgtgggtgatggtgtatctggggcagggcacgtgtgcacacgtgggtgatggtgcatctggggcagggcgcatgtgcacatgtgtgacggtgcgtctggggcaggacgcgtgtgcacacgtgggtgacggtgcgtctggggcaggatgcgtgtgcacacgtgggtgtcggtgcgtctggggcagggcgcatgtgcacacgtgggtgacggtgcgtctggggcagggcgcgtgtgcacacgtgggtgacagtgcatctggggcagggcacgtgtgcacgtgtgtgtcggtgtgtctggggcagggcgcgtgtgcatgctgttgggtgatggtgcgtctggggcagggcgcgtgtgcacacgtgggtgacggtgtgtctggggcagggcgcatgtgcacgcagttaggcgagctgtgtggggcagcgggaggggctggccctggagctcctcacacaagcacaccaggaggtgctggaggggacggcagacccccatcctcaccgcatccgagaagggacctagggggtccaaactcttcagatgaagtcttatgctgggatcctggggtcagtgaaggcagggtcagaggtcaggtgggggcaggagcacc

SEQ ID NO: 17791 - DNA, 855 bp, Artificial sequence
  DNA replication origin
acagtgcatctggggcagggcacgtgtgcacgtgtgtgtcggtgtgtctggggcagggcgcgtgtgcatgctgttgggtgatggtgcgtctggggcagggcgcgtgtgcacacgtgggtgacggtgtgtctggggcagggcgcatgtgcacgcagttaggcgagctgtgtggggcagcgggaggggctggccctggagctcctcacacaagcacaccaggaggtgctggaggggacggcagacccccatcctcaccgcatccgagaagggacctagggggtccaaactcttcagatgaagtcttatgctgggatcctggggtcagtgaaggcagggtcagaggtcaggtgggggcaggagcaccgtctgatgagcacctctatgggcagggaccatgccgggtgcccggggaacggggggcaggccccatgccaggtgcccaggggacaggggtcagggcccacatggagtgcccaaggcacaggggccagggcctgccccgccctggaactcctcgctgagctgggagagaagcacaggagcgatggaaggtccaccgaggctcagaccaagtagggggttgaggtccacagactctcggggcagagatgctgaagccggacagcagacacgggggtgccaggcaagggtgcatctgcatagcaccttcaggaagtgagcaggtactgtgggggaggagagagccggcagagcggcaggtggaccggcctcccccactgcccgcagaccacgtggtgtgtgaggaggagtgcaagtacgccatgctggcgctgaactgcatctgcccggcgacctccaccctcatcaccctgctggtgcacacgtcccgcggcc

SEQ ID NO: 17792 - DNA, 1827 bp, Artificial sequence
  DNA replication origin
cctccatggcggggccggcgcagggagacaacgcagggcctgcttgggggcggggatgggcttcccagaggaggggcacatggcgggcaaaagtcctgcatagggaggggatccatgccaggggaagcagaggggggcacctgcagacccagccggggagaaggggcagccatggccgagggtgacgctcccctggccccgccctggcccacagggagggacaggagtctccggagcagtggcagcgcatgtatgggcgctgctccggcaacgaggtgtaccacatccgcatgggtgacagcaagttcttccgcgagtacgagggcaagagcttcacctacgcggccttccacgcccacaagaagtaaggccgggctgcatccacagggctggcgctccagggctgctctgctctgtgccctccccaccctcccggtcaggcacaggggtggccctggggcggggctgcagagggctcgggggagggcatcaggtcatcctgcctggcgagggcagccgcaggactgggctccgggtccacataaaaacctgccacgcggctcctccctgaggcttgtgggctgaccccagctctctggtccccaacacctctgggacgggagggctcagccaaggtccctgaccccaaatggcccccaggaggaagacgcggagctccggtggggactctggtgatttgcaggaagggcaggcagggagcgggacagggcgggtgagcggcggtacctgaagttgccggtgcctctgcccaggtatggcgtgtgcctcatcgggctgaagcgggaggacaacaagagcatcctgctgaacccggggccccggcacatcctggccgcctctgacacctgcttctacatcaacatcaccaaggaggagaactcggccttcatcttcaagcaggaggagaagcggaagaagagggccttctcggggcaggggctgcacgagggtccggcccgcctgcccgtgcacagcatcatcgcctccatgggtgagccgggacaggcgcgcgggactccctgggcctgctcctttggcgggagaccaggcgggacaccggcaggtgaccaggtgggatgggagaccaggcaggacagggggaggtgaccaggtgggacaggagaccaggcaggacaggggcaggtgaccaggtgggacgggagaccaggcagggcgggagaccaggtgggacaggagaccagaccgggcagggcaggagaccaggccaatgtggcccccagacccagttcctcttggcctatgcctccaaccttggacaggtggagtctctctgggcctgtttttgaatctgtcaaacaggtgtccccgccttcctgtggccacctttgtgggcattgctcactgtgtccaagtgcctgtccaagtggggccgcccacaggaccggttggcagctcaaccggaggctcctggtggtcccatcagcccggagggtctgcttcacgtgtgtccctcaaacagtcgggagtcctgacgtccactggggccaggagttggcggaatgaggtcgcagtggccgagggctttggcctcttctcgtgccttcagggatcctcccggggagccgcttaccagacagggtcaggctgcctctgagcaggtggaggcccatggcccctagggcaccacccatagtggtgttgccccctccccagccaggccttcctgggggacagttagggagcagggccaggccaggaagccactcaggccacagacccacagccgggccagcatgttgccacctccgtacagtggcccaggcagaggctgaccctatggggcac

SEQ ID NO: 17793 - DNA, 907 bp, Artificial sequence
  DNA replication origin
gcatctggtgctgaggccacagcagctggcctgggtggcaccgatggggcactggggccccctgggtcttcgctcaacatcatcgccaccccagaggccactgtccctgttgtatggagggggaaactgaggcatagattgaagctcctcagctggagcacaggagccaggccatgacagggtctccagagctgactgtgttcacctgagctctgggaactcgccgcccatggagggtgggagtcgggctgtggccaagcacagggctctcttccagggacagtggccatggacctgcagggcacagagcaccggcctacgcagagcggcggtgggggcgggggcagcaagctggcactgcccacggagaacggctcgggcagccggcggcccagcatcgcgcccgtcctggaactggccgacagctcagccctgctgccctgcgacctgctgagcgaccagtcggaggatgaggtgacgccgtcggacgacgaggggctctccgtggtagagtgagtgctgccttggagacggctcccagtggggggaggagccgcccatgagtgcgggggatgggtgtcggagcatccttggtggtcccccatgctctgaattgcagcttctggacagctccgtggaagtccttgtttgacaaatgaaatcttcagggggcccaacacagacatcagggccacatcaccctcgtcgccggggagcacttttgagtgtcactgagatggggtgtgctgggctacaccctttccagttggggctgggggtgcagagctaattggagcgaggcagctcactggcacaggggctgtcaggcaccaggcagcgccaccctcagagaggggcccgttcccacccacctcaccagccccatagtggcccggccactctctga

SEQ ID NO: 17794 - DNA, 1279 bp, Artificial sequence
  DNA replication origin
gtgcaacccctgggcaaggcagtgtcccagcctggaaaccacagcccgtcctgagttgttgtcctggcctaggtttggggccaagtcctcctgcttcaaatcatgagacaggaggccccactctgttctcagcagcttctgccttttggcctcagccaggacagacaagtgccccagctgcagggcccgaggtccatcctcagcggggctgcctcactctgtcctggcctttgcctctggggtggggtcaacacactgtaatgacagcccagctgctgggaaacagccctgaaccattgcatgtgtgtgttgggtgctgctggggacggggtggtggcctgctggggacaacagcctggctggacaagtatgtgggtaagagcccaaggccagagtgcctgccccaccagccgggggtgctggggatgtcagggaggcatggcgggcgggcagagccctgtgggttttgcatgtggctgaaaagcctggtctaggctgtggtgggaggagaaagaccgagtagggcatgggggtgggtgtgcaaggggggtgtgtccggtgtgtgtgtgtggtgtatgttatgtgtgtggtgtgtgtccatatgtgtaatgtgtgttgtgtgtcaacgtgtgtttgtcacgtgtggtgtgtgttgtgtgatatgtgatgtgtgtctgggtgtgtgtggtatgtgtccgtgtgtgtgatgtgtgtctgagtggtattgtgtgtggtatgtggtgtctgtgtgttgtgtgtggtgtgtgtccgtgtgtggtgtgtgtggtgtctgttgtgtgtgtggtgtgttgtgtgtggtgtgtgtgtctgtgtgctgtgtgttgtgtgtctgggtgtgttgtgtgtccgtgtgtggtgcgtgttgtgtctgtgtgtggtgtgtgttgcgtatgttgtgtgtccgtgtgtgtgtggtgtgtgtctgtgtgttgtgtggtgtgtctgtggtgtgtctgtgtgttgtgtgtccgtgtgtggtacgtgttgtgtctgtgtggtgtgtgttgcatatgttgtgtgtctgtgtgtgctgtgtgtctgtgtagtgtgttgtgtggtctgtgtggtgtgtctgtgtgttgtgtgtccatgtgtggtacgtgttgtgtgttgtgtatgttgtgtgtcgatgtgtgtgttgtgtgtctgggtgtgtggtgtgtatgttatgtgtccgtgcacgtggtgcacgtgtgcatacgcctgcatgtgttcatttctgtgcgcatgtgttgtgtgtgtgtccgggtgtgtccat

SEQ ID NO: 17795 - DNA, 1451 bp, Artificial sequence
  DNA replication origin
gaccgagggcccgtggctgaggatgcggcccactccccacccacaggaccccgggatttggtcagaaggcaggaggacctcagccccccaccccacctgcggtcggggtcaccccagactttggaagaggaggggaggggtgggtgtggagcccccacgagcctcggccggccacgccttacttgtccacagagccctccatgtagtagaccatggggaagcagcagatggcttccaggaagtggtggtcgggcctgtggggacagcggtcctggaggggcccaccctgcttcaaggcctgccctcctcaggcccagtggggccctaccctccatgcacagagctgggccaggcaggggttccccagaaccgcagcgtatgggacctggggagtactttaaggccagtgggccattctttattttattcaaggggaaaccaaggcccgggagggtgggacctgctgaggtcacacagccaagatgaccctgggctcagctgtcagggtcctagggtcccctgggcaaaaaggtgcccaggaggaagagccatttatccctccaccccaatcctggggctcagagtgagtggagcaggaggcaaacaggacagaaggagtgacaagggaggagggggaaagggggagagaggaccagagtgggaggagctgggagccacaggagctgagagcatggaggagctgggagacagaggaactgggagtggggaggagctggtggccagaggaactgggagcagggaggagctgggagtgagggggaactgggagtggggagaagctgggagtggggaggagctgggaatggagagtagctgggaactgggggagctggaagcaaggaggagctgggagttgggtggagctgggaactgggggaacagggagcagggaggacccaggagccagaggagctgggggtggggaggagctgggagcaggagtgggtgtggggaggagctgggagcaggaggagttgggagcaggaaggagagtccccctttttaggaaagctgagaggaccaggccagaggccccatgttcccgtgccctctgcaaaggcgaagggtgggcccagttggggaggctgctggctgcaggtctgagggcccgggtgggcggggtgggctgagccccaggagcctcacttgttgtccagcagcagcacgatggggttcagctccttgcgggatctgtagtaggcccgcagtggcacgatgaagttgtacagcccattgccggccgtctctgccgagacgatgatcagcttgttcttgaacccgtaggccttggcgtcttcatagctgttgtgcttgcagccctgggggcagatgctggagtcagggctggagtcagggctgtggttcctgctggccactggagccctcccagacccctcaccaaacatcccccgtgaacacccagccgttag

SEQ ID NO: 17796 - DNA, 1274 bp, Artificial sequence
  DNA replication origin
cggagaagtctggaatggtgcagccgtgtgcgttatctgtactaagagctactggccaacctatgtggaaccaccgatctgagggctccccacgggagttctgaccaactgaccatgccaggacagatggccttggcctccagatacggccaggcctggtccctgctcagggagatggaaggctgctatgggccacattcccagtgcctcacacgcggtcagggaaacgccctgcctccatctcctggttccaccatcaagagcaccctgtccatgctgggccccccacgccatctcctgagttccccagcaggagggcggcaggagcccagcctcccatggcactggccccctttcccctgagcccctttctcccactctttctgggattctggggtggcagctggcacggggcagggctgctcaccttttctagtttggaaagagccagagagtagctgtccttggcgcggaactgcatgaagcgcatgttggaagggtgggtgagctccgtggtgatgctgaggctggggaagagcctgggggaggcaggcggctcagggcggggcccatggtggttgtaggaggtctcagggtgggggcccatgatcatgtggctgtgggggtctcagggcggggtcccatggctgtgggggggtctcagggcagggcccactgtcttggctatgggggtctcagggcagggtcccacggctgtggggggtctcagggcagaggcccatggtcatggctgtgggactctcagggtggagggcttgtggtcgtggctgtgggggtctctgggcagagtccatggctgtgggggtctcagggtgtggtcccatggctgtggttgtgggggtttcagggtgggggcttgtggtcatagctgtgggggtctcagggcgagggcccgtggtcgtggctgtggcggtctcagggcgagggcccgtggtcgtggctgtgggggtctcagggcgagggcccgtggtcgtggctgtgggggtctcagggcgagggcccgtggtcgtggctgtggggtggtttagagccgagccccggacactggacgcaccggaacatggtctgcacgttgacgatggtcttggcgtccgccatgtagtcctcctcggcgctcatggtgctctccttgtccaccaccaccaggttgtccgcatagatgatgccacactgcagcaggctgtccaggctggtggcgggaccgagggcccgtggctgaggatgcggcccactccccacccacaggaccccgg

SEQ ID NO: 17797 - DNA, 1128 bp, Artificial sequence
  DNA replication origin
cactcagggccagagcccgggaggagtgatgtggggctctgatgagaaggtggactcccggcggctgccatgggcactgcgcttggtcaagcgccctgctcttgccatcccgaaattccaaatcctcctgataatcctctcctcccccggtgttttgtaagtggtgccggagggcgtgtggagtctgggctgaggaggagcaagcatcgggctccctgctgtccttggcctccccgtccctgtgctccaggcttgcaatggacccactgagtttcctggggctcccgtaacaaatgaccgcaaacttagcagctaaaacgacacctgtctcctctctcccgtttctggagtcgggagtttgaggtgtctcaggctggatccaggcctgggcagggccccgctccctctggaggcctgggggcctccttctcttgccttttccagctcctggaggccacctgccttggcttgtggctccctcttccctcttctgagctggccgtgcagcttcttcccaccggatggggacctctggcctctccctagaaggaccctgacggcgtgaacctgccggatgctccaggaggatctcccatctcgaggcccgtgacttaatcccatctgcagaggcccttctgtcacgtgaggcggtacatccacgggctccggacccggccgtggccaactctcgggtcattcttcagcggagggccccaaccctggagctcggcctccaagcaagtgtgcacaggcaggcgtgtgcgcccacggaggccacacttccccccggaaccagaactcgattcacaggtaaaagacacgacagcgacaggacaagcaggcagaagccccttttcctccgggttcgcccttactcatcagtggccggtgggaaggctggggcgtgagaaacagtggaattagtttcgtgcggcgtttccgctcttggggcaagaaccaggtgcgatgagctgcgatgggcgtgtgagtttgcaatcgtggtgatttgcatccagaattccagccgtacttcgcggagacgaacgtgaaattccagaacaacttgcaattttaattttcctttactcagaacaacgctaaacaggaaacaagaaccacgacagggcc

SEQ ID NO: 17798 - DNA, 1024 bp, Artificial sequence
  DNA replication origin
ccactgatgagtaagggcgaacccggaggaaaaggggcttctgcctgcttgtcctgtcgctgtcgtgtcttttacctgtgaatcgagttctggttccggggggaagtgtggcctccgtgggcgcacacgcctgcctgtgcacacttgcttggaggccgagctccagggttggggccctccgctgaagaatgacccgagagttggccacggccgggtccggagcccgtggatgtaccgcctcacgtgacagaagggcctctgcagatgggattaagtcacgggcctcgagatgggagatcctcctggagcatccggcaggttcacgccgtcagggtccttctagggagaggccagaggtccccatccggtgggaagaagctgcacggccagctcagaagagggaagagggagccacaagccaaggcaggtggcctccaggagctggaaaaggcaagagaaggaggcccccaggcctccagagggagcggggccctgcccaggcctggatccagcctgagacacctcaaactcccgactccagaaacgggagagaggagacaggtgtcgttttagctgctaagtttgcggtcatttgttacgggagccccaggaaactcagtgggtccattgcaagcctggagcacagggacggggaggccaaggacagcagggagcccgatgcttgctcctcctcagcccagactccacacgccctccggcaccacttacaaaacaccgggggaggagaggattatcaggaggatttggaatttcgggatggcaagagcagggcgcttgaccaagcgcagtgcccatggcagccgccgggagtccaccttctcatcagagccccacatcactcctcccgggctctggccctgagtgtgtctgggaagatagagctggttcaggcctgccggtgtatgcacacatgcagacacacactgtgtacacgtggacacacacaccatgcacaaatgtgcacacaggtatcatgcacacatgtacggtgcacacacagtgc

SEQ ID NO: 17799 - DNA, 2068 bp, Artificial sequence
  DNA replication origin
gtggtgcccacagctggccccacagtagaggcaggcagagggtggccagaaaggctgacagacagacagatgacagacaggaggacggcccgggccccgggacgccgtggccgactgttcttggctgtggcccgaccctggcccagtccgtccgtccggcccccacccgcgccgtgtgcccttaccgtagccggtggtgggcagccccaggtgcttcatgcggttcttcaccagctcggagagctcctggcgctcagagcgccggtacaggctgaggcgctgctggctgatccactccgcggccgccgcccggcctgcctgcttgggcgccttgcggctcagcctccgggcccactgcaggctcttgcgccgtagcagtgggtgctctgcggggtcaccgccgcccgtgtggcggccctgggagctgcctccggtgccagcgcgggagccccagggccccttcacttcccgtgtgtcctcacagtcctccacgttcaccgagatctgggactgggcagggcagggcagggcagggcggggaggggtgaggctgccgggagggtcgcgggctttggggcaggggcttaggaagaggtgtgggctctgcagcttggggcctgcgtgggagcagctgggggtgttagggaagaggacgacgacagaccccagggtgcatgtgccttcctcctctggaaagaatgtgcctggtttcctcctgagcacagatcgccgggccacccaccctgcccgggcctggtcaagggattcgccaggctgctgagggcagctcccttcgcctctctgagcccttatttctgtgggtccggcctgggacccatctggaccccagcacatcctggccttgccctgagaggtcaccccctctgcgtgtcaatttctccatctgcagatgagccctgatccctcttgcaaacacaccctttggaggccccgaacctggggaacgtggggtgccagagcctgtgggtcgtggggtgctgggaagaggtaggcatcccacctgggtggcaccttcagaaaggcctgggaggctgggggctggtcaggccagatgggcatgggggctgcctgccttggtggggcctgggagggggcgggggtgcacctggtgtccaaactcacaggctactccccccaggcctcagcttccccaccaccagtgcaggagggagtgagtgtcaacagccttctctgagccgtgctggggccgacacatccgtgggacccgctcctgcctcggctttcccagggccctgtgggtgggtgggtgggtggggcctggcaggcttctccatgtgaagctgcgatgttctggtgctccgcagaagctgcgtgggcacggaggggttgcttacctgggctctgaggtcgtggggctgcaaaggaaacaggcgcagtctgggacctgtgggcgcacccctgccccccacgccgcctcagcctggggtctgcacggaacatgcttagggctggtgggcacggtgcctgctgctgtgtggactgcagcacaggggctgcccgtattcttcctgaagactcccctgagcctctctgcccccggtaggggtcatggctgctccagctggaagcgctacacgtgggcacacggaccagacggaaggagctgccagcaatagcaaagctgatctagcccaggtccctgacactgaaggtggggatgctgtgggtcacacaggacaggggctgccacagtcccagcccccggaaggtggggatgctgtgggtcacacaggacaggggctgccacagtcccagcccccaggctgccccagaacctccgaggtggagaagacgtggctctctgtccggtagatgccaatggggatctcggcgctggaggagcagagcttctggaagaggcggccgtacgtgcggatccacaggtcgccctcggtgattttcatctgcagggtgggaaccctgagttggctggggcaggtggcagcacccagagcctcctggccaccgtgaatcaggggcaggtgcccatccacccacttggacagcccagcacgcccccagccca

SEQ ID NO: 17800 - DNA, 1392 bp, Artificial sequence
  DNA replication origin
gcggccggcacagtgggcgggtgcaggggcagctgcacgggaggccggccaccagaagcgagtcggtcaccagaaaggcagttgctccttccttgccaagctctgggggcaggcagcggtcgcagaggcaggcaccagctctgggggtggccagaccgggcgggatcatcctctgccagcagtcacaggggaccacaaacatgaatgctgggcacccccctcagcctcgtgagccccacctgaaagggcgtgaagtccctcccgggacagggacactgtggggatggagggaagcttcaaggcggggacagggggacaccttccccagcgcccacagggctgggggccgggaaaggtcttcacaggccacctgttccccaaaccctggcctctgagtctccttcgggcccgcaggccagcccagcccagtcacccgtgagcagctcctgggccagccgtgagctcctgactctgctcaggggactcaagaccccgacccaggtgacagacgcaggaagcagggttgggagacggggcactccgacgggacagaggcagccctgagcatcaggcaagtccctgagatggaacaaagggaaggtggagcctcgacccggctcaggggtgggtgtcactgggtagcggcccggtgctggggagctggggcccatggcttcatcaacggaggtagcatctctagagtgagggaggggatgagcttctctccacgccaggcagggcatgtagggccccgaagcccaagcacacttcccaccacaaggcgcagagagagggggctgcacggatctgttgctgaagacggacgccgggctccctgaagcggcaggagggggctgtgccgtgggagtggcaacaggcccatggtggacagaggcatgtcctggcatgggcctttcccccaactgttcccccaaagtctcccccctaccctggctgctgggagggctgggggctctgggagggggtccccaccagtcttgttctctgcgagaactcagggaccctgggtatccgctgtccagcaggcctggctgcagctggctggcccaactctagctgatgccctcgacttggggagcccagcctggccctctccaccccacagctgcctcccctggccaaagggctcagccagctcctgtctctaatttggcagagagggaaactgaggccccagagcagtggaagcgagcacctccctacggggctcacaccagggatgcccaagggtcctgtggcctcccagcaccagggtgggccatggccacttccctcctctgcacggggcctctgctgggccgtggtggtgcccacagctggccccacagtagaggcaggcagagggtggccagaaaggctgacagacagaca

SEQ ID NO: 17801 - DNA, 1322 bp, Artificial sequence
  DNA replication origin
agacctcctggctcttggcatccacggtcactcccgcctgaatcccccacgccaggccagagctaccgccacccgagcctcagtttccttctctataaactggggataactagtgcctccccccacggcagctgtgaggaaggcgtgaagaggggatttgtgtgagtatcggggctggggtgcctcctcccgctgtgtgtgtgggatgggggctgcacgctggaggggccccaggatgctgcccgccctccccgcaaagggtgtgactcttcctgttctgcctcttggcctaggctccgcttgaatctaaacatgggggtgcagctccccagccccagaaccccggcaccgtcaccctcccgggcatgtaggccgagcccaggaaatgcctgccgcgggagtcctgtgagccctcgccccccaagcccgctgtggccatgcctgccctggagctgcagtgggagccgcaggaagctttggcgggtgaggggagcgggcgacgcaggcatcccactcatgaaggccgctagctgcaggtccgagcaccacagtgcccggcagagcgagggtcttccatgagcgccatcgtggggaaaagcacagagccgggagaggccgacgctttacttctgtggctgccccaggcctggccctgcctccgggtgcaagggcattgtggcaaacaggtccctcccgagctaacacccgtcctggctcaggaggcccttcaagctcctgggttaccctgtagggaggtgtggcagcgggggcaggctctgagctcccctgaggctgccaggacccctgggagcaccctggcccggactctgctgagcactgacggggcacagcatgttcttggaggaaacggggtgtggagcggctctgctcgagccgagcaggaagaatcccctcgtggagccccagctgggggacgaaggtcaccatccacctggcctgggcagccataaagcctgcctactcctcgtggcttggagtccccacccctgcatccagcccaggcttcaccgagctcctcccggggccctggctcgggaccctctgggtgcttcctgagagcagaggagcttagggtcctcagactgcttgtggggccggccacagggaagggctggctgtaggccagggtggcccaccggtcacatcagagctcatcgtaaacagcaaagcaggagaagcagcaccagggtgagcccgagagctgggcagtcgccactctgcctggcggccaacagcaccttgactagcacaagccccagacctcagcctcaggcccgtcctcaacgcccagccaggggaca

SEQ ID NO: 17802 - DNA, 1637 bp, Artificial sequence
  DNA replication origin
gagatgtgaccgaggccgcagtgccatgggggagtggtggagagaggaggtgcggctcacgacttaaggatggaacattggaggcgagacactggagcgtgcgggcccccaggggacaggaggaggcaggagggtgtcctcagggaggaggaggcacagcctcagaagaggttgagaccaggcagccttgtccaccaccctgcagggcccgagcagggcgggtggagggtggtgagaggtgggaacaatgcatggtgcctgggcaggtgcgtaccggagactgcagcgcggagctggtgttttggtgtgtggagctgccaccgtgggctgcttcctccagacctgtcctgcctgccacatgcactgctctacagggctggtttgctgcagcaaagaactcagggccgggagcacggccagggtcaggctgttcccagggccttccaggggtggccgtgtttgacacatgcctggaagaatgcctggtcccaaacagccatcagtgcctttcatgagcatcctgggtgccaggcgctgtggccaagcccccaaggcccaccccagcatgaactcacagccgctctcagaatttagggctgcttcgtcacgctcagaatttagggctgcttcgtcacgctgcaccccaggattttagacagtgatagggtggatttgaaggtcagctctggttacagagaacaggcaaagggcccaaggcacaggaaagggagcgtttcctggtgatgctggagagggcggaggctgcttgggaagcagaggaaagagggcagaggcgccccctagtgcccgtgtgagagacggcgggtggcctcagggtgtgggtgggggacactgagggaggacatggggtcttgagggtgtgacagatggatcggcttggacacgtggagtctgaggtacccccaggacagccacttggaatgtggagtgggctgacgagttcccggacttgagtgtggatggacttctgggggagctggtagacgggtcagcaccggcaaacctcagtagtctggggctgcgtgaggaccatcaggagggccaagacagactcttcggagggcgggtggggtgagtgtccagtggaggtcaagtgaggtgagaaccagcagcacccttcatgttcagtggccaggagccagcctgactcagggtgtgttttggggggcactgggggtggggtgaggaagaggacggcatgggggaaggctggagaagctcagctgctcagaggggaacagagaaagagagtgagctcacgtgtggaggtggtgccagagggcgggctgagtgagggcaggggcccaggaacagctggatgggagctggcatcctgggagagcgcagagctccggggttggcgctgaggctcggcggtgctcagcagacaggaggtcaagccactgtcagtcccctggagatctgggctcctcggaggtcaggagggctcctggctgctgtcctctggggcgggctgggagtcgcagcagtagatcgaatgtgtgagttgggggctccgtgagactctgccccgggtgccctgtggctcccctgcagcctgctttcgggaatgccagggcaagtggagcagcgaggctccgggcaggtgcaggggc

SEQ ID NO: 17803 - DNA, 1828 bp, Artificial sequence
  DNA replication origin
tgggcagtgcgtccactgcttgaagagctgacattgccaaaggtaggtggacctctcaggatttctattttttattataaaatattcaacctgtaatcccagcactttgagagactgaggtgggaggattgcttgagtccaggaattggagaccagtctgggcaacatggcaaaaccccatctctaccaaaaatacaaaaattagccgggcttggtgatgcttaacttgtagtcccagctactcgggaggctgaggtaggaggatcattcaagcccagcaggttggggctgtcgtgagccgtgaatccaccactgcactacagtctgggcagcagagctagaccctgtctcaaaaacataaaaagtaaaatatttgaaagccatccaaggaatagagtcgcatatgttagtcatgaagcaaaataataaacgttgccggtgactctcactcatcttaataattttataacgagatttctagagatggaaggagtcgcaaaggccagtgctcctgcttcacttacccaggactttgggcgtcacgtccctggatctgtggcacatggtaagtctgtgtttctcctgtgtggtgaggccgcactgtccctaagtgtgtacccggaagcacccgtggagtaaggtgccgtggggtggatgcgcggcgctgagcacacagctctgtgtgtccgagctttgcaggctggtggaggaaggtcaggcaggtggactgggcaggaccttttccagacccaaagaattgaccagggttggctgggaggtgatgaagaagtctttgcagaagccaagaaatgtgcgatgctgaggagctcaggctcttgagcctggagctggtctgggcaggtgatggttgtggaaggatgcaggaatgggaggtctcagagctgatgatcagggcagtgggtgggccttctgggccaagtgaccagtgagtcctactgctcttgttccccgagtgccagcaccatcactggaagtctgggccagtgtggtggctaagtggcaacatgatgggctgagcgagaccatgtcagctgccatccgagggaggtggccacgggcaggtggttcaggaatcacggccagcgcctgctgctcactgctctcttattagagtggtggccttcttgggctgggaggtggtggtgggggatgggggaccagactttaaggaaaaatggaggccacactgtgaaggaccctggccacaagctgccatctggcctttgggactttgtattttgagtagaatgaccatgcactcacgtactcctccactcgctcatctgttcattcatttatccatctgctcattcattcactcattcgttctggaatagggctgggtgtgctgttgggtgcggtgcagggctggagacaaggaggcaagggtcccagccaggggtggcttgcattaattcatggcatctggggggtgttgaagttcatgggcagtagagagatgtgaccgaggccgcagtgccatgggggagtggtggagagaggaggtgcggctcacgacttaaggatggaacattggaggcgagacactggagcgtgcgggcccccaggggacaggaggaggcaggagggtgtcctcagggaggaggaggcacagcctcagaagaggttgagaccaggcagccttgtccaccaccctgcagggcccgagcagggcgggtggagggtggtgagaggtgggaacaatgcatggtgcctgggcaggtgcgtaccggagactgcagcgcggagctggtgttttggtgtgtggagctgccaccgtgggctgcttcctccagacctgtcctgc

SEQ ID NO: 17804 - DNA, 3344 bp, Artificial sequence
  DNA replication origin
tgacccctccctttcccagtgcatactcatctgggaacgtagctggtggtccctttgggaatgactggggaaccattgccatgcatgctcaccttagtgttgctggtcccagagactgggcattgttgggaggaaatacggacacaaacagactcatagctattcatatgcatgtggcaggcacagaaacagtggcttgctgagtagctagaaatagggactcatacactctgcatcagcagggaggcagggagagaagaagcttgtatgggaaggatgaatcagtttcctcaggaaagacagataggctcatacaggagcagaaccgaagggcgccgaaccaagtagaaagtgtgtagcgaagtgtgtctgcagaacgggtagaaagtgtgtgatgatgtgtgtcttgagaatggagtagaaagtgcgtaacaatgtgtgtctatagaacagggtagaaagtgcgtggtgacgtgtgtctgcagaacggatataaagtgtgtggtgatatgtctctgaagaatgggtagaaagtgcgtggtgacgtgtgtctgtagaacagggtagaaggtacgtggcgaacgtgtggctacagaatgggtagaaactgcttgatgacgtgtgtctgtagaacggggtagaaagtgcgtgatgacatgtctgtagaatgggtggaaagtgcgtgatgacgtgtgtctgtagaacaggtggaaagtgcatgatgatgtgtgtctgtagaacgggtggaaagtgcgtgatgacgtgtgtctgtagaacgggtggaaagtgcgtgatgatgtgtgtctgtagaacgggtggaaagtgcgtgatgatgtgtgtctgtagaacgggtagaaagtgcgtgatgatgtgtgtctgtagaaggggtggaaagtgcatgatgatgtgtgtctgtagaatgggtggaaagtgcgtgatgacgtgtgtctgtagaaggggtagaaagtgcatgatgtgtgtctgtagaacaggtggaaagtgcgtgatgatgtgtgtctgtagaacgggtggaaagtgcgtgatgatgtgtgtctgtagaacgggtggaaagtgcgtgatgacatgtgtctgtagaacgggtggaaagtgcgtgatgacgtgtgtctgtagaaggggtagaaagtgcgtgatgatgtgtgtctgtacagtgggtagaaagtgcgtgatgacatgtctgtagaatgggtggaaagtgcgtgatgacgtgtgtctgtagaacgggtggaaagtgtgtgatgacgtgtgtctgtagaacgggtggaaagtgcgtgatgacgtgtgtctgtagaacgggtagaaagtgtgtgatgacgtgtctgtagaatgggtgggaagtgcgtgatgacgtgtgtctgtagaatgggtggaaagtgcgtgatgacgtgtgtctgtacagggggtagaaagtgcgtgatgacgtgtgtctgtagaaggggtagaaagcgtgtgatgatgtgtgtctgtagaaggggtagaaagcgtgtgatgatgtgtgtctgtagaacaggtggaaagtgcgtgataacgtgtgtctgtagaacgggtagaaagtgcgtgatgacgtgtgtctgtagaaggggtagaaagtgcgtgatgacgtgtgtctgtacaacgggcagaaagtgcgtgatgacgtgtctgtagaaccggtagaaagtgcgtgatgatgtgtatctgtagaaggggtagaaagtgcatgatgatgtgtgtctgtagaacgtgcgtggtgacgtgtgtctctagaatgggtagaaagtgcgtgatgacgtgtgtctgtagaaggggtagaaagtgcgtgatgacgtgtgtctgtacaacaggcagaaagtgcggatgacatgtgtctgtagaaccggtagaaagtgcgtgatgatgtgtgtctgtagaactggtagaaagtgcgtgatgatgtgtgtctgtagaaccggtagaaagtgcatgatgatgtgtgtctgtagaaggggtagaaagcgcgtgatgacgtgtgtctgtagaaggggtagaaagcgcgtgatgacgtgtgtctgtacaacgggcagaaagtgcgtgatgacgtgtctgtagaaccggtagaaagtgcgtgatgatgtgtgtctgtagaactggtagaaagtgcgtgatgatgtgtgtctgtagaaggggtagaaagtgcgtgatgatgtgtatctgtagaaggggtagaaagtgcatgatgtgtgtctgtagaatgtccgtggtgacgtgtgtctctggaatgggtagaaagtgcgtgatgatgtgtatctgtagaaggggtagaaagtgcatgatgatgtgtgtctgtagaacgtccgtggtgacgtgtgtctctggaatgggtagaaagtgcgtgatgatgtgtgtctgtagaacgggcatgatgatgtgtgtctctagaacatgtgtggtgacgtgtgtctctagaacaggtagaaagtgcgtgatgatgtgtgtctgtagaatgggtagaaagtgtgtggtgacgtgtgtctgtagaacgggtagaaagtgtgtggtgacgtgtgtctgtagaatgggtagcaagtgtggtgacgtgtttgtagaatgggtagaaagtgcatgatgtgtgtcggtagaagtgtgtggtgacatgtctgtagaacggggtagaaagtgcatgatgatgtgtgtctgtagaacagggtagaaggtacgtgacaatgtgtggctgtggaatgggtagaaagtgcgtggtgatgtgtgtctgtagaacagggtagaagtgcgtggtgacgtgtgtctgtagaacggggtagaaagtgcgtgatgatgtgtgtctgtagaacagggtagaaggtacgtggcgatgtgtggctgcagaatgggtagaaagtgtgtggtgatgtgtgtctgtagaacggggtagaaggtacatgactgtgtggctgcggaatgggtggaaagtgcgtggtgatgtgtgtctgtagaacagggtagaaagtgtgtggtgacgtgtctgtagaacagggtagaaagtgtgtggtgacgtgtctgtagaacggagtagaaaaagcgtggtaacgtgtgtctgtagaacagggtagaaggtatgtggtgatgtgtggctgcggaatgggtagaaggcgcgtggtgacgtgtgtctgtagaacagggtagaaggtacgtggtgatgtgtggctgcggaatgggtaaaggtaggtggtgacgtgtttctgtagaacagggtagaaggtacttggcgatgtgtggctgcggaacgggtaaaggtatgtggtgatgtgcgtctgtagatgcacatgggcttctctgggtgcttttgggcaggaagtctgccccagagggga

SEQ ID NO: 17805 - DNA, 953 bp, Artificial sequence
  DNA replication origin
gtggacgcgagcggccgcgccgccgccgagggctggaggaagatggaggccccgccggacggcgccgccgacctcgtgcccctggaccgctacgacgcggcgcgcgccaagatcgccgccaacctgcagtggatctgcgccaaggcctacggccgaggtgggccgggtgaggggcgcggggcgggggccaggggcgcgggccggggccgggggacgcggccggggtccggccgggtcggggtccgcgcgccgcgcctttgtgccgcgtccgcacagggtcggggctgggccggccgcctccgaggtcctggcggcgcccgggcaacgcggagcgtggggacgcggtcacctggcgagtgggcgtccctgcggcggagggcggcgtgggtcggggcttccgctcctatttcgggagtgcccccagcctcccgttggcggcggcggcggcgggaaggagctgcccggttctgggcgcagggagggaccatggggacgcggggccgccgtctgaggcgccgcttcccggcgcgccgggcatcgtccagtgctggacctgtgattccgagccttgcacttgttatgaattttgatgcttacaagctgtcagctgttgaattccccaactagaaattgcgtattccgcgcattgtgcttaatcataatgatcccctttggttaattcctgtttggaagaactaggtaaccttgttactcagtccagtttgttaggccctaatgtgcttagtggattaagacgcttctgtttcgtgccctgggaacaggacagacctagtgattctcgtcagtggctgacttctttattaatttcaggtgctttgtttcaggtacaattaaaggttaatatttctgcaatcctcttttcatttgaagcattcttaaaatatttgcctttattctggtgaaaaattaccctttttagagtaagactaaag

SEQ ID NO: 17806 - DNA, 1758 bp, Artificial sequence
  DNA replication origin
cgcgcctgccccgcccctttccgcaggcgcagtaggcaccgcccgccagcccgcgcccgccccgcccctttccgcaggcgcagtaggtggcacccgcaggcctgtgcctgccccgcccctttccgcaggcgcagtgagcgtcgacccgcccctccccgcccgcttccgcaggcgcagtaggacccgccctggtccgcgcctgccccgttgctttcctcaggctctaaggcccgcggtgtggagcgcggcgtaggcagcggggagtgggcggcgcggggtgggtggagtgggtcggcggcggggatcctgccgagcccgcagctgccctcttttagcgccgtgtctcctccccggccctggctcgtcccacctcagccacagcccggccccctggccggccgaggtctcgccgccggcgccctggggacctcgtgggtgtggccggcggcgacctcggcaggcgacagcccagcagacgggcaccaggtggacgtgccagtctccagacccccgtcccggtgcagggaaggtgggcgtttggacccctgaggcagaaacaggtgcggccccgccggcgcatcccccggaagggacgctgacttcgttcccctggagcctgcgtcggggcccgcgctgggctgagaattacgggaacgccgtgagagtttgcattccgaggatttggtctgagaacctcaccagcgaaatagagaactgcccccgggagagccggcccacgtgccgcccaccggcgccttgacggcagggagaggtcgagcttccagggagcgggcgcccggcgcggggctcccagcctgtctgtacctggtcgagacaccccgtgccagaggcggaacatgtatgaaatgccaggtgcccagaggacccaggcagtccgtcattcacataccaacccacgtgcaggcttcaattcaaccttgaagccatttgggcctgggcttttttgatgacttatttgattcatagttttttggttactaattgagtctcttcacttgttataggtctgttgagattgtctattttttcttgagtcagccgtctgaaaagaacacgaggtggacagggcagagcggtcaaggaaagccataggaggagggcacttatttgagcaaagaccggcgggacgtgggcgtcgagggtaaggatatctgcagaagtactgtcttgagcaaggagcacggcagacagagcctctgagacacgagagcctggagtgtaagaaacacagtagaggccactaagtcgagaacgcaggagctggaaggactggtaggaaatgggaggtggggacatggagggatgcagacaggtcctgcacagtcagaactgtggccccttctctgcaggaaatgggcagccttcggaagactgagcacacggaaggatatgactaaccctttaaaagggtcattctgactcctgggtgaagaacagactaggaagggctgaggaggaggcaggaggccatctactgttatatgggatgtggagtgtgacccggaaaggtcaagtgtgactctaagggctttttgtgtactgatcttttatcctgcaaccttgctaaacccatttattagttcttcttgtcttttagtggcatttattagttgttctagtgttttagtggattccttgggattttatacaaaagcgtgtcatttgtgaatagagatcagtttatctcttcctttctaatctggatgccttttatttcttctccttgcctagctgccc

SEQ ID NO: 17807 - DNA, 1218 bp, Artificial sequence
  DNA replication origin
cacaagcaggggattcctccccccaggtgcagagagaggtggcccagccacttgggccactacagcgagctggcatggcggtgggaccccgggtgaggagtctgaaggcaggggtggggctcactgtcagctggtggggactggggggctccgggaggtactggatgtgggagaggctgggggtccaccagcctgcatccttctcgaggtcagggccctgctccgtcccgtttcagggctggctggttgtggaggcacttggaaaacactcgctggaacaggcgggtgggaggtggggctgggacagggagcatgggagccagagaccgcaggagcctgaatcccagaggacattcctgctgggggtgtggggacagcaccatcgggggcctcagtgcatccggggagcaggtggggcctgcctgggtcagcctcagcccagctgtggggttcgcccccgtgcccttcgctgcccttggaggcatgcttggtcccacgggaaggcaggaggatgagctgccatttgcagggtgtggggtgggcagagcattcatgcgctgggcacagcctcagccagaggaagggcattgttggcgttctgggcccagcacaggctggagagaaggaaccctcatgtgcagatgtggccgagcctcctaaccatgagagcaccgcccagagacagcatgtgcccaggggtgcccccgcccacccaggggctctctctcgggttagggccgggagtcgggtgtggcacctgcaagcagctttctgtgcccagtggaggcttggaaggcacagctgcctccaggtgaggatgcctggtgcctggctggggactgactcccaggcagagaacacagccatgtggctctgggggacaagggtttggatgctgcagactgggcagggctgggggcgggggtctgaggcagttagtggctcttcgacgttctctcagagctcgctctggtttcccgcctgacggtctccccttgaacagctgcacttaagtgaggtccacccttgccccactcccaggcgggctcactggcttggcacacgagggagtctgagggagccccctgtggggtggtgcctgcattctgggctcccaagagctggcttcctgcaggggaacctgccagtgcacccccggcactttcctgggatcgagtctccgccagggatgtctcctggcttggtcctcaagggtct

SEQ ID NO: 17808 - DNA, 1098 bp, Artificial sequence
  DNA replication origin
gtattttagggctgaggttgtatcttacaaggtgaaatgaaatggccggcaaactctagaaattcttcgtttacgtggacttcagttccatgaccagtaacgctgctgtccatgtgtgccttcgccacagtggcccatgaactaggggcaggcagctggccgagcctggccctgagcgcagttgtgttccagctgctgagggccaagtggcttctcagcccatggggccaggctgcctggctctggggggcgtgggtgctgggtcggggacgctgggtcgtacacagatgttccggtgcacattgctctgttgagataagggccacctgtgtcattttgagcttctgctaagccgtttttcttcttccggggtcctgtggagcaggacccctgggcagtgccctgtggccatactcagggctctagaccagggtgtgatgccgaggcaggtcacctgtgtgccagggaaggtggagggagttagatggctcacttggccagcattccctcctgctccggtggccgagcttggcgatgacacatgcgtttcctcgtggagtgggatcatgctgagattccaggacagcgtggctcagctgctggaggggtgacttcccctgagatcgtggggtcaggacattgctgtgccgactgtaggcgccgtccacacaagcaggggattcctccccccaggtgcagagagaggtggcccagccacttgggccactacagcgagctggcatggcggtgggaccccgggtgaggagtctgaaggcaggggtggggctcactgtcagctggtggggactggggggctccgggaggtactggatgtgggagaggctgggggtccaccagcctgcatccttctcgaggtcagggccctgctccgtcccgtttcagggctggctggttgtggaggcacttggaaaacactcgctggaacaggcgggtgggaggtggggctgggacagggagcatgggagccagagaccgcaggagcctgaatcccagaggacattcctgctgggggtgtggggacagcaccatcgggggcctcagtgcatccggggagcaggtggggcctgcctgggtcag

SEQ ID NO: 17809 - DNA, 762 bp, Artificial sequence
  DNA replication origin
tggcgggcgcaggcccctgcggcggcggcgggatgttcgtgcaggaggagaagatcttcgcgggcaaggtgctgcggctgcacatctgcgcgtccgacggcgccgagtggctggaggaggccaccgaggacacctcggtggagaagctcaaggagcgctgcctcaagcacgtaaggccgggccccctcccctgcccccaacacccgctccggacccctccgactgcggaccccgcctcagtccccgaaccgccccgacctggggtccgccgcccagtccgcagctcccaggccctctcctccgggggtggaggcagcgcctcctgcccgtttgcccgactctccccctttcggatcccacacctctggacgctcgtcccgggcctggcctttcggccggcggactccggtcactaagcgctcgccccgtgccagccgcccggccgagccctgtacacgccagcctctcagttaactctgcagccacgcagggaggtaggggcagatcgggaaactgaggcctggagagtgaagtcgccgacggagcagggcctcgggactttccggcagttgtacctttttgctgttggggtgaggttttttttcagcagcatctttgagagctgagaattaacgtaggctccttcatgaagaggccccttctccttcctcttcccctttcccgcagagccggctgcttggagctcttttcctggctggccccaggccactgtgccttttagctggagtccctgaaatagtg

SEQ ID NO: 17810 - DNA, 961 bp, Artificial sequence
  DNA replication origin
tgcggtctctaacagtcggtacttctgcttcctgcgttaaaaatgccccattccaggactgtatcctggtgtctggtcttaatcactaccatattttcattgagtagcagaggctcccacctgtgagaggcaattagtaagtgctgaactggacacatggaatctggacgaggttggaattatcacaggagaaaaatgaggatgtgtgtgcaaaatggtgtggacagaataaaagcctgcaggcaggaggcagagacagcctccccggttagattgctaacctctgagaacgggaactgtgccttattcatctctgcgcagtaaagtttttttaaatgaatgggatgaatgagtacagatcagtcaatgtgtcaggtctaacctgaactacaaaattcatatttaggagcatggtaagtaagacgttatccaggactgttgagctaggtacagagaccactgccaagggggcttgcagtggggagagaggtcaggctcaactcccaatacagcaagggcaagtgggtggggtcagtgaatggaaaattaataggagaaaacatcagggatgtgggcggttctggctaaaccgacctgacagggttcttgctgaagagaggctggagatatcagacagcacctgggggacgaggaacctgaccagacgtccagggtgatctgatattgaggctgggagttcttgctaaactcacttatcaaggctcttcgctaaaactggattttacaaggaagtgtacagatgatgtagaaggttcaggagcctgcttaagtttggccaagcaaagactctttgtcacaccccacagaaaatgagtctgcctggcatcacctgcaccaagggcggcttccctcccctctgggtgccccgcaaacctaggcttcgcaggaacagtgactctctgatctgcgtgtgaattagaaagacctaggcttgttaaag

SEQ ID NO: 17811 - DNA, 987 bp, Artificial sequence
  DNA replication origin
gtttagccagaaccgcccacatccctgatgttttctcctattaattttccattcactgaccccacccacttgcccttgctgtattgggagttgagcctgacctctctccccactgcaagcccccttggcagtggtctctgtacctagctcaacagtcctggataacgtcttacttaccatgctcctaaatatgaattttgtagttcaggttagacctgacacattgactgatctgtactcattcatcccattcatttaaaaaaactttactgcgcagagatgaataaggcacagttcccgttctcagaggttagcaatctaaccggggaggctgtctctgcctcctgcctgcaggcttttattctgtccacaccattttgcacacacatcctcatttttctcctgtgataattccaacctcgtccagattccatgtgtccagttcagcacttactaattgcctctcacaggtgggagcctctgctactcaatgaaaatatggtagtgattaagaccagacaccaggatacagtcctggaatggggcatttttaacgcaggaagcagaagtaccgactgttagagaccgcagtggaggtggtggtagtatcgtggaagctggtggaggagaaaggggaggaacaccaaggtggtgagtggagagtgggggaagctagagggcttggaggagccgggtcagagcattaagacgttgctgtgagagccactaacggtgtgaccaggtggcagaatgaatggtggtgactgtggaggggacagggaagagggcagggcatccttgcgggggagcaatgcggagggagaggaagaggagaagggggcttccagtggcctgtgggaggggaggccagcaggattggagggtgtgggcccaagagtgaaatcaaggatgacttgaagacttccagtgtgggtggcagagtgcagggcagtgccaccttttgaagtaggaggcaggaggaggagc

SEQ ID NO: 17812 - DNA, 887 bp, Artificial sequence
  DNA replication origin
agcgtgataataagaaatatctattccatctttgtccaggattcctggcacagactcctaaaacccttggaatccctgagtgacaagcttgcctttgggatgccgatgagatggctggtggctgggagcccctagacagcttcagggtgggggtggtatcctgaaggaccaaccactggttagagagttggaatcttcaaccctaccccctgaccctggggagggggaaggggcttgaggttgagtcagtgcctagtggttgatggtttggtcagtcatgcctatttaatagaacccccataaaggcccctaaatgatggggtccagggagcttccgaactgatgagcacatccgggtgctaggaacgcgtgcccagggaggacccggaggccctggccaccccacacctcaccctggacatctcttccatctggctgttctggagctgatcctctgtaataaactggtagcagtaagtaaactgtttcctgagttttgtgagtcattctagcaaatgaggaggaggttgtgggaaccctcgatttatagccggtcggtcagaagcagcggtggccccaacgggggactggcagctgaggtgggggcagtcctgtgggactgagcctgcctttggggtctgcgcaaactctgggtagttggtgtcggcattgaactgagttgttaaacaccccgtttgtgtctacagaggcctggagaattggttggtgtcgaaaatccacacatttggtgtcagggtgtggtggtgtacaaacacccctgaagcccttttatggagcaccccagagtctgctagttcccgggaagtcaccgctagagaggcagagggaggcagagggaggcagatgcaggcacaggggcttcctac

SEQ ID NO: 17813 - DNA, 1865 bp, Artificial sequence
  DNA replication origin
tggtagagttcagtgacatgtggcaggtaccccagctgccacaccctgccccatgcacctctgctgtcagagctgctggtcacgccccacccagagccacccggagcctctgccctcaggctcggaggtgtctgtcctgacaactgcaagccggtgccagtctggagttggaagcccgcaaagtgctagtcctggttgacagacaggagatggagtccaggtggagacagcagtttgcccccagagcccagcgcattgggatggggaactgactccccggcccggggttccgtctccgctggttcctgtcccctgtccctgcagaggggctgatgcctggagaagcacagagagtgaggtagacaccggggaggcccaacacctggacttacccccaggccctcctgggtctgagaggagagcccctggggaggtagagaagctggggccctaatagggtgtccagggctactgagggggggggatgggggctgtcccagggctactgagcaggggattgggggctgcctcagggctgctgaggaggggatagaggctgtcccagggctgctgaggcggggatggagggtgtcccagggctgctgaggggaagatggagggtgtcccagggctgctgaggagggtaggtgggggctgtcccagggctgctgggggggattgagggtgtcccagggctgctgaggggaagatggagggtgtcccagggctgctgaggaggggatggggggtgtccagggctgctgtgggggggatgggggctgtcccagggctgctgcaggggggatggtgggggatggggagtgtcctagggctgctgaaggttctggggggtgtgccaggcagggctgctgaagaggggatggagggtgtccagggctgctgagatgggggatgggggtgtccagggctgctgaggagggtgggtggggggtgtcctagggctgctgagagggggatagggggtgtcccagggctgctgaggggttctggggggggtgtgccaggcagggtgtcccagggctgctgaaggtggaggtctaggggggtgtcccagggctgctggctggggtggtctgggggtgtcccagagctgctgagggtggaggtttaagggggcatcccagggctgctgagggggaatgggggtgtcccagggctgctggtgggggggtctaggggtgtcccagggctgctgggggtggaggtctaggggagtgtcccagggctgctgggggtggaggtctaggggagtgtcccagggctgctgggggtggaggtctagggggctgtcccagggctgctgggggtggaggtctagggggctgtcccagggctgctgggggtggaggtctaggggggtgtcccagggctgctgggggtggaggtcttggggggtgtcccagggctgctgggggcggaggtctaggtgggtgtcccagggctgctgggggtggaggtcttggggggtgtcccagggctgctgggggtggaggtctaggggggtgtcccagggctgctgggggtggaggtctgggggggtccctagggggatgggggtgtcccagggctcctctcaggtagttagcaaatgctttctgagaagggccagcagccggcacatgtgaggactctgcagaaaggctatgcgttccatgaaagggtgaattttgtgttcttcgagtccagcctgcactgcacggatagttctggtttttatgattttacaacttgacttatggaatattcagaggctccaaggcaccatgggggctggacgccaacccactgcagagtgagaggggcccgaggctgggacggaggccccagagcctgtgacctgggcc

SEQ ID NO: 17814 - DNA, 999 bp, Artificial sequence
  DNA replication origin
actcatccatctggtacaaagggaaaccattcgtaagccccggtgttggtaagggggcggcatacaggcacatctccggcgaggaccgcggatgcctctcgggcgggccgtgaggacacctccaccccggcgttcccatgagcccagcaaagggaagctgagcaaagatgcgcagagcaccccgatctggacgaggcctgcagaccacaaagctggatgcagtgagtgtgcaattgttgtgtgaggctgtccgcacctgggtccgtgtagtctctgcacacgagtctgtgctgtatgaggaaaaagccaggtctctccaccagagagtgtgggccgtcctctctgggcaggagggatgcccttatggcctcactctgtgtggccaggatgttgaatgcagagtccaggcccatgccagacccccagagccagatctgtgcactaacaagatgcccggggcgggggggggggcggggttggaggcacagtaaatgtgaggagcctgatggagttcatgcccttggctgaacatgtggggaaactgaggcacagaacaaggcgatctcatgaaaaggtggcatcagaggggtgttccagtgttgtttgggggtggtttttgctgcatggtggtttttgctcccacagaaaaggggtgctgcttggtcaaagcttcagcggtggggagggaaaggagtggggtgggcagcagtgaggcccctgggggaaggggcaggattctgaggacatcaacaaggcagggctggcatgggagacaggtgcaggcccctgctggggaagtgatgggtttcagggggtggggggctccctgccctggtgggggcggcctggggtgaacccttcctccaagctcgtccgacccaggctaccagggaaagactcatggcagaggcctccagaaagaaaggggcttgggtcctccctgagctacttgtttagagcaaggagcctccatctctctcagactcacccccagccccc

SEQ ID NO: 17815 - DNA, 1259 bp, Artificial sequence
  DNA replication origin
atgaggagatgaaggctcctcgggctgccagtaagagcacccctgccttcacccacctcccggcctgattctgctgttacagaggggctgggggacgtccagcccttccctgtgcctgtcccaccaggcggcccgtgaggggtaggctggccagacattctgtttggtggtggacacaggcctcttggggaggaaccatggtgggggtggggggactttcactggtaagaggaaggagggcgggggcagcaggttaggggcagagggtccctatccacacagccggagcagctgaccctgccgtggggcactgtggccctcaggccaggactctctggtctcaaagacaggaaggtgtctggcggtggacatctcaggctgggagaagatccctggggcaggaagggggtggggcgggtggggggaggatggggcctcatctggccgcccagaggaacccagctcccatgacctcttgatcactgggggccccacatagatctgagcacacaggggtggggggcaggaggtagattgagtggtggggtgtccacaggattccacgggctgtaacagagatgtggggtggagaggcttggagaggactagatccccgccctcagggtgagggcccgaggccacaccctccccttggggctccctggggaactgtggccaccctggagggctagagctgggagcaggtagaggaggcctagggtggggtttggaggaattccaggtagccccactggaaatgcagcagaagtgagctgagggctgggcttccagagggagtggggagctgctgtggaggggccgcctggctgcctgggaccccaccaggctaagggaggtgactctgggtgggccaagggtgctgagcagtcctgggtgggaaggttcccgatgactggaagtccccacccagcctctccagggcccctctcccaggcagggctcagctgcctggggcaggcttggggcccagagagagaggagtttgggtggggtgcacggacctctcagtgggcaaacagccaggccgagccagcaaaggaactgggtctctgccaaacaccattcccacccgcgctcgagacccaggctgggcagagccggcatcctgaggtgggggcaggggcctcgagatggggccagggctggctgaggtgtttggctggctcccggctccagcaggtaagatgaggccacctggggaggtcactatgtgtccctctggcccccgtagtcgggca

SEQ ID NO: 17816 - DNA, 943 bp, Artificial sequence
  DNA replication origin
ctcggctctgcagcccctcggtcccctgacccccagggcaccgctgaccccgcctggcctcccactgtcccgcccgggcccactgtgggacgtgcacagctgatgtagcacacgctgccctctgccgcctcagccactttgggattatgcttgtcttgttttttttaggttttgttgtaatttagatctatttcatatatggtttggaaactttcagactcaatagaacaaaaactttgggtgggatgggtgtccctgtccccagcccaccatggcttggggtgggtcatctgtggccgttagggtgcgtccccctgctcccccgcccagggccagggaccactcgtctcccactgggggaaaaagggggtcccgggtgggcgactagtacgtgtgaagctgagctcagggccggacctggggagcgggggactccgctcgggcaggaggcagcggccagggctgggccagggcgagagtcggtcctcccggtgctgggctccccgtctgccttgaggggtgtgcatggatggagggtgcctgaggctgcaggcaggggatgaccgggacaggcctgggctggggcagttggaggtatgggcactggtaggggacagagggttagggatcatgttggggggccagggacagtggaggaagggcccatggaagatggggctgtttggtttgaggctggagtgcttcctttgaaatttaattactgttttttaagtggtagggctcacagactgtgtgaagtcctgtgtgaagtgctggtgtggccacctacccaggtgtccctcccttttgttttggaggcctgtgtccttgtccaggggcagccctccttcccaggtgtggccagaagaaccccccatcccaagacttgaaatgtctgttgctcacctctgtccctccagaactcggcttccccatcttcact

SEQ ID NO: 17817 - DNA, 1230 bp, Artificial sequence
  DNA replication origin
acacccctcaaggcagacggggagcccagcaccgggaggaccgactctcgccctggcccagccctggccgctgcctcctgcccgagcggagtcccccgctccccaggtccggccctgagctcagcttcacacgtactagtcgcccacccgggaccccctttttcccccagtgggagacgagtggtccctggccctgggcgggggagcagggggacgcaccctaacggccacagatgacccaccccaagccatggtgggctggggacagggacacccatcccacccaaagtttttgttctattgagtctgaaagtttccaaaccatatatgaaatagatctaaattacaacaaaacctaaaaaaaacaagacaagcataatcccaaagtggctgaggcggcagagggcagcgtgtgctacatcagctgtgcacgtcccacagtgggcccgggcgggacagtgggaggccaggcggggtcagcggtgccctgggggtcaggggaccgaggggctgcagagccgagacggatcgggcagaacaaggacagggtgtgggggcagagtaaagtacccttttctccaccccgaggggtgggccacagccatcactgccccctcaccacacccctgcacacacacgcacacacacacactcgtgcacacaccccacacaggtggaaggcccggtgggcctggccccgagtctccgaaagaaggaaaaacgaggagttaggccctggagcctgagccctgccccgtcgccccagagaggttccatggggaaggaaggaagggtcagtgacgcacagcccagccccctcgccacagaccaccgccggcccctgcttcgtcttccgggcaggaggagcaggaagggcagggaggaaggggcagggctgggcaccaggggcctggcggcctcccaccctccccaagaagggggagggaagctacacttggaggctgaccttgtgaatatcaaaagggagccctgggaacttcctcgcaggaggctgccagtggcctaattgtttacagtataatgaatgcatttgtttccttcatcaattttaaatacaagcagaataaaaatcacatttttctcaggcaacagtagcagttcagtaggtaagtggcttgatcacatttgtttgtattagtaacgcatgcaagcagctctagtactcggtccctcgcgcagccacccagctccgcttacaaggtccctgca

SEQ ID NO: 17818 - DNA, 1560 bp, Artificial sequence
  DNA replication origin
acgccatgggcatcttctttggtgactattgggccattttctggggatttcttcccggttttccaggaagccccaagcttgggccctcaggcgctttccttggccacagcctgagcagttctgcgtagccctgtcctgttcctgtccacccccaaaggccataccttgggcagcgtctcggggtcttccctcccagcaggacgagtgcctcaggtgtgagccactgcctgagggttgcctgggctggcctcgccttccagctgccagggacttcggtcctcatgggagagtggcctcctgggctgcacctggcagtgttgggctgccctggccaggaggggtaggggcccaccttgctgtggcctgagctcccaccctgccccggcactgcttctggatggcgagcgcagtgctgggctgccggggcggctgggtgggcccctggggttgggctctggggcgcaggtgcccacgcgggccctggtgcttcacataggtgtggtcccaggaagatgctctcggtcatcccagcctccagcagctgtggcctctgtttggggtgtggggctgatgggattggagacgtgcttcagtttatgagctcctcaggagagttcctccagcccagaccctggcaggaagggcctgtgggagtggtggggcaggagacgggccatggcaggaagaggtcatgggcactcacaggctcctggaagcaggcgcacctggacatcgtgtccttcaggacatgacatctcatggtcattgagactggctgcccccagaaagcattccctccccattgttcccagagggttcagtcctgctgcttgtccatgccctcgctcacccagaccctggtgggacacctggggtgtggtcaagtttccgagggtaaacagcacagcgtggacctctctggccacgcctctgccctagctggttttcctcttcacacatacccagaggaggtcagcactgggccctgcaaagctccagccataccctccagccaggggattccgtctccctcatcgttgcctgagggctctctggtatctgggacggagcagaaaggcaaagacatgagtgtttcccaaacccagggccacagccagcccttcagagtgtgttccctaggccaggtgcagtgcccctcctcctgtaatcccagcactttgggaggccgaagtgggaagattgcttgaggccaggtgttcaagaccagtctgggcaacatagggagacttcatcaaaattaactgggcatggtggtggcgcctgtggtcccggctactcagggggctgaggtgggaggatcactggagcccgggaggtcgaggctacagtgagccatgatggcaccactgctctccagcctgggcaacagagcaagaccccgtctctaaacaacaacaaagtgtgttcttggggagggagctgaggccggggaccgcagcatggccgggagagcttggagtttggggctcgttggggagggtggggggcgctgtggctttccccaccccctgcttagttccatgtgtgatttgggacctg

SEQ ID NO: 17819 - DNA, 920 bp, Artificial sequence
  DNA replication origin
gcatgtgagcaccgggggcccgctcaggggagctgatcttcaccctggaaccctgctgggcttgtgaggacccctgtgtgagggtgggccctatgaggcttcctgggactcagggtggtgggggtggggggcaacagggaagtgggagccccaggcattgctgggcaggatttggggccagggctgtgtttccttggccccgcgcacctggtgcatgctgggtgtccagcaggtggtcgtcagatgaggggtctcagccctggccctccatgaacgctctagaggggctctgtgaccctgacagcagagagtcctgcccagggacctcggggtggcaccatgggctgtgtggcccaggagcctccgaggggcccgtctctgacgcgtggtgccatcggggtcgcgctgcacagctgcaggtcctgaggatgcagggcgcctggccgtcatctgccccagcagtggtttgtcgggaacagccccagacagcaggagggctgcccctggtggcggtggcggtggcgtgtcggccagcctggctattggcaagtgtttatggagttgctcctcgtcaggccagcacagtcccagggctgtgttcttggatgcactgagtcccccgtgtccttgcccctgagtcaggtggccatgccccactgccccttgctgggagctgctgggagaagagttgggggccacagtacctgtcacccctgtccagctacccacctctcctccacccagcagtttttgtggccccagaagtggctgccctgctggccctgccaagccgtcctccatcctccatcctgtcttgcgccgtactctcccttggggacccaagcactgagctgtcactcctgcccggcaagcaggctctgcatagcaccctcctaggagtcagccctcagcagctcatt

SEQ ID NO: 17820 - DNA, 592 bp, Artificial sequence
  DNA replication origin
gcagcctccctggaccacacggggcgaagcaaacacaaggacaaatgctgcccggggcgcggggttggggccttcagggacccagaaggagcccccgccgtaccttccaggcccttctgctcccagccgggcgacaccaggggagcttgcgagagggcggctgagcctggaggacaccacactcaggaagctgccagacacagaaggacacatcccggggctccactcgcaggcggcccccagagtcgtcaggtccacagaggcgggaaacagagggtgggtgccggggctgggtgggggaacggggagggaccgtttcatggggatgagaggttcatctggggaagatgggaagttctggagccgatggcagtgatgctcacaaaacagtgggaatgcgcttagcatcaccgaaccacgcacgtaaaagtcactgcaacggcccctctcacgtccactttaccacaataacaacgctcagaaagaacaaatgaacgaacgtcagaaggagggggccatgcaggtctggagggaaaccgggtctcattggcctcaccctgacttttctcaactccctgggttactgattggg

SEQ ID NO: 17821 - DNA, 1751 bp, Artificial sequence
  DNA replication origin
ctgggaaggcaaaccatcaccaattaccacgccatgccacgccacaccgtgcctgttaagacacagcccgtttcgtggatgctgacacatggggaaatgcagaaaagcccagcagggaaagccaggaggaagaaaaatgaaggcagagagggacattcacatcaggaaggagggagggaaggagggaggaaggagggaagagggagggaggagggagggaaggagggaagagggagggaggagggagggggaggagggagggaggaaggacctgtacgcatatcctggcctctctgggtctcctggaaacccggatggaaaggggctcgctggtctctcgagtccccatgcccacactcatgggtgcagctgcgggggaagatgtgggggccactaagtagaatcctcactggcacccccaggagcttgctcccgacgcgaggggccggcatgaccctgcagcccgccagggcacctgggcctgctcagctctcggagaacgtgggatccccgagtgagtgggaccctctgggcttctcgaccagctcaacagtcccatcaaacctggcccctgccctgccccacccacactcctggccagtgccctccttagagctgaggcttcctccaggcctggcaggtgctgtcattttatctcctgcaaatcccagcacccactcctaccagcaccaagcctggtcctggagactcaagaagtccccaagtggtccaggcctccgacagggatcccagcgatgatttttattgctgatctgatggcatccctttcctgctctacatccatccacacgtttctcagacttgcccaaggacatcctcgaggcagcaggtggcccgccctgcctttgcaagagcttgtccagccataggcacaggttgaatcaatcccacctatcacagcacatggcacgggtcactgtgaagacactagcagggtctgtgtgtgctgagaaggacgaccaggacactaaggacaaatgaagggcaatgcacgggatgccacccacacaagtgtgtacccaccgccatacacacgtgcatgcccccaaccacacaaatgcacaaccccccccacacacacgtgcacatgcgtcagacatggaggaagctcccgggatgtgtgccagctgtgagttcctctgggagacagagtgtgtggggacagcgtgtgtgtgtgaggccagagtgtgagtgagggccagagtgtgtgtgtgtgtgggtgaggacagagggtgcgtgtgaggacagtgtgtgtgtggggacagagtgtgtgtgtgtgtgtgtgtgtgaggacggagtgtgtgtgtgtgaggacagagtgtgtgtgtgtgaggacagagggtgtgtgtgaggacagagggtgtgtgtgaggacagagggtgtgtgtgaggacagagggtgcgtgtgtgtgaggacagagggtttgtgtgaggacagagtgtgtgtgtgtgaggacagagtgtgtgtgtgtgaggacagaaggtgtgtgtgtgaggacagagggtgtgtgaggacagagtgtgtgtgtgtgaggacagagtgtgtgtgtgtgaggacagagggtatgtgtgaggacagagggtgcgtgtgaggacagtgtgtgtgaggacagaatgtgtgtgtgtgtgtgtgtgtgtgtgtgtggacagtgtgtgtgaggacagtgtgtgtaaggacagagtgtgtgtgtaaggacagagtgtgcatgtgaggaccagcaggggagaatg

SEQ ID NO: 17822 - DNA, 1439 bp, Artificial sequence
  DNA replication origin
gggtattggcccttcaaagcagaaggaacccttcacccccgacccctgcagccaacggcactccccggtctggccatctctgcttggggcctcctcttgggccccaccctatccaggccagagatgaaggcaccctctgctccctgggtggtggtgggggggctctaacagtgcggacgcccccgtcccaggccacaaggcagcagagtggggacgatggtgcgatttgcatactcagcaaccccaagttcagcccctcttcttgcttctctctgggaaccccaaacaacagtcctgagttttgagctgctggtgggagcggcctcggacatacagccctgctccccgaccgggcaggtgtaccttccggatgggtaatggtggggggtgagtggctgcaacggagaccaccctagccagcagccctggccacctgggttctgtggcccagggccgggagcaccccacccaagcctgggtgttcagccgggggatggacggggccagtgctgaccttgcaggtcaccctgaaaagggtggggcccgcagcaggcctctcctgatgggcagagccaggacagatgtgctgctgtgtgccacgacccacacccagtggcatctgtccagggtccaggatgtgggcagctggtctgaggctggatgggagggtctcctggaccctgagcagttccaactttgcctgttttgcctgagttcagaccgccccatggaagtgggtacccagcttagggatgggtgcctgacccccatgccctgcagagaggcacacaggggacaccgggtggaccccagagaggtgggggtggagggagccagaagggaaggggaagcggacatgcacagggccacccactcacgggcccacaggccctgtggccagagctgtcccctgccaggaaagggttaccgtcacgggcccacgggccctgtggccagagctgtcccctgctgggaaagggttaccgtggaagtgtgcagctggtgtcaatacccaggcgtggctttgtctctgccagccacacagagtgacatctgccagctgcaattaaacatctgcccgcccgaagccactgctgagggcatgaaagggatggccgggcgagccccatcaggcacaggagggggtgtgggcgcaggtccgggcagccccctccccttcagaggacaggagagaagccccagcatggcactaccccttccctctgcgagctccatttccctgtccctcgacctcagcggtctgccatgccacaggtgcccgtcctcagcttgggtgacaacggccacccccactcaatgaaataaccgtcagggccccgtgctgtcatctgccctggggtaaaagcagctgccatgaccgtctcggctgttgcagggacctgtggatccagatgtgccaaggagaccacgggaacaga

SEQ ID NO: 17823 - DNA, 1481 bp, Artificial sequence
  DNA replication origin
accttgggccttggtgtgtttggggtgatgggagccagggctgggtgtcgggtttgctgggagcacggtgaagcctcgtgacttgtcccatgcatctgcccctgggtgctgggtcagccttaagccctcacatcgcctggacttcgtgagctagaagccctcacgcccacctgccttgatgggtttttggggagtcagcaggaccgcagccaggaagcggctctgtggagtcccggatgtgtgttgggtggggacgggaggcagctgctctggtgagtccttccctccaactcccccgtactcagaccacacgaggtacagtcccattggggctgaggggtggggacaccctcaaggccatgttcctgcagggctttgtccaggccgcaggtgctgcgcggcattctctgcctttgcacgggtgtcgctgatgccagcgaggtggaaagtgggcggctgggaggccaggcctgctcccgcccacctaccatacagtttggctctggatgccacagtctgggtttcttgtcatggtttttctgttcggcaagcccataagtggggcagagaaagggggtgtgtgatttcttggttaaaatctaggttactggctgtgacgttgctggcgtcgctgggtgtgctgggttggcggtgccatggggggagcaggtagagggaggggccgtcgcctgacctggagctgcccctgggtgctagctccccgtgccctccgtgtcccgggctcgtccggggaacgtcctcacacccacgcaggaggctggctgctgccctcgccaggccgtgcaggagtggaggcaggtagctgtctctctgggctggtaggactagcgtgttctaaggtccctgcaggctgagctcctcctcctccctggcctcagtctccctacctgttgagtgagaggcgggcctgagcgattgccgagggtcccggagctgcaccttggtgtgtggtaatgcgtgtgcctgttccaccctctctcgcgttaagaaccatggacagtttgtcctgtagggctgttctcctgtttttgaaataagtcaaaatattacagataaagttaattgccttttgtccccggcacagcccccgccccatggtctgtgtggcctcacggcaagggtctccatgcggtgtctgtctcgtgcctctcctccctccctccaggtcccgcgtcaccacccgtcagaaggagccgccacgtttgatttctccagtgccttatcaaaggacattcaggttgttttcagtttgttgcagtcaggagcaaagctgcgagaaggcgccatgcatgggtgtgtgaggttgatggggccgagttcaagcccccccacccgcagcgaggcaggccccgtctcggtccccatcaggtggacgctggctcgggacgctcagtgcttcccacccaccagccctcatctctgcagcagtcacttcagggcgccctcctgggccttaagcc

SEQ ID NO: 17824 - DNA, 1303 bp, Artificial sequence
  DNA replication origin
ctgggtgggccttgggagccttccccagcagcctctggctggtcccctgccttccctggggtggctgtcagcaggggcagagggaaagcgcacatggggcggattccccggaggcctcagccagccgggtccacaagcactgacatcctgtacggcctctgtggtgagccggagcccggtgtgctctgccctcaggaagggccaattccgtagctagcaaagctcccagtctcaggacaaatcaagccctaccccctaccactaaaagaaaacaaaagctgtgaagcccagatcgaggtggcctgtgagctggcattctgtgggattcatgcaaacacagcaatatacatttaaaccaagtgcggagttctcaggaagacaccacggagcccagagcacctgctggcaaggcagtggcttctcctgcaggcggagagggagccaggttggccaaagcagtggttaccctgctgtcccggctgtggtgacagacgctgcacagggacccagctggcctaggggtccaagctggtgggtggtcctggccccctctgcccccaaccagcactgcaggaggggaagggcaggggggcgtcccatcagggcacagggatatgcgtggtggggtggagagagtccctacactgcccctcggggtccaccacctgcccgtggctggcattatgcacccgcacccaggcccaggccgctgcacacaggccctgcatgcagaccagccaggtggccagcccagacacacagtcaggttgcagggacacccgatcctgggcaccaactgtgggactctgcccagcaaagcctgaacagtctccagaggctgtaaccaggaatctccaattagggcaacctgggtttgtggggcccaggacggggagcagccctccttgaaagaaaggaacggagaggagggggagcgactgctcactcggctcagcacactgggcgcttcctggcccatccctggcgcggggcctggagaggtggtggcaaaggggctgggttcaggggactctctagacctggccgggtgaggcgcagactgaggttaaaggggaagtaggcgggtcctcccgtacaccgcgtggcgccaggcccttcacagacggggaacgtgaaccctggggcaggtccctgggccacgggacacctgcgtttcctcatctatccagtggagacaagacccttcctacaggctggcagagtctcctaggagttcttgtctcatccaggaccaagtctgaaccccatggtgaacagagctctgccacctcctccaggcttg

SEQ ID NO: 17825 - DNA, 1514 bp, Artificial sequence
  DNA replication origin
agggggcgggggcggcccagaaggcgccagcccaactccgcagggccgcacaaaggccgctgtgtcccacgggaggaaagtgcgggcggccgcagaggcgccgggtggcgggaggagggcggagccaccgcgccgggagctgggcaggtggacgcgcgccgggggcggcccgcagtgcccccgctgcggagaagttgccggccggtcgggaagacctaccttcagccgctgcggccgccggccggcactgcccgctccgcctggcaggacaggctccccgcacgcagcccgcctgcccagctgctccgcgaatgcagcaaacggagcgggagccctggggcggggagggcgcagggagccggcaaggaggaggaggaggaggaggaggaggaggaggagatggtggaggaggaggaggaggaggagggcagagcgcctgggcgctgggctcgcggccgcagctcagctgcacccaggccggccctcccgggcagcgcaccgcatctcaatgaaggggccggatgcagacgaacgttccggcggctcgggaatgaatagccgcctttgatttgggagccgaagtaaatgccagctcccagccccggctttaaaaacagtggagtgttggtgccagaggaatgcgcggccccgggtgctggtacgagacagacttttgatgactcactgcaatgcaaacaaagatggcagaaatactgtacagtagtggagaaatgcttcccggtgccacggcaactgagacagcctggaaatttatggtgcagttttgcatatgaattacccagtaaactgcctcccggccttccaggacagccccagtgtcaaagcatttaaactattccaaacagtctgcagagctggcagagctgaactcctccagcgagggtggggaatgggcagaggcgccagggggagggggtgagggggtcaggacagctaggggagccagggaaggggaggggaggtacagcagggggtgaagagaggcacagaaacggcaggcagtgggtgggtgaggcggcaccccaggtcctgggggccttagagctgtgtcctctgcccaggcggcaggcccgggagtccagccccagcacccctccccatcccactcccagcgccctcctggcactttaagaaaagagcgactttgtggccgggcaaccaggagccggaaggggcagccccgcctgagaggtcccagcagagggcaaagcggccgcctcgctcctcccgcacactcctggctgcggccacacaggctgcacctcctgcccaagggggtctgcagcgtctggctgttattgagccttttcctgggaaggggctgctgctgtgcaggacttgtggtggccccgggacccctccagagaatgtgtacttcatcctgggctcataccagcctctctgcgtggggccctgaggctgacctctggactgcccagcctcagtttccctgccactggctgtgacccccaggaagagcacattccacccaa

SEQ ID NO: 17826 - DNA, 1303 bp, Artificial sequence
  DNA replication origin
ctaaagttcagctttgttcttgagccttccaagaaagcaacctaaaaccagctcctgtccggctctcagcaggctggggcgtggggctgcagcctcaccggtgcaggtggcctgaggacaagccagcaaaagctccagttgtcctcgatccccagggaccacacggccccatcaccttcaaagggaataatggtcccttctctgggagagctggtctgtcccccagccctggggctccagctcctgaggtgcggacgcaggccgaactgggctgggcgttaagacgcccacctggatgcccagctgagagctgctctcctgcccaggtcacagcaggttgcaggcatcaccggctttctgtgtgtgaggcttcagccgccggcttcacaaacattgttccattcacccccaggaaccatctgagggtaaatcataaccccagttcacagctcagcgtctgaggctgaggtgtccttacaggaagtggctggtgcccacgggacctaggatttcagccttgccaacaggccaggaccctcttgctgctggaagggacaggctgagagcctacattgtcccttgctgtctgtgtcagccctggctgctgccctacccagcccaggtacttgggacccccaggaaccggtgcgccgtgctggcctctgcctgtcccctcttttggtacaaaagcccctgtatgactcagacatccctacccccccgtccttggggcgaagttgcccacaacagaagccacgggctctctgggaggctcctggtggtgggcgcagtgggtctgtgaagggagctgtctaggggcctctgccctctgtgctgtgttgcacaggcccctctcttgtacccccctgcccgggttgtgtccagcattcagcccttgccgagcttatgagggcacttggcagacttcctggatgaggcagaaactaagtggggacctgagggtggagggtgtggcggggagggtgacagctgggccctgtgtctcctggcccggtggagcccagctcatcagcatggccgagtggggacgtttctgtaaacgcccccatcccagtctccttgagttgtcaccagccccttgtaggaggcagaaaacactaggcacgaagccacctccacgggcctttgccggcagcttccccgcacctggatctcttcccgtccccattcagtggctttttgtctggtctggagaagctgagcccatggtgtgtgactagggaggagccagatggccctctctctggtctccggatgcctcagaggggcgccgggagtgagg

SEQ ID NO: 17827 - DNA, 1632 bp, Artificial sequence
  DNA replication origin
gggtcgggccagccccactggaagggagggcgacagagccagtcctcgcagggcccggctggggaagggccccgcagcttctggggccgcctgggagccctctctgggtctgccttgggctggccctagaccttcctggtgaccagaaagcaggatacggtaccccattcggagctcacagcgggaaaactgagacccagggaggccatggtgtttgcccagcttccaccgcagcacggggggaaatgaggctcgaatcccaagagaacacttgctctccaaccctggaagtggctgctcagctgaggacagcccaggacggcaccggcaagatccccaacgaggccccaagcgccctgtcctccccggtctgagctgctcgagggagggcaagccctccccgtcccttgtctgctgcccaaggccggccgtggcccaggaaggcccagtttcccaccccggggactctgctgggaagttccgggaggtgacctggggactctgctgggaagttccgggaggtgacctggggactctgctgagaagttccagaggtgacctggaagacgggcacccccagtggctgtcatctcatgcacggaggtcagcagtattcggggactgtcgggcttgtacggtcgccaggtggacagtggttcagagagagcatcagcagccccttggctgtgcagggtcagcggaattttgctctaaacgtgctctgtccggctcccttccagtgggacggagcctctggggagaatcttcaatctgggaactgtaccactgcccacatcaggcccagatggaagggatgacgggggcaggggacacactgtactcagcagggtgggagggaccctcagaccccactccctgcctctctcccctagggcaaaaatttgagtccacacagcaatgctggatccaagccaccgtccacatctttcccagcagctgcccctgagcccctggaagctgcaaagccacagtggtcagtcagcaggacgagccactgcgcatggacatggcccagtccgtggccagggactctttctcgggggcacttggggctcgtggggacccaggtccggtgaccaccgcagtcagccatggttaaccatcagcaggggcttcactgccatcccaaccacgatggcctcattgaggcccccacccagccggccaggaggcatcgtggtctggggtcactgagacacagggaggcaaaggacttggtctttcctgacccactgcttcatgcctcctagggtcccctggccacagatgagggctcaggcctgggcgtggagggcgggatgggcagaaagcacaagggctgggctgtcccacaaagggacctaccccaagccccgaggggagccagcccagcccccggcatcctgggggaaggtttcccggaggagacagcaggcaatttgcataatattctttgcaagttaatatcagcctctgataatgatctcggcatcgcgtggagcggctgaggcggctgttacaacactaagtaatcatattttaaattatgtttccctttatagaaaggtgttgcaaaaacacacagacacgaaatctgtctgttgcagccccgctgccaaccacctgaccagc

SEQ ID NO: 17828 - DNA, 2297 bp, Artificial sequence
  DNA replication origin
accaagggcgtgcccagagagggtgccaggaaaggaacgaaatgctggggagagggcacttcggggaaggcccaggacccagggagctgggtctgcagacactcaccgccggggagcctgaccggagatggggtgagaggccccagtgagccagctctacacaggttcccaagacccctcatcagcccccagtgagaccagacccagtcagacctcacaaactcccgcacctgcccacatgcatcagacggcggctcaggtccagcgtccagacgggctagcgctacttctctcctgccttggagggcgctccacggcctcacaccacagggctttgcttctccttcgagccacgcctggaagcccagccccaggtttcctcagcccaggccagaaatgtcaccctgaagtggaaggtggcctaccttgtcctcagaaccacaatgggaggctggtcagcctgggccactgaggcagggacatgtgctaccaaggtgaaggtggactgggccggaggagcagcagagtcagggggccccatagtcaagttcccaaatgtgttcgttacactggggtctgtagaaggccttggttctccggagaaacatgctggtgtatcctggggtaaggggtgccacctgctgcccccctgtggactccgaccctcatcccaccggccacagtccaactggatctcggaacccactgcgtgaccctgcaaaggggatggagtgaccccaaggggctgtgagatgcagagaggcagcctggggacagtgtgtggaggtggctagaacagggctggctgaggaaggaacatgggctctgccccactgacggtggctggggccactgggcactcggtgccctgtgcgttccagggacacaggtcagaggcacagacctcagaggaaggggcacaaggtggaaccttgggaactcaacatcccgaaaaggacaacaccttggttccccattccatccctcgggcctgggagaccacactgcccacaaaccaggaaagcaggactccggaggcagaggccaagaggagtgcaggcctggaagaaccgctcagcaccaagatcgtcactgttgtttcatgaataatgcagcctcatgctttaattggaaaacaaagggaggattgaagaattttttaaaagtcaccactagccccctgcccagggcagagcagccctgcgaacccttccagcagccggtggtaaagaacagagcctgttctcgcagcctgtagcagcccagctcccactgctcccagcaggagatctcccgggtggctcctccccgccttcccgccaggccagggccagcaccatcgagccctgggtgtgaccactgcgaaaggatccctggccactaagaagtgacaagtgatatcttgttccactctctgtgcccattccaagtggctttgccgaaaggacagggggccaccaccttgggtggcagctccttttatttcctccccttggactctggcccagctaccacccaacagtgaccccaggggaaaacgccaagaggcctctttaagggaggggctgggaaaggccccacagaggaccagaggggtgctccaacggtggccgggagaagaaggggtgggtggctgagaggtggcgggtggggcgggggctgcctgaaccctgacctaactctaggcgcccctgctggggggtgctacaggctaaaacaccctgcagaatgctgagctgagtgtcccactggagaacaggagggaaggaggtcaggagcctgccagacgaaaagaggggtgggtgagaagaaggggcgacctggagggacacggactctggcaggagagtgcggccgcgctggcgggcgggaacaccaaggtgcacgcgctcccggaggcagctccacgggatgggagtccgggctgccttgggcacccccgggtcagcacccccgccacacacaggaaggaacgcgcagcagagaacacagctcagggcacccagcggcccagggagacgggcccaccagcacgtgggtgaaacacctccaatccggaggccccgcgcgggggttgggggagggagtggaacggcctgggaggccaactccagggacccggcctcgcggccttcagacccacaggtttaagcggctccacgacgagagtccaagaccaaacttcccccagagcctggcagaggggctgggaggtgacctctgacctccgaccccacacgatcccagcaagagaagcaggaaactccgtcggaaggcctcggtccgccctggccgtg

SEQ ID NO: 17829 - DNA, 1474 bp, Artificial sequence
  DNA replication origin
ggcagaggttacagtgagctgagatcgcgccactgcaccccagcctgggcaacagtgtgagactcggactcaaaaaaaaaaaaaaaaaaaggaataaacagagctcacctcatggtactgttgtgaacgttaaatgcggtaaggtgtacatactcagtagcacgggcctggaattcagtagggatgcagggtttgctttaaaaggtgcaaatatatgttggtgtacatacgtataggcacacagaaattggggaattgatttctgcttatccgctatcttctaaacacttttcaatgctttccaaatatccttcactaaggaagaatgtctttaatatttagaaaataaaagtgattaaaacaatcattcccatccctggagggccacgggtcctagtgggtagccccttgaggcctgccccagggctggaagcagctccaggcatctgtctctgggattcacgattctcaggggcttggggtagctatgctcactgagagatcctgcagagattgtaaagtcaggcctaggaagcaccagaaccctgaggctgctgagctcatgccctgggtgtaggaggcactcagaaccctcctaccccacctccttcccacagtagactgcggggcgggtttggaagtggcagtggtggggggaggggggttggggtgtgggacctgggactgcatttaggtctagatgggactctgtggggagagcccagagtccctgcggggttccatactcacccccatacaaggcaagccagggagtgaagtgtgtgtgtgtgtgtgtgtgtgtgttctggacgcagagctgaatagaacctaaagttggggtcaagggccagtctgtggccaagatcaagggcctagcttgaggttggggtgacaagaacctggccaagcttctgatgatttgtccagggaatgaccttggctgactgtgccagaagggctgtagccccaggtttctgatccccagagccccaaaggcgttctctgggatgctggtggccatctccttctcaacccttctcccagcgccctcgctcgggaccactgaggcggtatcactccattctcctgcaaggacccttgagcgtgctgtgggagtgaggctggcttagcctctgaggaccactgcagcctgtcctgacctcaggccccaggttagggggcagctgaggaggggtctctgggtctttccgggtgtgtggccgttttatttccgtgcccttgttttaaaactgcacctctgtcctcaggagcgtggccttgggcagatggagagctgcgtggccggtgccggaatgactgtcaacgccccagtgcgcccggatcacaccaggcctgaaggcagcgccaggcccagtccaggcagcttgcagttcccgggccgcagggacgggcgccggagccccgcagacgttcgcccaagggcgctcccgtatcctcgtctttcacggcccgc

SEQ ID NO: 17830 - DNA, 1841 bp, Artificial sequence
  DNA replication origin
aaagtcctcccccaccagcaagccctgccccaggaaggcagaggaccggactgaaatcagatggtttctcttgccccccgtgaactgctcttcagacaatgaaagcggcttcctcccgagacagcggcaccactggccgtttcaccaaaggctgttctgcacctctcttctgtgttgacaggcgagacgcaagcgagagagtgggcagagaagccctctggctgtcctcctgccgcaggggtgcagaggcgcactctggctctggggagctgtcccggaagcacagccgagagagcctgtgctgggctggtgagaggctccaggtcctcctggggtcttctcagcccaacagccctggccaagggctgacctgaacagcagcaccagggaggcacctgaggccccccgcctgctacttccctttctgctgaccgagctccccggacactctgaggaccgggaagaggcatcagaactcgggcaggtgtgggagagggggcacagcatcccccagcagccccaggaaacagggtggagacagatggagcctaggctccaattctgagactcctcagggcacctgctgtgtgccaggcaccacactgagccagtgatgagacagtggacaaggtgggagaccgtgccgatggaagccaagggcggaccagtgtcaggatggcgtctgggtgcctgctgccgacggccatgtggctctttcataaggaagggtcagggaaggcttcctgagccagggatattggggtggagactcaaagaaagtgacagagcaagccttggagacacaggggcagaaggttcaggcagtgggaacagcgggtgcaagggccctggggcagcaggtacagcagaagccagcctcgctacagctgagcaggcactggcgtggacgaggctaccacgggtgggatgtggggtggggaaggatgtggggcatgggtggggtggggtatgaggcgggggtggtgagctgggtcctggtcacccaatcacccgggcttgtgctctgagcaagaaggacattggggagctcttgggggttctgagcgggtgggggtaatccaacaggtttagaagcagccctgtgctgctgtgttgtgacaggctggggcagggctggaggggaggctagggaccggggtggggaagggggctgtggcaatcactggagaacagggcagttgtggaccaggagggtggctccgacatgactttaacacagagctgttaggatgggcacagactggatctggcgtgagattggggtgggatgtcaccacctgcacaatggtagcagcacctggagagccatcaaaggcttctgccatccaggggaggacacgcaggtgtccaggcaaacaggttggtcctctgtgtatgactcctgagcgcacccaggggctctgcagtgtctgcagatgtggcttgtgacctccccttaccccctgcccaatgctttctggatggaaggggaaaaatcaagttgcaaggccgtgagaactcaggcctggatcccggatggggcctccctgagctggagacccatagcagcggtgctgctatgctcagttgagactgtggcccccaggcccttgtagcagccaggaatcaacaagatcaaatgcagggaggagatgcggaggatgcacccggggtgagccccactcagcccaggccctgctggggacccctgagtgagccccaggctaagctgtaaaacgggaataaggctgggcgcagtggctcacacctgtgatcccagcacttcgggaggttgaggcaggtggatcacctgaggtcaggagttcaagaccagcctgcct

SEQ ID NO: 17831 - DNA, 1115 bp, Artificial sequence
  DNA replication origin
ccttccttatgaaagagccacatggccgtcggcagcaggcacccagacgccatcctgacactggtccgcccttggcttccatcggcacggtctcccaccttgtccactgtctcatcactggctcagtgtggtgcctggcacacagcaggtgccctgaggagtctcagaattggagcctaggctccatctgtctccaccctgtttcctggggctgctgggggatgctgtgccccctctcccacacctgcccgagttctgatgcctcttcccggtcctcagagtgtccggggagctcggtcagcagaaagggaagtagcaggcggggggcctcaggtgcctccctggtgctgctgttcaggtcagcccttggccagggctgttgggctgagaagaccccaggaggacctggagcctctcaccagcccagcacaggctctctcggctgtgcttccgggacagctccccagagccagagtgcgcctctgcacccctgcggcaggaggacagccagagggcttctctgcccactctctcgcttgcgtctcgcctgtcaacacagaagagaggtgcagaacagcctttggtgaaacggccagtggtgccgctgtctcgggaggaagccgctttcattgtctgaagagcagttcacggggggcaagagaaaccatctgatttcagtccggtcctctgccttcctggggcagggcttgctggtgggggaggactttcctgttcactgggagcctccgtggtcccccacagacaccccagtcccaacagagaagacgtggccaggcccctggccttgtagcttatgtgcagcagatgataaaggccccgtgaagacacgtgtgcccagtgagacagccagagaaggctgatcctactcgacggatgggctgaggaggaaacgagggagtgggggaccctcaggggtcgggggtgacaggaagccgagcctgccagggcctgcaccctcacctccacccaagggggccctgtcctgtgaagctgacccaacgcctggcctcagagggcttgtggtccagcaggcagcacagggaagatgtggcagaggtgatgaagagcggtggtgtgtgtgcggggcggcgggt

SEQ ID NO: 17832 - DNA, 888 bp, Artificial sequence
  DNA replication origin
cccctggccttgtagcttatgtgcagcagatgataaaggccccgtgaagacacgtgtgcccagtgagacagccagagaaggctgatcctactcgacggatgggctgaggaggaaacgagggagtgggggaccctcaggggtcgggggtgacaggaagccgagcctgccagggcctgcaccctcacctccacccaagggggccctgtcctgtgaagctgacccaacgcctggcctcagagggcttgtggtccagcaggcagcacagggaagatgtggcagaggtgatgaagagcggtggtgtgtgtgcggggcggcgggtgggggtggtgtgcggggcggtgggggcgtgtgtgcggggtggcggggggtgtttgtgtggggcggcggcagggtgggtgcgcggggcggccggggcgtgtgtgcgggtcggcggggggggggggtgtgggttggtggcggtagggaggggggcgtgcggggcggcagggacaggcccagggccatggactccagaccagaaaggcagagactgacttggggtgggctctttccttcttctttttttttttttttttttttgcctttttttttaaatcgaggtgagattcacctaactgacagcaaccactatcaactgaacaactccgtggcatttagcacattcccggggctgtgcgtccgccacgcccagctcccaagcagccttcgtccccgcggccgtctcccctgcttcccagcgctcaggattttaccagcggcgccgcctccataccctgcacgaggccccctttctgttttctgagtgctcgctcctttcttccatcataatccatggttacatatcagtgtgtcgatttcgctcccatccaccctagagagaggctccag

SEQ ID NO: 17833 - DNA, 1357 bp, Artificial sequence
  DNA replication origin
tgggccctggggatgagctggagctcacctgctgctgcagggagatgggggtcctggcagaggagcagcgggtgcaaaggccctgtgtccgtcagcgggtgcaaaggccctgtgtccgtcagcgggtgcaaaggccctgtgtccgtcagcgggtgcaaaggccctgtgtccgtcagcgggtgcaaaggccctgtgtccgtcagcgggtgcaaaggccctgtgtccgtcagcgggtgcaaaggccctgtgtccgtcagcgggtgcaaaggccctgtgtccgtcagcgggtgcaaaggccctgtgtccgtcagcgggtgcaaaggccctgtgtccgtcagcgggtgcaaaggccctgtgtccgtcagcgggtgcaaaggccctgtgtccgtcagcgggtgcaaaggccctgtgtccgtcagcgggtgcaaaggccctgtgtccgtcagcgggtgcaaaggtcctgtgtcagcagctcagagagagccccagtgtactgcaagagacagcgtgggggggggaccaaggctgaagagtgggcgagatcagcagctcaggctgggagggacatctctgagcacagagggacagtttcactacagggcaaacggggtccttctggcctcctggagctagtcctgtcccgtccacacagcccagtgcctggtatggacacaggcctcaaagggtcagcccagcaggcagaggcgggagctgctgggatcagcacgctcggcttcatggtggtcacagcagggacacccaaaagagccgccaggatggcaagtgtccctggcatctgaggcccatagaagtgccctttgcccagcaggatcgtagacaggatggtgaccccccaaggggtggagggcccagggcagtccggcccaggctttgaacccattcactagaataaccgtcctaaagaaagaaatggcagtgggggagtgaccaggggcccgagccagctctgcgggagatgtagggccttgcagagtcacaaacacctgcctgcatcccccattgtcctgcaggtgggcggagccgcacccagtgcagccggtggtgggggcggggccagctgggcttggtcttgcaaactgcacatcttctaggaactggctccaggaaagcggaggtggttttccccggagctgcctcaggaccccgagggggtggtggtcaaggtggactccctgggggcctgccaagacctgatgttctgagtggggctttggctggagtatggcctcggtccctgggtggacaggtgggtgaggccctgtgcagtgtcctgggccattctgctgtgcacagctctcgtcccctgggctctggggccccctggcccctcactctc

SEQ ID NO: 17834 - DNA, 1001 bp, Artificial sequence
  DNA replication origin
gggtctgcccagttttggtggaaggaacagggcaccagcctccagtgctgcttctgcaatcccatggccccgacccaggccccaacccaggccctggtaagacggtgacccagggaatctggagctccctggcccactgcggcagccgtgccacaggtgacatcgtgagccccgcccccccgccccccgccctgagtccaaccccagccctggttccttctccctgaacttcccacctggggacagaatgcgggcctagggctttccctgggggtgacctgagaacagctagtccagcacctcacctcactgcacgctgtaggcccagcctccctgggttcccgcccccttatctcacaggaagagctgggcctggagaggggcagatggctgcacagcctcacgaggggccggggagccgcacctcttcctgccaatcagcccagcaaccggcgaccccaagcgcggcgaccgcaaagggagtgcttgcccatccgcgtttgaaagcagactttttctcggcaggaacacaggactcacctgccagtggctacccaggcaggggcttccctgttcctcaaggggccggagtccctccgttctttgggggaccatctgagggagcacgggaaggagccatggatgtggagggcggcagagccaggacgtgagacacgacagcagaaaacacttgggcacacaaatgccacacccccacacgcacatacgtgcacacatacatgtgccaggcacgcaccccagccaggtggaggagggtgggggtcaaaccaggctgcaccgagcacaggtggtggctgagttccggttggcccagctccaggctgtggggagaagagagatggcggcattctttcggacgcttttatccactatgggagcaggaagacagccagggttatcacagcacaatttgaaaaacatacaaataattcatgtcagcataacgtcatggtgttgtcaataatgaatccacacttaaa

SEQ ID NO: 17835 - DNA, 1085 bp, Artificial sequence
  DNA replication origin
cctgggggcggggttgcaggctgctgcggcgggcgggctgccaggcgccccctccctgcggggccgctccccttccgtgcagtccttgtatggcctcctgcagaggagaggccccgtgggaggcggaaggcagagctgggtcttggtgctcctgggctaccgtcagcccccaggaaataatcacatcccaaagccccgtcagcggatccaccgccacatccagagtctccccatagcccgggtcggggccgcgttcctccatctcaggccagccctgctggggccacctgccgtcctgacctgggcggagactggaaggggcaggtggggcggggcccaagagtcctacccgactaatggggacagccggagccaaggggctctcagggcagcaggagggccatgcaggggtgagccacagcccccagggcccctcctgccagcttcgctgcgcccatgagcttgggtttgcctctagctgagggcatggggcaggcctggggagccggtaggcgctgacccagcggtgacccgggcccaggggaggagggcgccggctctatttgggaaggggcttcgtaaaggggcttggttaatttatgggagaacctcggtgtccccgccctgtgagggctgtgggcgtggggtaaatgcagggcggggaggggagaggggtcagggctgaggaggagaagcaggggcaggaggcagggcggggagggcagaggggtcagggctgaggaggagaagcaggggcaggagcggtgaggaagaggggcatttggtcgaggttgggtcaggtaaggacacggtggtaggcaaaggccagggggcaggtggggtgcctgggaggtccgtggtcagaggatgggtgctggtggggcctggagatggcggtgctgcctccaccctcctgagcctggaggcctgacaattgcatccgaaaaatccacagccaccatcgtgtcagcagcacgttgaccatggctcacgacatggggacgggcattcttgccgcttcctcagaatattaacgacggtcccagcagaatgctgtatgaatattcatatggagctcaatcaag

SEQ ID NO: 17836 - DNA, 2304 bp, Artificial sequence
  DNA replication origin
tttcagagatggggtctcgctctgttgccaaagctgcagtggccacgatcacggctcactgcagcctcgacctcctaggctcaggccattccccgggcagaggcatgtcacaggctccaagagccaaggagcttccccatggccacagtgtgttccttgcgggagccccgctaacccggctcctctggggggggctgaagagccctgtgggggatctgaggggcggtggagctgcttacgaccgctccccagcagacctgccatcctcgggctgtattaaccaggcgtttcccctgtttgacaggttctgttttcaaagttgttctccccttgaggtcccagatgaccggctgagctgtgcaagggccacggctccaaggaaggccggagctacttggaggttgtccccaggccctttgtccacagtgacagacacccagaccagaccatgctgcagtgactggtaagggtgccacccagagagggatctccagggaccgccgatggtgctgtatgtctggggctgtctgtcttgggcctcctgggccctcccagcagcagctgtgtttctgctgggtggggagacgtgccaggaccactgctgggggaccagcgctttccacggacacgtcacatttagaacagcctgatttgctggtggtgggctccacatgtctgaaaacacaggagtgacctgcaggcctggaggcttccagaagcttccagcagtggtgaggagtcgaggactgggaaggtgttgagacagaacctaagcatgtggccgctgcggcttcctgcagagatctcaggcagcgcgcagccgcttcggagggagttgggagccggttaggagacaggatccatccttacgaggcggctggtccatacagcggttcccctcccactgcaagtggcctcggttgcctgcgaaggagggaagtggccccggggactcagggtggcggccggacctgagtgagctgggaaggacaggtgtgggcagggagggccgctggctgctcctggggacggtgggaagtggaggtagctgcagactggcctggaggtcaggaacgtgccgggaaggttctggaatcagagctgcccggcgctggctggatgagaggcccccagtgacagcagtgggtttgggagtcatgggtttggcagtgaggagcctggcaccagaggtcagtgttcggcctgggggatgggggagggtgggcggccctggaccaatccctgagcctggaccacagagaaggtgtccagcccaaggcaggcgcgaagctgagggggagctgggcgggccggggagggaggaatcagaggggctctggggagggcggcccctgggtggagacgggtgggagggaggcctggaggtggggagcggctccatctcaggctgaacagagtgctgagtcaggaagtcacagccgggcgcggggtgtggaggaagccaccaaagccagcccggggctgttgacttagtggggtctgattttcagtctgtgcctggcccagggggattgtgccgagtggctcccagagcccccctttccccgtcgtccaccacacggggacaccagcttgggcaccagaccgggggtctctgttgctgaaaagtggaatccaagctgaggagccagcagagggcaggcagtggctggaagggggtggtgctggggatttcaagatctaagatgctcggtcaagatgggccacgtgctgtcccatccccagcacagggtggcctcggaaggctgccccgtcagagcccccatgtgcagcctccacaggcaaaaccaccccaaacgcacacacacaggaatgtcctccacctcccgcccctccgcagggggcaggacaggacagcaggggctgagggggaaggtgcccggctccaaacacagcccccagcaggaaggacggcagggccaggcgcggcccccactccagaccagagcatgactcccccggtgccgctgcgtcgatggtgatattgatgctccgtgatcttggaagggcctgtcccctccagcgtgcgatcggaggagggcgcgggccctggcagtgctgtgagtgctgattcagcgttttctgggggagacaaacgtgcttcgatctgcagaggccagtgcgtttctcttcttccttatgggtctcctttggaaagggcccctctctgcccaggccctccctgcaggcctccgctcatgccctcggaggcgggggctgccctgcacccagccccggtgagccgcacttcccatgcagcaggctgcagaggccgcagtccag

SEQ ID NO: 17837 - DNA, 1278 bp, Artificial sequence
  DNA replication origin
atgtcttcgggtcgtactgcggggtgggccctccgttccgcctctctgtgggcctctctccaggaccacagctgccagggactttagacatcaccctgggaggcccctggacacagagggctgtgtgcccaggagcaattccggaggggggccctcctggctgcacagccccttctgcgtgccctggccccagccccagccaacgggacacggaaggctcccctcgctgacacaccacactgccacaaagctgcttactctgccctgggccgcctgaggcctggcactgcccgcggaccaccctgtgtgtgtcatcctgaggggctgtgtgggtcctgagtccccagccagccttcagggtccccttggattgtgtagatgcagtctagcggggggccggagaagggctcaggtgggaggggcctcagcaggctcccagctcaggggctggcctggggggaaccctgggagccaggggctgactccagcaacactggcctgtctgcctgttctgggagggctgtgaggatgtcttgcagatgctctggatttctgcggaggcacctccattcctttctggctttttttgcgggggagggctttgggcctctttctttgagggaacaccgtcaaagaaagcctgggagatcgaggcttcagtgagccaggatggaaacgcgtgtcccaagtgtccggagcaggcggcagaggcctcagtgcggcaaacacagccccagagcctgtgtggcaccagcagcatcttagagccccaggtatatgctgagatcttatctcacgctgtcctccagtgtctggggggcccaaatgatggcacaggggcaggtgggctggaggggcgcagatgcctgtgttcagggagggtggccaccatgggccgaggtctcacccaggaccccttgctctgctcctcagccttgcagtcacggcagcactatggtggactgcccatggccgtgtgactttgggggcaagtgggagggcgccctgaataatgattgcaaggacaacaggcagaggctaccctagagcaggacacagggtgtggtactgacaaccctagtgtcacctcaaatccatgtccccacactctgggcatgggtgggacttgtgaccctaccctgtcaggcggaccagtggcccaggagccatgaggacagttgtgtgccactggaagagaaactttttgaaaaaccctaaatcaggtagagaaagcaaaaaatctctggccgtaaaccgtgctctctaatttatcggcag

SEQ ID NO: 17838 - DNA, 1366 bp, Artificial sequence
  DNA replication origin
gagataagatctcagcatatacctggggctctaagatgctgctggtgccacacaggctctggggctgtgtttgccgcactgaggcctctgccgcctgctccggacacttgggacacgcgtttccatcctggctcactgaagcctcgatctcccaggctttctttgacggtgttccctcaaagaaagaggcccaaagccctcccccgcaaaaaaagccagaaaggaatggaggtgcctccgcagaaatccagagcatctgcaagacatcctcacagccctcccagaacaggcagacaggccagtgttgctggagtcagcccctggctcccagggttccccccaggccagcccctgagctgggagcctgctgaggcccctcccacctgagcccttctccggccccccgctagactgcatctacacaatccaaggggaccctgaaggctggctggggactcaggacccacacagcccctcaggatgacacacacagggtggtccgcgggcagtgccaggcctcaggcggcccagggcagagtaagcagctttgtggcagtgtggtgtgtcagcgaggggagccttccgtgtcccgttggctggggctggggccagggcacgcagaaggggctgtgcagccaggagggcccccctccggaattgctcctgggcacacagccctctgtgtccaggggcctcccagggtgatgtctaaagtccctggcagctgtggtcctggagagaggcccacagagaggcggaacggagggcccaccccgcagtacgacccgaagacatgtgagcaggagccaccggcaggtgggcgctgcccctgagagtgcatacggggagggtgggtccaggaagccagcctaggggtggtgtccgcgcccccatcacagaagtctcagccctttcttttctctccgtgggcgccgggcagcagcgactgcctgggggatgggcgaagggaaggcgctggccgaccccacccatggagagaacacagccacaggccgggacgatacatcaagctcgcacccacggccctcacatgtccacgaagaccatgaagcaccagcccaggcccccgaccagcagcatggtgacgtggatgccatagacgagcagctcgttcaccaggcggaagtccacgcgccggcggcccagcagcagcagcagcaccgacagcttgcgctggaagcgcagcaggacgcgaacgcccaggtactgtaggcagaagagggcggccagcgcaccccagagcgccgcagtgaacaggctgcagctaaagtagagtaggaagcggatgaagccgtacagccagcgcgtcttgatgtacacgtcgaagttgttgtacttggtgcgg

SEQ ID NO: 17839 - DNA, 1572 bp, Artificial sequence
  DNA replication origin
cagccacaggccgggacgatacatcaagctcgcacccacggccctcacatgtccacgaagaccatgaagcaccagcccaggcccccgaccagcagcatggtgacgtggatgccatagacgagcagctcgttcaccaggcggaagtccacgcgccggcggcccagcagcagcagcagcaccgacagcttgcgctggaagcgcagcaggacgcgaacgcccaggtactgtaggcagaagagggcggccagcgcaccccagagcgccgcagtgaacaggctgcagctaaagtagagtaggaagcggatgaagccgtacagccagcgcgtcttgatgtacacgtcgaagttgttgtacttggtgcgggccaggtgggaggcgcgcacgggcccgcaggccgcatgcaggcaggtggtgtgcgggccgtggaaggagcgcacccgccgcggaatgggcatgaccggcattgggccccggcggcggcggcgctaggtcgcagtggcggcggcggtgtccaggcggctgttggcgtaggggtcatgggcgcctaggcctgggagcccgcagctgaccctggggggaggcgtcggcctgcggggagagccgcaaaacccacgtcagtatgaggacaccatgcggatccctccccaggcaatcagctggcgaaagtggacacaaactccagcaccaggactacgggaaaatggagtccagggcgggatctgcaggcactcctgggctcttttccacaaaccctcccaaggatacttccaaggggcccaccacctggggaagccaaagtgcttgttctagggcagcactggggaaagggggccttggggacagtggccaggggaggcccccggaagtggtcaatgccaaaacggatgggaaggggcaagagtggctctttcctgcaggatcctcgcagctccccactagctggaccacactctgctcttaggcagtttgcccgttactgccctggtcttctgcggctgcctgacccagggctgatgcaagcccttaaatggcatctgcaagaagccaccacagggccgggaaaagggactccagggctcgcaggtgaaccgaaaacgagcccggcgggagcaggtgactccagcaacctgctgggtgccagatggacggctcgggggccgtggggtcaccttgctgggcctgaaccctggcactgtccttccctagcagtgactttgggcaggtcacctgaccccaagacggctcctgctctgtccaatgggggtgccaatagcactgcctttgtgggtagctgtgggagggaaggggctgggcctggcgtgcacagtggggtcggcccggggcctggcagcggcccttacagactgggctgcaaagagcagaggcggcatttggctctccagcttcacctagtaaaggccgtttataccttgccgaaataatctgtagacggaatgaactcaaaggtcaggaaataaaatctgagcaggaaagttggtaacattacaggggactgttgccaagagcttcgcctgccttcagattcagcctggggccctgccgtggggacct

SEQ ID NO: 17840 - DNA, 1213 bp, Artificial sequence
  DNA replication origin
ccgaacgccctcggtgccgcgcctggtcttctgcgcctgcgcttgccgttcctgggccgcgcctccgcgcacgcgctaccgcatcccgtggagaggcagtgcgcaggcgcgcttccgtggagcagtcctttggccccagcagagggcttgaccgtggtcctggccccggactgaggtgtctgcgacccggcgcgctgctgccgtcgctggggtggggccgggccccggaggaagccgctttcccggcgggggtgggcggcccagggaccgggagcaggtctggtcctcgcggggccgtgtgcgaaggcctcctgcgcggcctggggctgggaggacagggcggcggcgggaatgagggcgccccccaggctccaggagggcggggaagggtgggggcggctgacgccacgcggacccgggcggcacggatcgggtgtgtagctgcgaggcccggtgggccggcggcgacgtcggcagccgaagtagggacagccccggagcacgagcaggcccagcagcagccccagggccgcccccccgccgccccccagtgaaggaaggggacttgtgttagtgtcctcacgcctggttcgtacaggctggcggttgtcctgggggtttccagcgaggaatgtgttggggagcgctcctgggtgtggctgctgggtaggaggggaaggcagggtcagcagcccctggggcgaccgtaaagtgggtggcccttcaaattcaaggcactggaacaagggggctgggccctcctgcccaccaggcccgtcattggctgcaggcctcccgggacggcgagctggctcctgggcccctgtcctttggaccagggccgccctgagggctggcacagctaccttctccactgtggccccatccccgccacaggagagagagccgcctttacccgacatgagcaggagttcgaggaacatctggacgagcaaaggccaccaggaggtagcacagcaaaaaaggccaagagcctgttttctttaccgatggctggcggcaaatattccgaaagaaacgtgtcaggcaagaagcgctagttcacgcctgtcattccaccgctttgggaggccaaggcagggggatcacttgccccagaagtttgagaccagcctgggcaacatagtgaggcccctgtctctacaaaaaacttaaaatcaataaacaggtctccttccttcctcaatagtcc

SEQ ID NO: 17841 - DNA, 1635 bp, Artificial sequence
  DNA replication origin
gtcctggcagcaagagccactccctgccaggaccctgaagtcaaccagctggataaagtccccacagtgaccccatccttggcccccagccccagcaagtggagggacagaaggacggtactggaggggttggggtgggcttcaacatgtcccacaaccaggggttgcattctttccacccactcaacccacctgctcagcacgcgccctgggccggcctcggtggggaaagtgctccttccaagcaggggttggctcgctgtccctgcaaaggtaggacaaccccaggtgttcccagccgcacggccaggggtcccgtccagcttgggggctctgcgtcggcagcgagcaccacattcggccccaacttaaagtctcccacagacctggagccgctgggtccctcctgcgcttggcggcaccacaggcaccagcccagcagatggcgccaagccactgtccacagcgcagcaggaggcctgacggggacagggacggggacagggaggctatggggaccccggctggacctcacacgtcaggacaaacccgtgacaaatccccagcacacggtggttctggggtgaccgagctgtggccaggccgggggcgcaggaaggcgcagaacccgggagtgggcagaggaccagaagcagctgcggccggggaggaaatcggtgtcctgggaagctacttgcgctgtgcacgcatggactgggtcacgaggccaaaacccacggtggccacggcaagagagccctgggccagcggagacacaggccaccaacaggcgggggtggctttgtgtgaggaggaaggggaggcaggagacaggggacagggggtgtgacggaaggggcagcccaagattgaaggcgcctcccagagatggggcattcgagctgggtcctgaagggcgagtaggagctcggaagatggagaagggacagagagagagaaaaggcaactgtaaagaggtccaggctcctgccctgtaccctggtttcacagggaggtaggggaggctggcggttctggagggtcagccagggaagggcgacccccactgtcttctgtgaagggtgccaaggggtggcctcaaggacagcgtccagccacgaacacaaccaagatcagaacccacacccggggcacagacgcttccacgtgtgtggagcttacagattctccaaaccgaaattcaaggcagacagatgggacttgccctataacccaaggcacatgaagcgtttccccgaccatggcgcctctgctgaagtcaagtaataaacaactccgcacttaaatactcattctcctggaaagggcaaccagggctcccccttactgtcccctcaccccaaaccccaagtgatatcccagccttggaagcaatgggcagcagcagcagggttagcccgggaagccaccctcacagctagagtggtcatccccatccatgggcgagcagagactggcggggcaggtggctgaccagagagtgtggaaccatcaacacagacaaggcgacaaggggacagctgcaccctttgggaattcaggacacagaaccctcctgtagggagaagcacgtgactgcgggcccagcctgaggtagtggcgagtgggggcccc

SEQ ID NO: 17842 - DNA, 1272 bp, Artificial sequence
  DNA replication origin
agggagagctctctcccgggcccgccctccgccctccgccctcctgatccctgtttggcctcctcgtagacccccacctgccccattccctactagagcactcctagaggtaggtccagcctggccttggtgtccaggactgctgccaggacagaggacagagcaatcagaggcaaggacctgccccaggacaaccaagacagcacggttgccaagaaccttttgtcagagatgcctggagagcgtttctctcattccaaccaggtcagccctgcctgaagagagcacgtgacgcagcgggtgacaggtgtgcaaacagacagcccctccctccctggggccggttgtgggacaggcactggggtgagtccggcccacaatcagcaaggcttcctggaagaggaggccttgagctgaattttgaaggacatgaaaggaaaagttcgcaaaggtatgcgagactgccaagaagggggtgcagggggccacgtgggcaaaggttcaggggcgtcgggggtgtggtccctggccacggacagcctggtgtcctcgggacagggtggcctcagccatgactgggccaagctagagtctccagatgctcagaaaggagctcggactcctgcctgtgggtcaggcttgcctttgagaaggttccctctgagtgggaggcaactgcaggaggacctgtggaaacatctggaaggattgggccagcgctgtggggtgtgatgcggggaggggacagatcacagttggaaaggcgttgacactgcaggtacctgaacagccaagcagggacgccacagcctccctgtccatccccccagggagagccacgcagctgtgcaggtgggtgaggacgtctgtgctctgctgtggaaggagctccaggcctcagttacctgaccgcagaggcatggcatgcttccagcctgaatgcaagagaggcaggatgaataaggacagaccctgtgattctgctcagggccctcagagccacagagacagaaagtcgaatggagggtcccggggctgggaggggacgggggtgagtgtttcatggggacagagcttcagtttaggaagatagcgagttctggagatggagggtggtggctgcaggactgtgaaggtgctcactgacacggaatcgtgcacttgaaaatggtgaagatgataaattttgttgtgtgtcttttgccacaattacaaaaaaaaaaataaaaagggaatgaaaagatacattcctaatcacagccaggatgtggt

SEQ ID NO: 17843 - DNA, 1650 bp, Artificial sequence
  DNA replication origin
ctgggccttcggggcggcactggcacagcgtcccgcctgggtctgcccacgacccccacactcctatgtcctccacccctgcaccccagggaccccacgaacaggcggtgcgagctcccgggctccgcgctctgcagcgcccctgcgcgtggggcggcctcaggaggcctgtgctccgcagcagcgccggcctcgggctgaggtcccggagccagggctgcacttcctgctcagcggacctcaggagtaaactgaggcacagagagagccaggttcgccggggtgcaggagccgcacagggaggatggagattcagccggacccggagtggggggacccagccgagccgcggccccagcgaggccgggcgcctgacgcgggccggcggcggccgtttgcccccaactcccgacgccttcgggggtcccaggcaccccgcagcgggcgtttcccagctccatcccaggactgggcggcggggcgcgcacccctggctgcagggacgcgggggcgcagtgggaaggggagctctcttaccgtctcagtctccgggggtcgcgcatagaggccgaggtggccctgcaggcatccaaccggcctcacccctcaaacagggagaaggctgggacgaggggcctgactgggacagcccacccggaaggggcagcactggccacttgcccactccctacctgaggcctgagtgtccggagtgcgcaggagggcttagccgtgcgctccccaaaacacagaccctagccctgcgcctgggtcctcccgggggcatgggtaggaggccacggaagggaaggggttatttggtccccagtgtcacccagggaggcaggagacccagccaccgatgagaactgacactttagagggctgggttttaggacggcagggtgtgcccccgctgcccctcccatgatgacagggcacctgcctgggttgtgttcagcttgtgcccatcagagacacggtcaccactccccacacgcacactgcacagaggagagctgcgctctagcaatggcttccaggacacggggcgccgtgatctgaggggtcagtgcctggtgatgaggttgagggtgtctggaatcagtgttcactgtgctcacacgggccatgcttttatgggaccatctcccgtctgaacttgtccgtcctgccccgcagacctaatggaatgatctttccagaaaccccagaacatgggaggccatagctggcctgcccaccccactctgtgcctgggaagatgccgaagacaaacgctctttcagtatcttttcctgcccagttgctgagtcggatgctgggtatgcaggtggcagggtgggcctgctggggggaagatgatcaggctgtgtccaagctgcagcccaaatgcccccagaagaggacaccatgagccagtcccagggctgtgggactcccacctagagggagacaatggcgccagcaggaccagcggcccggggggcttcgtgcagtgtggggcacccccgacatgccccgtccttgctcttgcaaccaccaactttgccggcagcactaactgctgcctccctgagggctcagtctaccctgcagcctgtctgggccacccgcattcacctctgagacccagcacttcatacccat

SEQ ID NO: 17844 - DNA, 1180 bp, Artificial sequence
  DNA replication origin
ttcccgcggctcccggacccccgcgtgctgggtcggggagaccgcccggcagcaccgcccccagccccgcgcccggactcctgtgccccttcccttcctcctgagacgggaagagcggccccgcggcctgggcgcgggcttttcttgcaggagcacaggcggggggtgggggacccaggccagggcgcgtgcgtgctcggcgcccactccagacggtcacccagcaatcaccagcggtggggcggggagagacagagatagagagagatagagagggagagagagagagggagagagggagagagagagggaaagagagagagagatgggggaagagaggcagagacagaaagggagacaagagcgtacgaggcatgggttggtgcgaagcccgggtgtgcaccggggctcaggtgagccaggctggcaccggacgcctcccgtggagacagcgcggggtcccggttccaccaggatgttccacagtctccttcggggctggcagcgaggccgaggggaggaagtgatttgtctccgcgctgacaggctgcggggcacagaccgagccctcggggaggcagccgttagtgctgcttgtaagatcagtcagtggtcgcaagagaaagggcttgacctttcaagggtgccccacactgcacaaagaccccctggccgctggtcccggctggtgccattgtctccctctaggtggtctgggctgctgagggtaggtgtagacaggagtcccacagccccgggactggctcaccccgtcctcttcccgggagcgttagggctgcagcttggacacggcctggtcatctccccaaccttccccccggcaggcagttcctccactacccacccgtgtccccagccttcccactcagcaactcgagcataagacagacacctgttgggtaaatggctcttccagacagagacagcttcagacaggaggcaggttggcaggccagcaatggctgacgatgctccggggtttctggaaatagttctgtgagctctaggagacagggagggacagttcagaaaggagttggtcccgtaaaagcatttgcgtgataatgggccaggcgtggctcacatccataatgccagccctttgggaagccaaggcatgaggattacttgagggcaggagtttgagaccagcctgggc

SEQ ID NO: 17845 - DNA, 2481 bp, Artificial sequence
  DNA replication origin
agtgagtgaatgagtgaatgagtgagcgagtgaatgagtgaatgagtgagtgagtgaatgagtgagcgagtgagtgaatgagtgagcgaatgagtgaatgagtgagtgaatgagtgaatgagtgagtgaatgagtgagtgagtgagtgaatgagtgagtgaatgagtgagtgaatgagtgagtgaatgagtgagcgagtgaatgagtgagcaggtgaatgagtgagcgagtgaatgagtgaatgaatgagtgagtgaatgagtgagtgaatgagtgaatgagtgagtgaatgaatgagtgagtgagtgaatgaatgagtgaatgaacaaatgtgctagaaatctggggctttcagggattgtgcatcaaatccccagaaaaggaagaaggcaggtccccagcagcccccatcctgactctggggactgccaggggctggggcctgagctgtgatcacactctccagctcaggtgggccacaggccacgctgggggattcagatctggggagccctgactttattgctgaagaaatgacagccaagagaggggacagggcaggaacaaacggggtgtggagatcacgggcacagctctgaccccgccactgtgcgcttatgggatcagacccaaaccccctgccagcaacagcccctgcctgtgtcctccggaagttctcaaggtcagagtggtcccctgaggagtggggtcagggcctggagagcgtctgtccagagaatacccaaacagccgaagggcgcaggcccttggggagcgctcgggacagcccagtaaccacctgattccgttttaattttatttccttgatgaaaacagcaggatcaatcctgctgaccatttagcaaggtgtcccatttgcatattcaaaagatgctgcagcgggagggcggtgggggatgggaggacaggcttcaggctgattgaagtggaggctcatttcggctacaaggaatttaatttccacttgcaaactcagaatagattgcggtgtggtggccgcccacaggacgccgtgcggaggagctgcgagaaagcggagaaagtgtctctggaagcgctgtgcgttagctccgtgtcacttcccttcagcgtctgtcccgccgctgcttttagctgaagttatgattgaaatttgaaggctggaggtctagagaaaggggaatttagtcctgtgaaggtggcagctggagagtcccattccccgagagttccggacacagccccacacagccccgcacagcgcttggggaggaaccctggtccctgggatattgggaaaggcccccacagccagtggccacctggcctgcaatctgcatggtgaagccacaatggacactgcggcctcaccctcagcagctttgggcgagggggtctggtcagctgccctgtggccgaagccccaccttcacggggtgtgcagtggtggctgagatgcctcagaatatggtcatccttggtcccctgcagagaggcctgccatctcccaacagtgagggtgatcctgccggccctccgctgaggatgggagcctgcacaatgccttcctcctccgggatccggctctagctgggactggagtgtgggctcagggctcttctgagacggggatcagggcctggtctgtgacggggatcggggcctggtctgtgacggggatcggggcctggtctgtgacggggatcggggtctggtctgtgatggggatcggggtccggtctgtgatggggatcggggcctggtctggatcagggtccggcctgtgacggggatcaggatctggcctgtgacggggatcagggtccggcctgtgacggggatcaggacctggtctgtgatggggatcagggcctggtctgtgatggggatcagggtccagcctgtgacggggatcaggacctggtctgagacaggaatcagggcctggtctctgatggggatcaaggcctggtctgagacagggatcagggcctggtctgtgatggaaatcagggcctggtctgtgacagggatcggggcctagtctgaggcagagatcaagatcgatggccagggtcggggtcagagtttgagaggaacagggctcaatgtgtggctgtggtcaggaagggctggctgagcagcagtgagctcagggaggctggaggagctaggaaggagaatgaggctccagagaggccagaggagtggatttgtcactcgaccacagcagaacgtgggctgaggagggggaactgccaggccaggtcacgggtgagcctcgtcgctgggcctcagcttcgtagatgctcaccctgaccatccagtgaattctcactgaggggaagaagaaaccacctcctttgaagggctgggcacagcagagtgccccggctctgcgaccctctgggcctgggcacgagacctcctgactccgtcccccacagagccctcacttcaggacttagcagctcagaaccc

SEQ ID NO: 17846 - DNA, 1714 bp, Artificial sequence
  DNA replication origin
tggttatcagagtcagacgcgctcatcatcccaaatctgcaaaatatagaaaagttgaagaaacacagcgaccccttccccgtccatccatggatcctggcagctgctctcccacattttctgccacactcgttctttgcacaccaaggacatcctatagattctgtttttgaaccagccttttctcaccacgggatctccctgcgttactggaaactcttcctacacgtcgtttttgacagctgcgtaatattccgtgccgtggaagccccaccacttgcttaacggatcttcccaggagctccagggggcagagaatgataccagtgccgggggttgaacagccctccctggaggctgtcgtccacgtacatgtccagccatcagtttcacccctcctaggagccagggcctggccatggccttggccagcttgaggtcccagtggcggagactagggccaacccacagggcccacaatgcatctggactctctccatgggcaggcaacctcttccacagagtcctgtcttccctctgggcccttctgaccctggggggattttccacaagggtccaaaggacaccactggcctccggaccccctcacggacggctgccaatatgtcgggggaggggcaggacaggagagaggggaggggagagactgggggatgggagagactgggagaccggagagactggagggacaggagagactgggggatgggagagactgggagaccggagagactggagggacaggagagactgggggatgggtgagactgggagaccggagagtctggagggacaggagagactgggggatgggagagactgggagagcggagagactggagggacaggagagactgggggatgggagagactggggggatgggagagactgggggacggaagagactggggggatgggagagactgggggacggaagagactggggggatggaagagactggggggatgggagagcctggaaggacaggagagactggggggatgggagagactgggggatggaagagactgggggaggggagagactgggggatggaagagactggggggatgggagagactggggaatgggagagactggggggatggaagagaatggggggatgggagagactggggggatgggagagcctggaaggacaggaggggggacggaagagactgggggatgggagagactggggggacaggaaagactggggaaccggagagactgggaggatgggagagactgggggaatgggagagactggggggacaggagagactcaggggatgggagagactcaggggatgggagagactggagggacgggagagactggggggatgggagagaatggggggatgggagagactggccacgaggctcccttcttgatcccatggactctaatccagcgtctgaaactggttctggagcagatgctactgtaccaagaaggacatgctcctctcctaacacacgtggtgcatggagacctcattcctcaccagacctagccacccgtgcaggcccttccttgtgtgctgggctccgctctaagcctccgacatgggactgcttgcttcaccgccacacctcgggcaggggctgctgttccgtccatttcaccgatgagcagactgcaggaggagaggtgaggtcctgaagcccgcaggtggcagagc

SEQ ID NO: 17847 - DNA, 1636 bp, Artificial sequence
  DNA replication origin
tctcccatccccccagtctctcccatcccccagtctctcctgtccctccagtctctccgctctcccagtctctcccatcccccagtctctcctgtccctccagactctccggtctcccagtctcacccatcccccagtctctcctgtccctccagtctctccggtctcccagtctctcccatcccccagtctctcctgtccctccagtctctccggtctcccagtctctcccatcccccagtctctcccctcccctctctcctgtcctgcccctcccccgacatattggcagccgtccgtgagggggtccggaggccagtggtgtcctttggacccttgtggaaaatccccccagggtcagaagggcccagagggaagacaggactctgtggaagaggttgcctgcccatggagagagtccagatgcattgtgggccctgtgggttggccctagtctccgccactgggacctcaagctggccaaggccatggccaggccctggctcctaggaggggtgaaactgatggctggacatgtacgtggacgacagcctccagggagggctgttcaacccccggcactggtatcattctctgccccctggagctcctgggaagatccgttaagcaagtggtggggcttccacggcacggaatattacgcagctgtcaaaaacgacgtgtaggaagagtttccagtaacgcagggagatcccgtggtgagaaaaggctggttcaaaaacagaatctataggatgtccttggtgtgcaaagaacgagtgtggcagaaaatgtgggagagcagctgccaggatccatggatggacggggaaggggtcgctgtgtttcttcaacttttctatattttgcagatttgggatgatgagcgcgtctgactctgataaccagggaaaagtggaaaatgaaatggaagtggccagcagtcaacaatccatcagtttcctcaactgctcttttaaacacgggtgaccacacagcccagaaactcccttccagggactacccgagagattgaaggcaggccccacagagacgcgcccagctcctgctcctcaaactgctccgttaaacacggggtgaccacacagccccgagagaatgaaggcaggccccacagagacacgcccagctcacggtcacagcagcatcatttacagcagccaaaaggtggaaacagcccaggtgtcctccggcagacgggtggattaacaagcggtctaactgcgccatggggtataatttaggcttaaaaaggacgcagcgctgacacacgggaaaacacggcgagcctgggagcgtcaggccgagggcaagaagccaggcacaaagaccacgttatgggattccattcacaggcagagcctagaacagagacacctgtagggacggatagtagattcaaggttgccagggctggcgtggggggctggggaggtgactgaggacataggctttctttttttttgagatggagtcttgctctgtcacccaggctggagtgcagtggtgtaatctgggctcattgcaacctctgcttcccatgttcaagcgattctcctgcctcagcctcctgagtagccgggattacaggcacctgccaccacacctgactaat

SEQ ID NO: 17848 - DNA, 1610 bp, Artificial sequence
  DNA replication origin
gtgacacctggtttccgactatggcctccggaacggggagaggatccatgtcctgtctggcctccggaacggggagagtatccatgtcctgctgttttaagcccctagtttgtagacctctgttacagcagccccaggagaccctgacacagacccgggtgtgtggccgaggccgcgcatccctgctccttgtcgcccccgagccagcgctgccttcccatctgcagcagctctgctcagctcctcagccctttccctgccgcagcatcttccactgtgaccccatgggacccggccccacagcccaggcccggcacgctcgagtgactccacccaaggtgggccacacagaaggggtccaggcaggtcacaggcactgaccccacatcagggaggcctggggcagggtctcagggagcaggaggagaagagggttcagctgggagacagcaggctcaaaggccctgaggctgcagactcagaaaggagcaagtgtctggggtgtctggagtatctggggtgtctggagtatctggggtgtctggagtatctggagtctctggggtgtctggagtgtctggagtatctagggtgtctggggtgtctggagtgtctggagtatctggggtgtctggagtatctggggtgtctggagtgtctggagtatctagggtgtctggggtgtctggagtgtctggagtatctggggtgtctggagtgtctggggtgtctggagtatctggggtgtctggagtatcgagtgtctggggtgtctggagtatctggggtgtctggggtgtctggagtatctagggtgtctggggtgtctggagtatctggggtgtctggggtgtctggagtatctggggtgtctgagtatctggagtgtctggggtgtctggagtatctggggtgtctggggtatctggagtatctggggtgtctggagtatctagggtgtctggggtgtctggagtatctggggtgtctggggtgtctggagtatctggggtgtctgagtatctggagtgtctggggtgtctggagtatctggggtgtctggggtgtctggagtatctggggtgtctggagtatctagggtgtcgagtgtctggagtatctggggtgtctggggtgtctggagtatctggggtgtctgagtatctggggtgtctggggtgtctggagtgtctggggtgtctggagtatctagggtgtctggggtgtctggagtatctggggtgtcgagtatctggagtgtctggagtatctgggatgtctggagtgtctggggtgtctggagtatctggggtgtcaagtatctggagtgtctggagtatctggggtgtctggggtgtctggagtatctagggtgtctggggtatctggagtgtctggagtatctggagtgtctggggtgtctggggtgtctggagtatctcgggtgtctggagtctctggggtgtctgggatttctgggctgggctagaggggctggggcaggaggggtggagaactgggaggagagcctctgccctaggggagagttttgtgcacagcagggacattggctgtccccagctgctaacctgctgccaacctggagcccc

SEQ ID NO: 17849 - DNA, 1009 bp, Artificial sequence
  DNA replication origin
gcgagggcgaacccagaatcagacttcgggccgcggcccccacccggacccccgccaggccgggggacgcccagccagagctgcagacctcgggcggagagagaccttgggccgcggggctgtctgcgggctctgggctgcagcgaggtgaggggaaggagaaggcggacccctcatcctccctgggtccgagcccccttccttccagggtggagacgccttctcgcggacggtggaagctttagccgcgcgcctgcgggttgtcagccccgaattcggggttcctggcgcccagtctccccgcggagcgggaggtgcgggggcaggtcgaaggctgatgtccccccccccccgcggctggggtctcccggtctcggaccctggtggggcggcgggtgaggcagggccggggccgcagtgggagaggggtcgtccgggcgcggggagaccccgagatgggacctgcccggctctgctggcgtcgctggcagagggaacccggagggcgagggctctgcgcagcccggggtgcagggagccggggccggggtcatactccccggcacgcgttctgtctttttttttttttcccgctcgttggggtcccgacccgagaggcagcggggtcgctgaccagagaggaccgacccttgcccaggaccccatcccccttgcagcgggggcggggctgggggtggcacagggctctgggtggcgtccccttggcgggacgggggaggagcttgctaactttgaatctggcaactgtattacatcatccaacttaaatatctgaataataaagtaatttcaaccagcacattaaaagggattattttctcttaaatatgaaattcatacgaagagctgcttttagcccgaaggaccttcccgaatcaggggatgccttagaagtcacagaggcacccctccctctccctaagagcagggacaccccctgccctcccctcctctccctcctcaccatctgccggcaggtccagccccc

SEQ ID NO: 17850 - DNA, 1745 bp, Artificial sequence
  DNA replication origin
atgctcatgagcactggaaggaggtggggggaacagcccatcccttcctgatggaggggaggggttgcggtctccacaccctgtccctgggagaggcaggggttgggatgtccagagagcatgatgggggtgggaggtgggccgtgtgtgccattcacagcttgcagctggcaccaaccccaggacataggctggtagggtgaccaggctcatggtcatggaagtctctccagcttggattccaatcctggctcttctaacttgctgtgtgaccctgggctgggggctggaaccctctgagccctgcttccccgtccccaccccccaacccccccaaccccgccgccgccgtaaagagaagacagtgatgacagtcccctcagagggcagaaagaagttgtatgcgccccacccccacccccaggtaagtgctcctataggggcagtggtagaagcaggcagggttggcccttccacctcggccttccctcctgcaggaaggagggctgggcctcctccctgagggtctcttcctctgagggggtctccctggagcagagtgggggctggagggaggaggccccttggagcctgggctccctatttctcagtggacggggagggaaggtggaggagtccccatgcctttcatggggacctttgcactggcctcagttcccccagtaagggtgcggaggcccctccagaatgtggccaagggaagctgctctgagctgcagacttccaagtctctccaggaccagccatcttttggggggaactggttgggaccagttgtgtggtttttttttaaatggagttttgctcttgttgcccaggctggagtgcaatggcgtgatctccgctcaccacaacctccgcctcctgggttcaagcgattctcttgcctcagcctcccaagtagctgggattacaggcgcgcagcaccattcccagttttgtatttttagtagagacaaggtttcaccatgttggccaggctagcctcgaactcctgacctcaggtgatccacccgccttggcctccaaaagtgctgggattacaggtgtgagccaccgcacctggccaagggaacagttgtcttttaagggacgtccttttcatcgtttcgggatgtgtgtcaggcacatcctcttctgagtcccacagcggcctctcctctcaatctcacagaagagaaagctaaggcccaggaaaggggagggaagggaggagaggggagggaagatggagaaggggaggggagggaagagtggggagggaggagagaggagggaagaaggggaaggggagggaagagggggaagaggggagggcagcttgggagaaaagagcgggagactgtcctcagccatgcaggcttgggcaaccctggggactgggagtgatggggctggggcaaaggacctctgaggaacatcaccgggagaaggtctgatgtccagtctgccctgaccctgacctctgctgacctctaggcgcccacagaccccaggtctgcagggctaaaccgggcaggggctctggcaggctcctggacctgttcattccatgaacatttctagaattggctgtgctccgcccagcggcctctgcctgtggggagactgaggcccagaggaggaaaggacctgtcctggcctgggtccccccaccccccaacccccgctgtggggaaggaggggtgctgaccaggcggtcaacggggtttctgtcgggtcct

SEQ ID NO: 17851 - DNA, 1714 bp, Artificial sequence
  DNA replication origin
ccggcgccccctccaccccagcccgggtgctgcccgtttttgccaatcgctcccagcgcccgcgccttccgagaagcctgtggggcgggatgggggtgggcacctgaggccccgacgtccccgcgccggccggggtgggagggctgggggtccggccggggccggaggggctgccgcgcctcaccgctcgcccgccgcgcagaggccgaggccacggccaagcggccgcgcacgaccatcaccgccaagcagctggagacgctgaagagcgcttacaacacctcgcccaagccggcgcgccacgtgcgcgagcagctctcgtccgagacgggcctggacatgcgcgtggtgcaggtcagcgctcgcccctgcttccctcccgcccgcggccttgggggcccccgcagagccgggcggccgctcaccccgccccgcccccaggtttggttccagaaccgccgggccaaggagaagaggctgaagaaggacgccggccggcagcgctgggggcagtatttccgcaacatgaagcgctcccgcggcggctccaagtcggacaaggacagcgttcaggaggggcaggacagcgacgctgaggtctccttccccggtaggcggagggatcgcggagctcggggggggacgagcgcgcgtcggcggggtcgcaggggtcccagggagcccgcggatctgaatttcccatggagttagtggactccttaagttctactttcaaaagcatttcacttacagaacctgctcccccagcaccctccccgccctgggtggccactccggaccactgcttttcccctggtggggacacaatccctgtggcccgacctgtccccaagctgggcgcctacgggctttctcatgggggggtgggcgtgtccaggccgtctctctggctcctagcccttgcagtgatttttaggagaatgggcagtgcatttcgggaaagactgagtcgaagtcccagctgcttggagttgggggagggggctacctggggtcagggagagaaggttccatacccttctgtggggcctggattatttatttcattctccgggcaccggggatgctgcgtccccatctgttgatgcccatcctcagaatgtggacaagacactctcttttgggctgcctcgtgacccgggctactcactcagccactctggaactaaatatccttgtctgcaaaatgtgggtggtggtatctgtgcccccttcctaggctgctgtggggctggtcctgaaagcctgggccctggctgggctgttcctgactctgatcccaccaggcctgagacacctgggctgactcaggggtgagggcagtggaggggcaggggcagccatgctccaacagtagaaggggcctgttatgacctgtcatgtggtgtggggcagccactctttctccgacccaggggtgcctccgcctgcaggatgggactctgaggggccgcaggtggagggcaggcgctgactgagcctctgcttctgttgcagatgagccttccttggcggaaatgggcccggccaatggcctctacgggagcttgggggaacccacccaggccttgggccggccctcgggagccctgggcaacttctccctggagcatggaggcctggcaggcccagagcagtaccgagagctgcgtcccggcagcccctacggtgtccccccatcccccgccgcccc

SEQ ID NO: 17852 - DNA, 2182 bp, Artificial sequence
  DNA replication origin
cgggaagggggttacatccaggctgtgggggctcgcggttccctacttatttatttatttttcgacggttcctgggaggggttggccgcgggggctggggggcggagagagggagggaggaaggaggactgcgcgcccgcgctcgggagagctggccggagcgggcgggctggcgtccaggctccgccgaccccgccatccctgacacaggagcccccgccagggctggagtcgccatgcagcgtaaggctggggtcgcgggcgcggcgcggggtgggctggggcggcttttgcccgacgcgggcgccggcggcgagctgcggccgaggcgctgtccggtccgcggtgctgaatccgcgctgtgtcggcctgtcgggccgccccgctccgagccgggtcctcgcctgcgatcgctgcccacgatggggaccccgggcgcgcagcgggtcctcgacgctccgcacccggagctgcggttttgccggatgcggggcgcattcatcgccggtttcccgccactgcgtggggaggcgcagcccagttttttccgccggaggtcgagggagccccttcctggtgtctctcacccactgggagatgggctggagccggcggggtccacagccagggaggcgggtgcaatatgtcagtaaatcccggtcccttcagcgggcactcctctcttccagagactttttctaagtgaagagggagtcctcagcccttgacacctggaaaacccgctcacagactcgaggctcccacagggcacccttggacctccccagtgtggttcctccagggggcctgcagtaccgaagtggggtgtggggggcagaagcagcgggaagccagacgtttgagtaactctgacggtgttgggggcacccacgcctgacacaaaggcagtggatcggcttgtccagtccactcataagtaattttgcggctgcccaatgatggggaaggcattgatatttaccccggaggcctgcagacagggccaccaggcagggcagccacatttgcgaggagtccctagaaagagtggccatgacgcttaacatgaaggagacccgatggggtgccccagctccaggtgatggtgaagacccgtttccctatgtttcctgccgggcttcagagagcagatccccctggggtggggttttcatttgagctccacatgcacccttcttggcactggcaacattttgtaattgagtattcagcctcgtgaaatggcctgggctgctttcttgctcacacacatttttagaccgatgtcagtttccccttagctcctgacataggatgcggtgcctgcacactcccggaacttgcggggccacttaagctggctggggaagagggtgtgtagggaaaggaggacccctcggcagccctgagtcctgtgggccggaggggagactggctcgcgttggggtgggaaggtggcttcactgcctcctggtctacgaggtgacccagaacttcctcgtgcccacagagatcccgctgtgcgctggctgtgaccagcacatcctggaccgcttcatcctcaaggctctggaccgccactggcacagcaagtgtctcaagtgcagcgactgccacacgccactggccgagcgctgcttcagccgaggggagagcgtttactgcaaggacgactttttcaagtgagccccgaaacctcacctcagtgtgggagcggagggcacgcctgccccagggactcctcccctcacaatcaccaaggccaggccctcgaagcctgcgtctctcgcaatcccagcccactcctgtcacccaggcagggcaccctgtggcctggccaaattaagggtggggcctctccatgggtgctccctgggtggctgggcctggctgggacatcagcaagtattatttggaaaaaaaagcaatttattacctaaatcacagaagcagtcattagagaagatacacccctatttgtaggattctactggacttagttcctccgaaattggtgatgttttagttcctaatgctggcacccagcggctctggcccagtggccttcatggctccagctgtggggtgtgagggactggccccagatgggtcctctccctccggattcaccttcccagatccagcatgggtcctgcaggcaatggcggctgggctccccgag

SEQ ID NO: 17853 - DNA, 1277 bp, Artificial sequence
  DNA replication origin
cgcaggaagctgcggggccgggacgaacgctggcgggaagccctgacctgggccctcccttaccggtgcccgccctcgggccgggcacgcggggcggcctctgggcaccgcaggtcccggcgcaaaggcgctcagagtccgcagtggcccgggctggtctccgcgacccccggccccgccccgccccgcggccccgccccccggccgctccgccctccgctcggccagaggctccgggccccagggcggcccgcgggcgcagcgcccagcagcacccggagtcgcttggacgccggttcggggctattgcggggtggcgtcgctgggcccgggaaagttcgggactggagagtggcgacgccgggcggcgggacccatggaggcgcgcggggagctgggcccggcccgggagtcggcgggaggcgacctgctgctagcactgctggcgcggagggcggacctgcgccgaggtgggtgcccgggccgagtggctgcaccggggagaccaggagatcctcaggcctttccgggcctggccgcggaggctggcaggagctagaggatctgggcgggagtgggcgcgaggaccccggaacgtccgcgcctgggcgcctcagcctgtatttgttgcagggcccctggcctgggttgtcagggagtgagtgaggttgtggcactgcgctgctccggccagggagctctcgggggtccagggtgggcttaggagacctctgcagcccggagccagctccctgggctggaggaggcgcagggagcagtggcggggcagtgaccacgggacaggagggtccccaagaaggccgccccagccggactctttccacgttccagcggaacagagtcagatgcaggggccaaggtcgagctgaactccgaccgtcggtctccccgaagtcaggtttcagcgtctgcgcccacagacacccgctcggtttatccccgctcagggcccgtctgtaggaaaaagcctctcttctccaggccccccagcttcctggtggcaccactctagctcccagcactttggttcttagggaacctgggcagttctcctcgactcccgggccagctggagccgcaggatggggaaggaggccccggagccagtggggagtgagagggaccggccggcgggaagggggttacatccaggctgtgggggctcgcggttccctacttatttatttatttttcgacggttcctgggaggggttggccgcgggggctggggggcggagagagggagggaggaagga

SEQ ID NO: 17854 - DNA, 2008 bp, Artificial sequence
  DNA replication origin
gtgtcctcctgccctgcggctggacgacccgcttgctgcgaaactcggcgaatcccagcgcctcagcagggcctggagcttagggaggagcgggcacggccaccctgggtctcagaggggtgagggcgggggctgccttgagtgcggcccaacccagccagggagggaggcgcgcccgacacggggcagaggcgggggtggggaccggggcgacgagaggggccccgggaggtgggcgggcgcgcgggcggggcgggcagcgggcgcctccttcagcaccgcggacagcgccaggcccagtggctcccgggctccctgccccgcacgacgcggcgggacttgggagccccgaaccctccaggggacgctgacctaggaggagcgcgtctcgcgccactcggcctggtggccgcgatgctgctggaaacggggctcgagcgcgaccgagcgaggcccggggccgccgccgtctgcaccttgggcgggactcggggtaagccccagcaggacactgaggacagaaacggcaagggcggcagaggcgcgaggaagggggtgcgtgcagggccagcggccaggcaaagaaagtcccgccgctctgcaggcgggacacagagatggaaactgcagagagtgagtttccagatcccagggtggcggggagggcctgacgctggcctgcaagagtgcgggacagcggttggagtggaggcccctagaaaaaaagggggcatcgcaggcacagctggggggcgatggggccgaccaaggggtgctaggttcccccggtgaccagtgcccgtcagctcttgcacacagcccggcccaggtctctggaccccacagcaggggacccaagcctgtgtctcccgcctgaaccaccctccccaagggccattccatcaccacggacgctgggaaataatggaggcattgttggagggctggccagatgccagcagggtgggccgcctccttaacctgccgccgccccttccccagtcctgccacacacgacccctgatcgcttcggcagcagctgacactcagccacctgcacccagcacagcccgcacacactcggctttgcacccgcgtgtccttgccctggcccttcttgggtaacaagtgctgtgcaaagtgaaggggcagaaagctggctgcatgggccactgctcaaaacggacacatcggacctgctgggagctaggagggagggactgtggtttcttgtgcccatccttctgggcctgggcccttaaagctcacagtccagaagccataggcagagtggacagagtattgctgtgagacccacagggagagggacctgcaggatggcatcagcccctggtcccccaacccttcctgtgtgtttctgcgcactgccagggcacccctgcctttgccaagtcctgtgctgccgagggccacccactgctgtgttcttccccgggtggctgcccagggctggtgctggcccagggccctctgggcaggggtgggtgcgtccctctgcctgcaaggacaggtgggttctggagagctcacctgtgtggactggggcaagaggctgaaatatcaggtaagggaccgtgttccaatggagccggagtgctgggggctggaaatggaaggtgtgccctggggcttccccagctcggcccctcacgacccgaggtcttggctgcgtgtccaggacacagagcctgttctctctcaaggattgcccttcctccctgagccgtccggggccgcagttccaggggtggagcccagaagcctgttagcatctgggatcggtccggcaccttgcggttccggtacgcagccctcggcgccacactcaccccttctgcgtttcgggttgagctcccgccgaccatctgctgctcccgaggccaaacctcagcggcgggaggaccctgctgccttctcgacccctctcccgggaaccttagccctcctggcgtgtgctccagctcaggcctctgcctctgggccgctc

SEQ ID NO: 17855 - DNA, 1070 bp, Artificial sequence
  DNA replication origin
tgccctccaggcacccgccgtcccaacggcccccatttacttgtctctctcttgtcaccagatagacagacaaaggcgctgcctctgagggttaaatgagcccccatccttccaacccccaggtccacagcccaaggcctctgggggttattttctgaaacgcagcacagccacagaattccttggctcctcccctgttgaaatccccacgtctggtgtcgaacacccggaggaacaaggagagccctcaggaacctgccctagggaagcagctacaaacacaggatagtccctggagcacttgcttggaggggctgcagaggccgactgcgcttccggctctgtctgtccccgcccggctaaaggaaaacacttggcagcctggagcagggggcgtggggggagcggggggagggggagcgaggggagtgggggggagccaggagccgcgggggggatgggcgaggttctccaaatacaaaaacaaggccctgcaggatggggcggagtggaggaaacgagatgaaagtgtgtggggaagactatctggcctggactctgcaccctcttttcacatctagaagagtaaaaatacagaagtctttttgctgtaagacctgcaaaaggagcatgaacagacttgagtacgccaggaatgcaaatatccccacaaaattaccccgtgttcttcccttgttagaagagcgtttgtaaaaccaggactttgaagccaaaaggtgccatccgatgtgaaaccaggcccgcatgtttataaaatccctgatcataaatattaaagctgcaggtggcacggggcagggctgcctccaagggagcttccgccgtggctggcagcacccgggcactcacacggccgggtggtggtgcttgaccttccaccgcctggacctcacccggaagaagaagtacatcaccatgaggaacagggatgaagccacgtacagcacgacacagagactcatgtccaggctggagaagtcaaccccgaggaagggtgcggccccgcccacctccttgtgggccccgggcccatccagactctggagttt

SEQ ID NO: 17856 - DNA, 927 bp, Artificial sequence
  DNA replication origin
tgtgcagcacctgctgccggttggccggataagcacgcagtcagtgactggcccgagtagggcatctcttgatttcaggcacgtctcaagtcccccagacaaacgtggttgtgtttacattcacttctggaagctctgtgagggtggccaggtgtcagcaagtcgggtcgcaggggctccgagagctaggaggcgccgtgcgccgcagcttctgcatgacggatgcctgttgggcctggaagtgagcacatgtcacttcagaaacgagttttggagatcttgaagggatttgtagtccggaaagggccagtgtacctgaagtgcagtggaaattcattgctgcccctctgccctttcctgaaggtgcacctaaggcccactgtccatagcacccaggtggccggggctctgtaggtagtgggcctcaggtgcaccctcaggaaagggcagaggggcagcagtggggggaggggcacacaggcagcactgtgcggagaaaggcctccaggtgagagctgcatgctccgttttggaagtggagtgctgggtggtttgggacaggtgtggtctgggaagtggcggaggccgagcgtgtagcgtctcctcacttgcaggctatgggaaccggcagaggggaacacgtgcgcaggggcctgcagaagcaggatgttatctgggccgaactgcaagggacgggtggtgggaagggcagggagggaggcctggcaggaccctgggccagggcagtggaggcccgtggtgggtgggagtgggagtccggttgccgcacgctgcacgtggctgcacaaagcctccttccctctggctctcccgcttccttttcttcctaggccatctgagtgaggatccccggtttccaaagcttcagtggcccactccggacctctgcccagcctgccatgagga

SEQ ID NO: 17857 - DNA, 957 bp, Artificial sequence
  DNA replication origin
gtcagtgggtgggacagttccagagcagaggtttctcttcgctgggagagcctggcagatgggacctgcggaggaggcggagagggtggagggggtggagggggtggagagggtggagggggtggagggggcggattgccggccctgaggctcgctctccctctctcggcctctgaggacttggagctcggtgtcctcatctgccaagtaggggcggtgacattcacaccacagcctttgatggaagctcaaaaggaataaggtgggtccgggtgcttccaaagcattaagggctgaagaaactgcacggaggccatggtagcgggctgggtaaggagcgatcagtgtggggctgtgaggggcactgcccttctgccgcgtcatttcgcacaagcccctgagcactggccaggggcctcctatgtgtggggatgggccgccaggctgattggacacggatccctgccttccaagggcagagccctctggtctagtggagagacggtgtgaaatatgttgggaagatgaagatcttttgcttttgcaaagccttggttttctacatgttgaaggaggcagcgtgtcctgcgggagcctttgtaagggagttggtggaatgattcctccacaggtgtttgcctcagggcgtagctgatgcatgtttgggctgcagcatgtcacctgcgtgacggggagtcttcattcgccacggtaggatgggggcgtattctggtcacacgctagtcggagtcgggcacgcctgttaggacgtttgccctccatgctcgaggtgtgtgctatgcggacctgacggactttggagccttcctcggcctctgtgagcatcagtttccccgtctgtaggatcctgcgtttgtcaccaggccactcccgtggtagataatttggtcagaaagctttgtcaactgtaaagggctgtgtaaatttacttcccat

SEQ ID NO: 17858 - DNA, 907 bp, Artificial sequence
  DNA replication origin
ttgcgatgagaaaaatacagcaggattgggtgtaaggcataaaaacaaaggtgcaggaagaaagagtagcaatttgttacagatcttgcccactgaaacatgtaatttgaggttagcacaacacaggaagtcctgccaaacctcactgggtcgggaggacctcctacttcagtgatttaaataccattttaagggaagggtgttgtgaatgccccctcccacgccaactctaacctgtagagcaggcgagtaacttcgtgactggttaacaacgtgcgaccagatgaaagcactaaacaataaagtgcggaacactaccagcagtttggtgaaagatttctcaaaggctgtgcatctgtgatcaaggagcccaccaatgaaattctttgtagagttaaaaaaattgctttataggttgttttggggtattatagagaagtctccagagtatttggacttctaagttgtgggttcactttgagcacccactatatggccagcgatccgaaccagaaagttaatgatgaaggttcaaagggaatggggtggctacgagtgtggaataggaatgagggatcctcagagaacaggaattctgggcactggggatggggtgtgtggacgctaggaaacaggtagggtaggaggcctggaaggtcaatgaagttcttggggctcaaaacataggtattttgagagctgggatacgggagggcttccctatccccaagcgtgcggtgagggctgcgggagaatggtttcattttgacttcagacagcccaactcgtcaggatctaacggggattaactgggagagacatggggagcagctggcttagtctcccgcccctggaaaggccagggttggtccgagtcgggtgcctctgtggggcagggactggctct

SEQ ID NO: 17859 - DNA, 1050 bp, Artificial sequence
  DNA replication origin
gggctcagtgtgtggccctcccctctgtcccacagcctccccgggggacctcaagcagcctcaagcgctgagctccagactcgactcccacttctaaaccctgacctgacacctcccttagaggttgaaaaggctgctcagatgtaacaggtccaaagcaaactcatggcatcctccccagcatagctctcccatctcgccgctgcaggatttagtctcagccgtaagcaaccccattcctctggttgctttggcccaaactctgcgaatgtgacaccctctgcctccacccagactcagccgacccctccaccagcactgcctctcacccctccccggagtccctccagcttgtggaaggaggcggcggcccctcccaggtcccctgcttcccctcctgcccctcctactctgcaactagaagggcagagctgcatccttgcaccgatccttccgtggccacccccccattcagcatcaaagtctgagtctgcggcccaggttgtgaggccccctgggtctcgctcgggctctcagcttttcttccctcccacgcttcccccagcttgctccgctcccaccaggtccggctccttgctgttcctccagcgtgctcagcacccttctgccccagggcctttgcatgtgtgcctcctccctcacctccttctccattcgggtcaccttctcaaagacctccccaccctcctctgtacggcagccctgctggcacctgcttccgtgtccggcttcattgcttttcatagcacgcggtggctgctttacgcgttggtttgtttggggtctgcccaaatgcaggccagggacactgggggctcggttttgttcttgatttgtctccagggcttggcacagagcagaagccaggaaacgtgggtgatggaaggaaacatgaacagggagacgcaggacgtgaggaaaagggagcagacgccttggccaggggccctctggggagaatcctctcatctggggttaaccattgttagcagcaaaaccttttaaacaaaatcttacacagaaccccac

SEQ ID NO: 17860 - DNA, 1135 bp, Artificial sequence
  DNA replication origin
ggcagaccccaaacaaaccaacgcgtaaagcagccaccgcgtgctatgaaaagcaatgaagccggacacggaagcaggtgccagcagggctgccgtacagaggagggtggggaggtctttgagaaggtgacccgaatggagaaggaggtgagggaggaggcacacatgcaaaggccctggggcagaagggtgctgagcacgctggaggaacagcaaggagccggacctggtgggagcggagcaagctgggggaagcgtgggagggaagaaaagctgagagcccgagcgagacccagggggcctcacaacctgggccgcagactcagactttgatgctgaatgggggggtggccacggaaggatcggtgcaaggatgcagctctgcccttctagttgcagagtaggaggggcaggaggggaagcaggggacctgggaggggccgccgcctccttccacaagctggagggactccggggaggggtgagaggcagtgctggtggaggggtcggctgagtctgggtggaggcagagggtgtcacattcgcagagtttgggccaaagcaaccagaggaatggggttgcttacggctgagactaaatcctgcagcggcgagatgggagagctatgctggggaggatgccatgagtttgctttggacctgttacatctgagcagccttttcaacctctaagggaggtgtcaggtcagggtttagaagtgggagtcgagtctggagctcagcgcttgaggctgcttgaggtcccccggggaggctgtgggacagaggggagggccacacactgagccccaggcctccagaaggagcagcagcgaggtggcaggggaacaaggagtggaggaaaggaggctgatctggctgagacagaggacgtcatgagcccaactggaggggcacattcggaacatcggggcaacacctcaccccaaacctgctcggtgaaacggagccacccctgggaccaagcttagcccagcacttagaggccacaccccaaaacaaccagagtttctcccatctaaggcagggcgggggaggggaaggggttaggattgaatctcggagtctacgtaagagctgtctgtgctgagccagatcctgcccaaagcctgcg

SEQ ID NO: 17861 - DNA, 1451 bp, Artificial sequence
  DNA replication origin
gggtgggcggccggctcttcccagggtggaccaggtgggcggccggctccgcaggacggtcgcctggaccttcccggggtggactgggtgggcggccggctcttcccagggtgggccgggtgggcggccggctcttcccggggtggaccgggtgggcggccggctcttcccctggtggacagggtgggcgccggctctgcgggacggtcgcctggaccttcccctggtggacggggtgggcggccggctgtgcgggatggttgcctggaccttcccagggtggactgggtgggcggccggctcttcccagggtggaccaggtgggcggccggctccgcgggacggtcgcctggaccttcccggggtggactgggtgggcggccggctcttcccagggtggaccaggtgggcggccggctccgcgggacggtcgcctggaccttcccggggtggaccgggtgggtggccggctcttcccccggtggacagggtgggcgccggctccgcgggacggtcacctgaagccaggcccggactgcacacctgcttcttcgcatcaaagccacgaagaggcgtccaagaaaaggcgttgcagcccagaggcaagaacagtcagagtcgccaagagcaggaacgaggacggggcggagcagcgcctatgccaggaagggggtcatggggatcagcgaaggccaagagaggaagagagaacatctggggaaaagaagagctggggtgggcctgactggtgctgactcacacccctgagccctgcttagaagtcaggggcatctgcctgctttgactttggaggctcctcccacacccaaactgccggcacatgacgtgcagctgggtggactgggcatggatgtctcacacctgagctgcacagaccagaggaagccacggctcaagggcccaaggtcatttctgcgcagcccgcacggccgggggcttttcctctggggatcagtggcccaaggtctcttctggagcatgctcaggacttgctgtgcctggaaggccagggcagctgatttctcctggtgccatggacttttctttgcttccagaggattcactgggacccctgtaatttctctgggacccttttgaatctgagggtctcttcttgaatgcggagttgatgagcagcgtgttggccttagggacatctgtgtcccagcactgatccttccaggatgtggcttctcctgtccagggcctcaggcctcctccacttcagagaggagcatactccagactttatgcatgcagtctggtgggaggcatcacaaagctggcgtggcaaagccctaagatgccaggtcacaggacacacggagctgccaaggccctctaccccatagctctggtgagagaccccaggccccttagaacctctttgggccccctgccgtgaggcaagagcccctctccagacaccc

SEQ ID NO: 17862 - DNA, 2258 bp, Artificial sequence
  DNA replication origin
gccggcgcccaccctgtccaccaggggaagagccggccgcccacccggtccaccccgggaagagccggccgcccacccggcccaccctgggaagagccggccgcccacccagtccaccccgggaaggtccaggcgaccgtcctgcggagccggccgcccacctggtccaccctgggaagagccggccgcccacccagtccaccctgggaaggtccaggcgaccatcccgcacagccggccgcccaccccgtccaccaggggaaggtccaggcaaccgtcccgcacagccggccgcccaccctgtccaccgggggaaggtccaggcaaccgtcccgcacagccggccgcccacccggtccaccctgggaaggtccaggcgaccatcctgcacagccggccgcccacccggtccaccggggaaaggtccaggagactgtcccgcacagccggccgcccggccggtccaccctgggaaagtccaggcctctaggttcttactcccacgtgtgcatgtgtatgccacacacagctcacaatgacattgtggacgcctgtgcacctctgtagttccagaaaacactccctaggggctgcacctgggggcctgtgtggagagagctgctaaggagtcacgcaggaccctcctggtgagccacgtggagaccaagtccactgcctggtctctctccacacctgggagatgggtacagcggcctgagtctgtctccaggagcggctttctgcccagtgagccctcgggcctgggtgggtcctctacctggcagctcaggcctccctcaacgtcctcaccagcatgctcaagggacccagactttccactggcggccaagggcacttggcctgggagagaggctgccggggctgccaaccagggacatggaggtgtggctgcctgtgggggtgtggctgccttcctgttcttacccagcatttctttggggtcttggcccctggtgggggtcttggccaagcaggctcggctgcccagggaccctgccgcaggtgaggcagtgtccaggagctcatccagacccactaagagctgccccgctacccaccccggctctctgcatgcccagagctctgcgctccttcccagggctctccccgactgcccaagacctcctcaaaggccacatcagcccagaaccctgtgcccaaaacaggagcccagtccgccgatcatcacttccacgtcaccagctgccaacagccctgacagaccttccctggccacagaggccactctggatggagctgggggctgcactgatggccctgggagccctccaggggcactgcctgacccctcacacgacgagtgccctggccagctgacaggttcaggccactggctgcctccggcctcatcccctgctgcagaactgcatctacccaactggtcgtcaacgcttccacccggaccagccacccctgggcagagccccaactactgggttcccgccgacccctggggcccaggaaacagtccctccggcagactctcctcagacaaggaggacaaatcctgggtggtgatggcggtgtcctcctcaaggggccccgagggcggggaagggaaggcatccgagcatgggttggtgtcttcaccatcactctgtgcttggggagtgggaggaggtgggggtaggggggcctccctgtggatggaggacgggaggtcggcactgccgtaggacagcaactcgtccacgggagacaggatctcagtcaagacgtcaccggcaagtaggggacaggcttcctccaggacagtgggggccccattcccaccaggcccaggcgcccggctctcagctactggaggtgccagcctgcctgggtccccaggaggagcctgcagggtcaccggggtctcgggctctggcatgaggtacgggagtttgctcttggtggatgggctcgggtcagcatcccgggttccctcctggtagccagaagtctctcctcctttgccgaaatctgccccttcactcaaagaggtccacgaaggaaagaccagcagtgagtccgagtcaccggcagaagagatttgcagcgggaacaccacaccggcggcctcagggggtgcctggagggcttctcctgtgtctgacacccccatcaggctctcgctggtcccagaagcttccagcccctccccaggccatggggacggaagagccacctggggctccatgccgcttctgacaccccctttcaggctctcgctggtc

SEQ ID NO: 17863 - DNA, 1902 bp, Artificial sequence
  DNA replication origin
aactttgctggaggcctctgacagctctgaccctgaccttggagaggggatgtctgggaaaggcagtagccagcctgcctttgggctttgctccggcgctgaaacttctgccatggccgtgtccaaggaggagccacgcagggggccggccctgcggccctggggcctctgccaggtcacccatcctccacccccaggagcactgcctggccgaggctcaccctggtttgaccgccaggacaaaggcaggccagcttcccccgaggagtgtcgggcagagagctctccaggccagctgaaaccttcgtctggggagtcttcagcttccaagctgggaagagagctggagctcccagaaagctggatcagggtagccgctgctttctggaactcccagagagagggacaggacaggctgctcacagagcctgctggggaggtgtgggatgacaccgtggcttcttccgaaggcccccagcaggttccagaagcagactcagagcctggaccgcaggaggaggtggtggggagaaggggactgccctggtgcaggattgggggcgccgcctcctcagggaccacaggagctgctaagagagggggcaatcaacagtggtcaccctctgcaccctggaccccatgcatatcccacgacccccaaagccaggaggtcagaacagagaaacaccctgaacagaggcaggaaaagcgtcgagggtgccagcgtgttcgacccttgtgattccaacccaggggttcaccacgcccacccccacccacacgcaatgagtcatgtccaggggccttgccgagcctcgggcacccggcctcatagcaccacagctgtggttcaaggactgactggttggctctgccttgttttattttcattagggatgtgggtggatccagacagaggatccctgaccgtcactcacctcccctggcaaccctgtgatggggaggtgcgtgggcagagccccccagctaggcagtggggaaggcaggggctgcgtattgtggggagaagctggctctgatgtagaaatggcttgggggacccttagtggggactcgatggctgaaggaggggctgggggctggggcattacctggggaggcagcggcctgggcagcctccagccaggtggaggagatgccggggacctcctgctgacaggcctccgtcctgcaagcacattcgtggagaaccctgtggggatcctggtcctcctggcctcttccccagggcccactgtcagggaccccaccaggctcagtccacagctcacactcgaaaaacatcccagccagtcctctgccaccacctgagtgaccctgagggcaagggctccccgagggcttgtctttgggggcatccagtctcaatcccactggatcaggtggcagagaggggggtggggctgccactcccagggggttcgaagccgctctgctgaccttgggctgattcatgggtgacatttttatttccaaaagtgggtcagacccaggagggctcagggtgggtgcagggctgtgccccggcagcacaggtgtgccaggagagagtgagggtccccacagcagggggacagggggtaccggctgaacccgtctccgtgcctcacgctccacccctgctccagggagctcagccccacacctctgctcccccgatcgccagctctcggtttcctgggactcctccacggggctctcagcaaaatccagccccgattccaagccctcttcgctcatgctgtcctcagccacctgctggagagacgttgcagaaatgacactgttggggtgtggcctctgtctctgtccacctcccgtagctggatggagcccctgtgcttccagcgaccacggtaaaggaacaaagaccactcaaaa

SEQ ID NO: 17864 - DNA, 871 bp, Artificial sequence
  DNA replication origin
gaggcttcaggctgagcaagcttcacggtggccgcagaagcctgaacagcgcaggcccggaggtgacgcgggacacagagggaaagcgctctgtattcactccgcctcccagtgtcactggcctctccagggagccccaccagccacgctctcctgggcagccccacaagtgcttctgatctctttccgtctcaacccatctgtcctgaggtttgctctccctggccccaacggcagggaccccccagtctatgccaccccccttgggtggcatagtctccctgcttccgaggatggacactgggtgggggccttctgaattcggcacccagggctggtcagggagctccgaggtggcatcgcagggcacacaaccccccactcttcagccggcggctaccagacgcaccaccagggttccctgacactgtgagtgcatctgctcccgccccacctgcaaattggggacttggctctcggggggggccccggccaagtgtaaggttcagaaagagaaaaatgtaatcggtgcagaaacctccgtcagctgaagacgctcaggcagtgctggcttccaaacacttaaaaatctgccccagatgaacgaagttgcgactaaaacaatcccagccagttatgacttttaatttctccagaagagccgctgcgtcacctccggtaggagatggagccggccactcttcttgcagtgaaggggtctgaggccagggtggggggccaccagggcccatcttctttgctttccgtccttgtccagtggctgagctccagcctcggacaggctctgctggatgtgggggaagtgtctggcgccgtggaggcccacgcggtgtttccagggtgcttacct

SEQ ID NO: 17865 - DNA, 924 bp, Artificial sequence
  DNA replication origin
tgcactgagctgtggggaggcgcccctccgcctcctcggcctggggggtgagacgggagtggacatggcacagggccctgaagggagggcaccaagggccagggatagaccaggatggatggggacagatggggacagactggggtggatggggacagccgggggcggacagggacagatggggacaggcagggacaaacagggacccactgcaggaaccaaggaccggccacaggaaccaaggggccccaaccaagatgaagatcaagtcacagattggcagaatgttgggggggagggtaccaagatgaagatcaagtcacagattggcagaatgttgggggggggtggtccctgaaacaggcggtgctggggaaagggcttccagggagagtgcgtacgggaaaggctgggcccagccgctgtccgtccggggggctcacgtgctgcaggcccagcagaggggcccgaggctgctccccaggctctgaaagacacaatcccaggagtcaccagcagcaaccacagactgagaccaggaagggaaggaaggaggcaggggcagaatggagctgccagggggtgggggatggggagagacaagctaacctcaagggagacagggacggcctggggccacatccagcaatctgccctgccatgtcccctgcctggaggcccgagggtctgctcagccccagcctgggaaaagcagcctctgagacaagcgcagggcaggccctgcccaatcctccttctgccctggccaggggctctctgtgggcctgtgtttctgggacctgcctggcaacagtctgagggctgcacgtggcccaggggctctgagtagccgccccatgaggagcccttcccagacagaacctgagtggtttcccggctggcacacccctcgatctgtatctt

SEQ ID NO: 17866 - DNA, 994 bp, Artificial sequence
  DNA replication origin
aatggcatgaaccccggggggcggagtctgcagtgagccgagatatgccactgcactccaccctgggcgacagggagacttcgtctcaaaaaaaaaaaaaaaaaaagcctgtggccccaggcagacttgctggggggtggggtggggcagatggagggagggaggggacactgctggggggctgaggaggcttcctggatggggtggtcctggccaggccctagagcagagccagacttcaggtgggggcagcggtggattgggtggggaggataagcaggactggggatctcatgggacccaggcaggaaggagagtgtggctgggagctcctcagggaggccagcccctcagggaccccaagcagcagctgcatccttggagggaggctcctgtcccccatgtccaccggcagacggagtgaggacgctgtgtggacaaggggtgggggactgtccccaggcaagctatgtgccttccccacctgcgcgtctcctctgtaaggcagggagggcagcaggctcacctggagggtggggatgaggattgaatgatctgagctctctgaagcacctgctccaggctgggctgcaggagaggggacaccagcaacctgattccagagctgggcatgggggtctctggccagccttgggaaaaactcctcattctgggcctcccatccatacctctcagtgggggtgcaggacccctgctcaaatgagaggtcctgtctcagcctggcacccagtggggagcaagcagccccggcactgccctagccctgccacagccacagccacgtgaagccaccagcttttctgaggaggaaatgggcagaggtggccttgccaggctctcctgcaccatttcttacagggttccagccccaaagtcaaggccgcctgggagggaggctcagagacaagccagcagccagaggcctccctgtgtcccctgaccccatgcaggcccagcagctccaccagccatc

SEQ ID NO: 17867 - DNA, 1045 bp, Artificial sequence
  DNA replication origin
gtgacccccgaggaaggggcccaccctccctggctgggggcagcaggaaccgtgagctgtgggctctccctgcagctggaccagcagaagcaggcgttggccctcctgcggcagcgggcagagctggaggcccgggagacacagcagaccctggatgggctgctcttcaggaggcggctggaggtagcagccgcttgccacagggggagcccctgtctctgcaggaggttgggtgggaaggtcagtcacactgggaaggaatgcggagacttccataggaacagtgggtgcccctcgtcaagaggaggcaagccagaggctagagctccctttaaagcaaagtctctatgcagaaacaggaggtttcagccacatgtgtcctgggggcgctggcactggggggtgccccagcgggaaccagagctgggtcacagatggccattggagcctcccacctgtccgtgtcccaggcttggtaggcccctgagccctgggctctccatgggagcatgcaacccaaaatgcatgtggtgcttacacccccggcaggtctcttgccagacaggaaggagcttagtgtctcctgagccacctctgccgggccgtcctgcaccaatagtgtcccctccgaaaggcagctcccactgcccggggtggctcagcacctgccccatgaggggacaatgtcacccagtccgaggagcggtgaccctggcaggggattgatcgggtggctgacggctgtgacctggctggaggggataaaccttctgggaggtggacctttcttctgtgtttggttcaggggtcgatggtgggaagtacatccacggtacatgttggggggcatctccaggagagtgatggaagtatgtgcgtgcacacgtgtgggtgtgtgcacgcgtgtgggtgtgtgtgcacgtgtgtgtgtgtgggagtacacatacaggcagcctcagaccgacagcaacagagacaccctgccctgtgtccctgcctgttccctccctgctccccgcatcacaggatttgctcccctcctgtg

SEQ ID NO: 17868 - DNA, 967 bp, Artificial sequence
  DNA replication origin
tgaccccggccaggaccaactccaggatggatggcaggagtctgtggggagggcggaggcccaggacatgggctttgcccccagacagaccgggtctgtcatgcatttgccatgtgaccttgaacaaatcacttgtcagtcagagcccagtggggacacagaggttcctccttcccttgtgtgagggtccaaggagatagtttggtacaggctggctgtgcactcagcaggtagaagctgctgctgatggtgtggacagggtgggtgggtgatgacggggtgggtgtgaacggggtgggtgggtgctgatggggtgggtgggtgctgacagagtgggtgggtgctgagggggtaagtggatacagacagggcaggtgggtgctcacagggtgggtgggtgctgagggggtgagtgggtgcagatggggtgggcgggtgctgacagggtgggtgggtgctgagggggtgggcaggtgctgagggggtgggtgggtgctcatagggtgggtgggtgctgatgtaagcacctggcacaagtccagggctctccttggaatttctgggattggtccagagcttgggtatgaaaacctcagcctcttccttggatagtgaagtccccagcagcagcggagggggcttccctttctccttggtggccccaagtcccagctctgactctgaatgctgttggagctcctggccccacagaggctgccaccaggaggtgctgcatgcaatggggtctgcagatggtggggccctcgtgatggcttgtggatgagcgccttggtcactgttggctggtgtatggatggagccaagaccaggatccccactccgactgtcccagaaccggcagctcctccagtggactgctcgccttcccggaacggagcagctcagccatgaaccacagctaagccggttcctgggcgtttccacagcagcagaggacaccccaaag

SEQ ID NO: 17869 - DNA, 1044 bp, Artificial sequence
  DNA replication origin
gccacccagcggtcaccgtgtcccgggtgccggcctacctcggggcttgctctcgcagtgggccctcgggctcacactctgctgttgctcccagctggggccccacgacagtgtctcgccgtccaggaagtaggtcgggggcagaaggggctggggctgcatgctcacccactccccaggtgcccctctgccccagttgggccccaaggctccagggcaggctggggtggcaagcgtgggggtggcgagcgtgggggcggcaggtaggctgtgggggcacgagcgcagcaggcccacagctgggtccctgacggtgtccagcgcttcggcaccctgcagcttggcggtgaggctatcgacccgctgcttgaggactttggctgtggtctctagcgcctgcagctgcgcctgcttatgccggaggtgcagggagctggaagtgcccaggtgctcagcctcctttgggtccaggtagatgcacatcccccggggtaggtagcgggtggtcaggtcctggagctccagggatcccagagagggtgaagctgacagcagcacgggggcatcccggccatcttgggggccccccatccctgggggatctagggtctcagcatggttccaggctctgttcaaacacaggcagaagctgcaggaagagagacgtggacagatcagctcaggctcggtcgccccagcagggcacggaaagcacgcgtgttttgcaggtgtgagcgtcacagcagcgtctgtgacggacccagtgtctgtccgcagggaccagggaagcggtgacggtatccacacaacagaccacacagctgccgcaaagaacagggccaggcgtgagcgagggggcagaggaactggatcccgggcactgccggtggggtgtaaaaccgtcctgctgtggccagaggcagtttggtcaaacatagaacaaccacgggtctggcaagtctgcctctggccacgcacccagaagagctgaagtcagagtctcaaagacatcacccatgttcacagcagccttattcacaacag

SEQ ID NO: 17870 - DNA, 1119 bp, Artificial sequence
  DNA replication origin
gcgcaggcccggcggcggcaggccctggaggagaaggcctcggccctgcgcacacgggagctgaggagccggaggctgcaggaggtctaccggcagcagagggaggccgtcctcggcagggcggtccccgtggtctcccggaccacccctggcatcgtgacctttgtccccagttctgcacagtccggggtacatgctggggttgggttggggggactcggctcagccatgggccagaggcttaggcgctcaggtgctgcctccagccccctggtgtcctccagggagtggccgggcgagggctgcagctgggggctggggacttcgtggcgtcgctgccactgcctgtagaaagccagagcttctgtggatgcctccctgggggaggccctggtgaggtgcagggtcagacctgggcgcctttgcccctgggtgcaacggggctccggagggacccccttgcctctcacagcccctgaagtgggaccccgattcctgcaagactctggggaagcagcctgagacccccaagggaggtcaaggcctagctctgaggctgagagaacggggcgtgtggtcttcccgagcggggggctctgatggcattgccctctactttagggcctggaagcctccgggagcctggagtccccagtgctggaatggagcaaagtgacctctggcatggtgctggggggccaggaagccccaggcaggtgggtgtgaaagtgtgggtgctgcacatgccgggcggggccttggggggggccaagaacagttctgggtgcgttctggggccctcgtgacattgcctcatgaccgagaggctcctcaggtggggcaggctctgccctgcccgcccacagtgccacctgcctgcttggaggaggcggtcaccactgtgcttgttctcatggaggcaagagtcgcatcaaacttaaatccaccacgttaaagtgcacgttccgtggcattgagcaccttccccgtgtgctgtgcaaccaccacttctactgagttccggaacattccatctccccatgagcccccaccctcaggaggcagcccctcctgcagcccttgtgggggagccatgggggtctcctttctgcctcgacg

SEQ ID NO: 17871 - DNA, 1608 bp, Artificial sequence
  DNA replication origin
atggcctggtgggtgcaaccatgtagcccattcaccttcctggagaggtagcttcaggcctgtggctgatggccaggggtcagggcagtgtgaggagggtgccgtgtctggggggtgctagggaagtccctgactcagtccgggagcctgcccctgggtgctcagctctctggatggtccctgcccaaggcactctcatttggcagaaagtcccccttcatgggggccagggccagccctggctgagactccacagtggtcttgaccccaggccacggggtggagctgccctgggctgggcctaaggaaggggcataggggccagggacccttggcatgtgtggtgttggccctgcagagccaggtggaataagcagtgtgtgtgagtgaatgtgtgtgtgagagcacgtgagggcatgtgtatatgagcgtgtgagagtgagagcacatgtgagggcgtgtgtatatgagcgcgtgagagtgtgagaccacgtgagggcgtgtgtatatgagcgtgtgagtgtgtgtgagagcacatgtgagggcgtgtgtatatgagcgtgtgagtgaatgtgtgtgtgagagcatgtgagggcgtgtgtatgagtgtgagagtgtgtgagtgtgagcacttgagggcgtgtgtatatgagcgtgtgagtgtgtgagagcacatgtgagggcgtgtgtatatgagtgtgtgtgtgagagcatgtgagggcgtgtgtatatgagtgtgagtgtgtgtgtgagagcatgtgagggcatgtgtatatgagcatgtgtgtgtgggagagcacgagggagtgtgtatatgagtgtatgagtgtgtgtggttgtgtgtgagcgtgtgagtcagagagcatatgagactgaatgtgtgtgagaacgagtgtgtggtagtgtgagtgtgagagcatgtgtgtctgtgtgaaagtgtgtgaggatgagaccgtgtgtgagcatgtcagtgtgtacaagtgtgtgtgcatgtgtgaatgcatgagtgagcatgtgaaagcatgtgactgagcatgtgtgacagcacgtgcgagggcatgcgtgtgacagagtgtgagcatgagtgtgagcatgcgagtgcctgtcagcattggcgtgcatatgtgtgagcctgggagcacgtgagggagttgtgggcacgtgtgtgacagtgtgtgagcatgtcagtgtgagtgtgtaagcgtgtatgtgagcatgtgtgtttgtgagtgtgtgagcatgtgtttgtgagtgtgtgagcatgtgagtgtgagtgtgagcatgtgtgagtgtgtgagcatgtgagagtatgtgagcatgtgagtgtttgtgagtgtgtgagcatgtgagtgtgagtgtgtgagcatgtgaatgtgtgtgagcatgtgagtgtgagtgtgtaagcatgtgagtgtgagtgtgtgaacatgtgtttgtgagtgtgtgagcatgttagtgtgaaagcatgagtgagtgtgtaagcatgtgagtgtgagcgtgtgagtgtgagtgtgtgagcatgtgtttgtgagtgtgtgagcatgtgagtgtgtgtgagcatgtgagtgtgtgagcatgtgtttgtgagtgtgtgagcatgtgagtgtt

SEQ ID NO: 17872 - DNA, 1620 bp, Artificial sequence
  DNA replication origin
aggtacaagggcgtggggtcagagtgacgtgcctgcctctgcacgtgcctttgggcaggcagcccggcctctctgagactcagtttctccatctgtaaatcgggccgatcacattacctacctcagaggggtgtggtcagggcttgagagagaatgccggggctgtcctccaggtggggtgtattccaggccctcctttccacctccagtctgtggagcaggaatgcccggggaggtggggccagtctgagcggctctgctcggcacctctgcgcctgcatgtctgaccggcatgtctgccgttccctcccaggctctgcgcacctgcagctgaggatgacgtggcagccctgaggtggcccgggccctcccagcagccagacccaccctgggcagctccccacgtggtcgggtctgacgacctcaaggaaccaggaccctgggggaaggcgtgcagcctgcccatgtggtccacaggcccggaggctagggatggggacagctcggtgtcatcgggccgcctctcgtgctcttcggggggccacgacgtgtgtgtgtcttggaaggagaggccaccccaggtgttggggccccagcagaggcccagaaagagtgacgcgcggctggagcagctgagagacaagatccgggcccaggcgtggcagcaggggagctgtgcgtccctgggcacctcagccccctccagcgcctccagactccacaaagcctccacgctgatgcttaggaggaaaggccaagaggcaaaaaatccccctccagcccctgaatgctcaggtcagtggccactttgccagagaggggcaggagggctgcgaggctgtcgggagggtggaaagcgggcaggatcgggctgtgctggacacgtggtgggggccagccgggtgtatgcagcgtgcccccagggtggggattaggagtcatgaaggggtgcttctgagctgggtccatgatgaggatccctccctggagacgacagaggagcggtggagatgccagcgcccaggagggaggggcacacagggcctgtggcactggaagagggggcctggtccctggacctagagtctgtgcctttgtccctgtagccttggggggctgcatggtcagatttgtgggggcttaggtcaggagcgccctaaaaagtcagcctgggatttggaaagtctggcagcttccctcctgcagggacagggggtgggagtgtggtgggggggtcttgtccttggaagggtgaggggtgggaggggtaactaaagaagtttggaaacggcttccctcttggagtgatgttgagagccagtcctgtggattctctgtgtccaggtatttaactcttttcctaagaaaacagggaagatgttttcctcctttaattttacatttattttttatttttttgagatggagtctcgctctgtcacccaggctggagtatggtgcaatctcattgcgggttcaagcgattctcctgcctcagcctcccgagtagctgggattacaggcacccgtcactatgcctggctaattttcgtatttttagtagagacggggtttcaccatgttggccaggctggcctcgaaatcctgacctcatgatcc

SEQ ID NO: 17873 - DNA, 881 bp, Artificial sequence
  DNA replication origin
tgtcgctgagtgacaaggttattatgctgtcacggggccagccggaactctcccccaccccaccaagagacagctcattaggaaggcccccagctgtggccagcccagggccgggctgcccaccgtgccagcccagtttcaatgacccacctgagggtttccatcgtgggccaggggaccggcgcaggcgggcatccggagccaggcagtggccagcccatcccgggcagggtcataggtggggctgcaggcctcgaagccgccatgtgaaggcagcagcgaccccaggcagggcgggccaggttgaccttgcacctgctctcccctcagccccgcggccatgccgaccctggtcgtgggcacgccgcccacctgcctgggggacacacctcagccctgccacaagaacagccagaggcagggccccttctcccatggggccccagggagagcagccgactggaaggctgttgccaagcccaggtagcatctgcgtggacttaggcggggggctgcactgctggcaggtgccatgcctgccgctggaggcagcggctctgtgggaggtacaagggcgtggggtcagagtgacgtgcctgcctctgcacgtgcctttgggcaggcagcccggcctctctgagactcagtttctccatctgtaaatcgggccgatcacattacctacctcagaggggtgtggtcagggcttgagagagaatgccggggctgtcctccaggtggggtgtattccaggccctcctttccacctccagtctgtggagcaggaatgcccggggaggtggggccagtctgagcggctctgctcggcacctctgcgcctgcatgtctgaccggcatgtctgccgttccctcccaggctc

SEQ ID NO: 17874 - DNA, 1129 bp, Artificial sequence
  DNA replication origin
ccacgcccttgtacctcccacagagccgctgcctccagcggcaggcatggcacctgccagcagtgcagccccccgcctaagtccacgcagatgctacctgggcttggcaacagccttccagtcggctgctctccctggggccccatgggagaaggggccctgcctctggctgttcttgtggcagggctgaggtgtgtcccccaggcaggtgggcggcgtgcccacgaccagggtcggcatggccgcggggctgaggggagagcaggtgcaaggtcaacctggcccgccctgcctggggtcgctgctgccttcacatggcggcttcgaggcctgcagccccacctatgaccctgcccgggatgggctggccactgcctggctccggatgcccgcctgcgccggtcccctggcccacgatggaaaccctcaggtgggtcattgaaactgggctggcacggtgggcagcccggccctgggctggccacagctgggggccttcctaatgagctgtctcttggtggggtgggggagagttccggctggccccgtgacagcataataaccttgtcactcagcgacagagcctctggccttcagctcctgatggggctctcagcggtgccccacccagtccgcccaggcccagaatgacatgcagggagggaatggggccgggctgggcttgtggggtcagtgttgggcaagtttctggttggtgggggcggggcctaaccccaggtcagggttaggttcaattcagtctgaggcacagaggtcccagcagctgtggggcccagcccagacatcccaacagaaacacatcagccaccatctctcagttccatggggctgggcaggggaaggggcgctggcttctgggctcaccctggtgcaggccagaagacaccctttgcccacagtgacagtggcagagatgccaggtgctgccccaggtcaggagcccccgctggcctcctcggaccctgcacatcccagtgggtccgtgacacggcagtgtggtggggaggacatggctctgcagtccctgaggggaactcagactcagatcccagttccctcccagctccttccccacccccactggcagtgccaccttggagcctgggga

SEQ ID NO: 17875 - DNA, 808 bp, Artificial sequence
  DNA replication origin
tgattcagagctgcgtctggaagcctcagctggtgaccaggccagggaggcagacgctccgctgtcccccagggcaggtggggaggagaaggaaggaagccggtggtgggggcaactcgcaggacctcgcgatgctctgctcgctgggtttgcttttccgttcccaggcatttgctgtcatgattttgttcccagtcacagcgacgcatttccacgcatttatgatgcaccttcttccagagcctccaggcagctgctgagtggctgggtggttttcctgctcatgggagaaagggagccaccagacttggcctcttctgctcaggaggaccctgcccctgtcccttcatgggagcagggctgagagcccaggaccacagctgatttgggagcctgaaggcctggcagggaggtggcaacccgtcagcaggggggccaggcctgtgcaccactcggatggccctgggaagcagaggctgcagaggggtccctgggcagggcgaggctctgtaggaatggaagggggctggaagtggagctgccttctgggtgcctgagagccgttcaggctccgagggtggggggaccctgtggtcacaccgctggttccctgaagctccctgtaacatcccagacatgttccccagggtgtaacagcccgaggctcatccttgtccctgcctcatcacaggaaagggctcatgccctggcgctaggagggtgcagacaggccaggtggggctggaggtggccgcacctcacattatacgcagggcctgcctgtctttggatggctcctctctccctc

SEQ ID NO: 17876 - DNA, 871 bp, Artificial sequence
  DNA replication origin
tgacagaggtcccaggaggggaactgcatgtgcctcactgagctggactggagcatggtgggtggagtggagagagcagtgtggctgcggagaggccaggagctgaggtgcagggtctgaatgggtacggacccagctaggcccggagtagggtggggatgtggctggctgggcctggctgcagggctcccgtgctgctggggacaggggggcctggcctgcccaggggataccccttgactcaggctgcagcctctgcccagtggccttcttggagccttgctgctcctgtccaccccatgcagagtagccccgagcctcgtaccccagcaggcgtgagtctcctgggggcagggcaggggcgccagccggtgcaggctgtgagcggtccccgtggcacggacaacatcggcagagggtcctggacaggtggacccgccttcgggagctgacgtgtgtctcctgattcagagctgcgtctggaagcctcagctggtgaccaggccagggaggcagacgctccgctgtcccccagggcaggtggggaggagaaggaaggaagccggtggtgggggcaactcgcaggacctcgcgatgctctgctcgctgggtttgcttttccgttcccaggcatttgctgtcatgattttgttcccagtcacagcgacgcatttccacgcatttatgatgcaccttcttccagagcctccaggcagctgctgagtggctgggtggttttcctgctcatgggagaaagggagccaccagacttggcctcttctgctcaggaggaccctgcccctgtcccttcatgggagcagggctgagagcccaggaccacagctgatttgggagcctgaaggcctggcag

SEQ ID NO: 17877 - DNA, 2394 bp, Artificial sequence
  DNA replication origin
gcccctggccagggtgcagggccagcctggtgtgtctgctgctgggggccactgcttggcacccagggctggggctggggacgtggaggctgggtgccatgctgggtgccatgctcacgtccaggcctgtgctcggctgctgtggctgcggagggctctgtggtctccagccctgggccccatgaggcaggggcgtggcgggcacctctccttcacggcccgctggttccatcccccaggcctgcttgggcctgcccagggtttgcttttctaggttgaggcggtgccaagtaaacagcgtcactaattagagcagagctgccaccagcttccaggaggaagccccccaccctgccacccacccagccccgccagccaagaccgcagcagtagtgcggcatatgccacaggctggagagccaacaggcttccacggcggcagccggctgcgcttgccgtgggaggtgccacctgcaggctacacctgtacggagctgggcagaggtgtgtggtgtgtgttgtgtgtgttgtgtgtgttgtgtgcatgttgtctctgtgtgttgtgtacattgcctgcatgtgtggtgtgtgtgtgttatgtgttttttccatgtattgtgtgtctggtgtgtgtttgtgtgtgtaatgtgtgtataatggatgttgtcagtgtgtgagatgtgtgttgtctgtgctgtgtgttctgtgtgtaatgtgtgttgtgtgtgtgtgatgtgtgtataatatggatgtgatgtgttgtttgtgtgtgtgcatgatgtctgtgtgcaatgtgtgttgtgtctgtgagtttgtgtgtctgcatgtggtgtgtgtgtctgtgtgattgtgttgtgtgtatgtgtgatatgtgtttgtgttgtgtggtgtgtgtgttatctgtgtgttatgtgtgtaatgtgtgtctgtgttgtgcgtttgtgtgtggtgtgtgtgttgtctgtgtgttatgtgtgatgtgtattgtctgtgtattgtgtttgtatgaagtgtgtgtattgtgtgatgtatgtggtttctgtgtgttgtgtgtgttgtctgtgtattgtgtgtgtgatgtgtattgtctgtgtgttgtgtttgtgagttgtctgtgtgttgtgtgtggtgtgtttctgtgtgttgtgtgtgatgtgtattgtctgtgtgttgtgtgtctgtgttgtgtgatgtatgtggtgtgtttctgtgtattgtgtgtaatgtgtgttgtctgtgtgaagtgtgtgtgttgtgtgtctgtgtgttatgtgagttgtctgtgtgaagtgtgtgtgttgtgtgtctgtgtgttatgtgatgagtgtggtgtgtgtttctgtgtgttgtctgtgtatcgtgtatgtgtgacatgtattgtctgtgtgttgtgtgtctgtgttgtgtgatgtgtgtggtgtgcgtttctgtgtattgtgtgtgagatatgtgttgtctgtgttgtgtgtatgagtgtgtattgtgtgtctgttgtgtgatgtgtgtggtgtgcgtttctatgtattgtgtgtgtgatatgtgttgtctgtgttgtgtgtatgaagtgtgtgttgtgtgtctgttgtgtgatgtgtgtggtgtgcgtttctgtgtattgtgtgtgtgatatgtgttgtctgtgttgtgtgtatgaagtgtgtgttgtgtgtctgttgtgtgatgtgtgtggtgtgtgtttctgtgtattgtgtgtgatatgtgttgtctgtgttgtgtgtgaagtgtatattgtgtgtgcattgtgtgatgtgtgtggtgtgtgtttctgtgtgttgtgtgtggtgtgtgtctatgtgaagtgtgttgtctgtgtatcgtgtgtgtgatgtggattgtccttgtgttgtgtgtctgtgtgtgttgtgtgatgtgtatggtgtgtgtttctgtgtgttggtctgtgtgtgttgtgtgatctgtgtggtgtgtctgtgtgttgtgtgtggtgtatgtctgtgtagtgtgtgtgagatgtgtgtgttatgcattgtgtatggcatatggtgtgtgtgttgcgtgtctgtgtgtgatgtgtgtttgtgtgtgttgtgtggtgtggtgtgtgttgtatgtctgtattgtgtgtgctgtgtgtatggtgtgtgttgtgtgtggtgcatgcagtgtgtgtgtgctttgtgtgtggtgtgagtgttgtgtgtgtgctttattgtgtgtggtgtgtgtgtgcatgtgtattgtgtgtggtgcatgtagtatgtgtggtgtgtgtgtacttttatgtgttgtgtgtgtgtgtgctgtgtgttgtgtatcacggggaggcatgtgcttttgggtgtgcggagcccacagtgcccgggcatcctcgtcccctgcgcgtcatttccctccacctgggtcacccctggg

SEQ ID NO: 17878 - DNA, 1145 bp, Artificial sequence
  DNA replication origin
tttgctgccgtggctgtggcctctccttggcgggggtggacggtgtctcccagcagctctgagccacccgtgtgtgccgtaggccagggccttttattaggggctgcgtcaccacacttggcggctggccgagggcgttgcaggggctggggcccagagggtggggggtgccagcagctgtgaccccgggtcctacctgtcactcctctgagggccactctccctgtgatttctctccacctcatctcacccctttcagagtttccgtctgccttctcccgtggcaccctcccctagggtcttcacaaatcactggctgttgtgccacttccttcccacccttgcatctgccacctccatgtggcccagtccccccgtgccccaggggagtggttggtgtctagagccgtctacagcatcatggggtagccaaagctggaggggcaggtgcctggactcagtcaccctagcagcctgggctggccttgcctgccctgcagacccgggcaggcgtgtgtgtgtgttgtatgtgaatgtgtgtacagtgtgtgttgtctgggtattcgcgttgtgtgatgtgtgcatgtggaatatatgtgatgtgtggtctgtgtattgtgtgcctgtgtgtgttgtgtatctcatgtgtgtgcatggtgtgtgtgtgatgtgtgtatctgttgtgtgtgcacactgtgtgtctgtgtatctgtgtgtgttgtgtttgtgcgtctctgtgtgtatgtgtttgtgtgtggtgtgtgtgcactgtgtgtatctgtgtgtattatgtgcgttgtgtgtctgtgtgttgtttgtgtgtggtgtgtgttctgcatgtgtatgtatctgtgtgttgtgtttgtgtgtctgtgtgtgtttttgtgtggtgtgtgtgtactgtgtgtatctgtgtgtgttgtgtgcattgtgtgtgttgtgtttgtgtgtggtgtgtgtgcactgtgtgtatctgtgtattgtgtttgtgtgtgtatgtgtttgtgtgtggtgtgcgtgcaccgcgtgtgtatgtatctgtgtgtgttgtgtgtctgtgtgtgttgtgtttgtgtgggtgtgtgtgctgtgtgttgaatatcacagggggcatgtgcttttgggtgtatgggtccccaggtgcc

SEQ ID NO: 17879 - DNA, 946 bp, Artificial sequence
  DNA replication origin
tcagggttgagtttggtgccactggactcggctgtgcctctgtcagtcccctggccaggcccaaagtgccccatgggccccccttcaacagaactgcttcgaggttcggaagcagctccggactggaagcctgcagctgctgggccctgctggctgggtggggggtccccggagaggatgtagaaatgaggggtgcagcaagctgggagggcttgctggggactctgatggccccgccctcccctgctgttcttcgggagcacagcaggggcatgggcggggtgccccgagtgcgtgcctaccccctgccagccagggtggggtccttggtggtgcctggagacccttcccctgctctgtcccccacagcccctcagggcctagcagggtggagcgccccaggtgtgtgccccaccccatcctgcccacagcagggctggggggccggggggcgggcatcgtacaggtgaggcccctggtgagtgctggggctgcgcagggctctgaagcttccggggaggagcccgcacagacgcctcagggtttctctggcaacaacgtccctcccctccctggaggcgccagctcccagggttcttgtgtgctcagggcagtggcctttgagtcacaggtgcctcccatgacggacagggaggcctgggccttccagcgggtgagtagggggcttctacctgagccccacccagtccttcccaagcaccagcagaggggcctggggctggagagccagcagggttgatgggtggggctgaaagggcacagaccggtgaggaggggcttagacttgccttttccaggaacttagccgggagagaccagcccacactcctccatccagctcccctgggtaggggagggggtcttcccacctaggggctccctctgagggcttggggcctcctcagaggcatagccaggctatctc

SEQ ID NO: 17880 - DNA, 1339 bp, Artificial sequence
  DNA replication origin
agtctttagacctggaaatgttgattgaagaggttaccaggagggacatgcaatattctggccagcccttctccacagggacctataggacctgcgctgggataggggactgctggacatttgaggacagtggggtcagggtgacacagatacccagagacccagaatgtcatcatgcccccacattggagcagtcattggcggagttctgcccaagctgcagttcgcagtggtccttaccccaggctctaaatgagggctgggattgacatgtgtggagggggccactggggcccccacattggacccttgatctgcaggataagagctctaattatgattccatggggaagggctgggtgagaaaaggcctctgggatacacatgcatccaacagggcagtggtctcgggcggcagcggtgtgcccagcactcatccacagtgccatgatggttgaaaacctggaaagattccgaggcctacctcatccataaagtatttagaggggtggtgattggggtgttgctcggaggtcggggagttgctcagtggtcggggagttgctcagtggtcggggtgttacgcagtggctggggtgttgctcagaggtcgaggagttgctcagtggtcggggtgttgtttggtggtcagggtgttgtgcggtggctggggtgttgctcggtggtcggggtgttgctcggtggccggggtgttcctcggaggtcagggtgttgctcagcagtcgaggtgtcgctcggcagtcagggcatcactcggtggttggggtgtctctccatggtcggggtgttggttggggtgttgtttggtggtcagggtgttgcgtggtggctggggtgttgcatggtggttggggtgttgtttggtggttggggtgttgcttggtggtcagggtgtttcttggtggtcggggtgttgctccgtggtcaggttgttgctcagaggtcggggtgctgctcagtagccagggtgttcctaggaggtcgcggtgttttttggcagttggggcatcacccggtggttggggcgtcgcttggtggctggggtgtcgctccatggtcagggtgttgcttggtggtctgagtgttgcttggtggttggagtgttgctcggaggttggggtattgcgtggtggccagggtgttgttcagttgctgggatgttcctgggcctctcctccaaagtgaaagccagatggttgtctctgcaccacctgctgcaaggaaagaagcacagaccctggaggcctgttgggttctgggaggcagcacagccacactgaggaatatgctctgaccctgtcccaggtggcaggaggag

SEQ ID NO: 17881 - DNA, 1364 bp, Artificial sequence
  DNA replication origin
gtcagcgttttcaagcatgggaaggaaaataaacacgaggttaaaaaggggtctgttggccccgggctggtttgtttttcctgtgtaagggaggcaacgggaatgagaaccatctgtgccctgagcgcagcgcaagctgcctgctgggcccacgtgccctcccccaaagaccacagaagccaggcagagccttgctcccttccagccggggccgtggctgctggccggcagggacagtggtgttggctggggcaccaccctcctttgccacagccctgggcctggctgcgggcagagaacaggccttcgattgaagctccaaccttccgggccacctcctttgggcttcgggcacctgagccagcatcccattgtaagggcaggggctgctgggggccctgcctgtgccaggcctcagctcagccctctttccccaggcgctgctgccatcaggaggcccacagagggtccacaccaacactgtgagccccttgtgggtcccctgggttagtggtgggaggctggtgaagagaagtggggacaaaagacattgcacaaatggtggagggagggagagatttgcagcctcgtagctgtcattgctgggggagcttctcctggtctccttccttgatgcagagagctgggagcttgtgtccctgggccgggagagccccaacattatatcagaacttgtggggaaacctgcacccccgagggctctggctttgttaggccgagctgggctatgaggctgtgtgacctggcacaagttgctttccctctctgagcctcggttctgtcacctgagggctgcccgtcccgcaaggtgtggagggtcactgaggcgtggggtttctgcggtgcttgtccatgtgcctggcacacagtggggtttgtgcagtgcttgtccatgtgcctagtggctcacagtggggtttgtgcggtgcttgtccgtgtgcctggcacacggtggggtttgtgtggtgcgtgtccatgtgcctggcacacagcgagagctgctggggtcatgttgctctcacactcgtgcctgcccctgctgggcccctgcagtgggtcctggctggattgggggtacatccccaccacactgcacagaggggcgtctcctcctatccagggacctgattctcctgtcgagaaaacctatgaaggggacccagagatggagtgtgacaaggccaggtgacaggcctgacatgtggtgtccacatccagaagggagaccctggagggatgaccctccactgccaccccctcccatcaggctctggacaccctcgagcctcccaccatccaccttaccagatccccccaagagtccgggaagctcactcccccag

SEQ ID NO: 17882 - DNA, 1549 bp, Artificial sequence
  DNA replication origin
gcgcctggcggccgggcccgggagctcgtcggccgcgggcggggccgggcccgccatgggtcggggacgcgggagcgggagccgggagcgccccccgcgccgtggccgtccgccccctgcccgccctgctgtcctccctgctgtccgccctgctgtccgcctgtccgtccgcgcctcgttcgcccgtcctcccccggggaggcgccgaggaagtgatgtgcgcggggcgccgccgcccctcccgccgccgtggccgtgatgtcaccgccgcccgcgcggggagggggcgcggaccgggcggccaccgccgcgtgcctccctctgcggggggcggggcggacgcggggggaggggcgccgtgaggcgggcagtccccggggaggggggaggggggagggggtgtgggccccagcccaccccaccccagggaatgcaggggagagggcctgggcctggccttgctgctggtcccctggggacttctgagggcccgcgggggtccctgggtcacagtgcagccacactggcctctgggctcctttcatccacaggccgcctggtgagccccgcagcctcacccacgtggggaggggctgctgaggcctccttgcctttcttggtgggcgccctacgcctcgggggtcctaccctcctcttctgtgcagccccaacgtggctttgcccccttctccaaacttctgccttgggccatggggcgcaggccgtggggatgctgtctgcctgctttagagaaacctggggcaccgatgacaaatacaggctctgcttggcctgtgggacggttggtaagccccccacctctgagaccctgggtggccacattcccctcccaagctcccccggaatggggatgcagcctgccccttccttcctcctgggcactgtgcaggcttagggaggatgcaggtggcacagtaggctgtgcccacccggggtcccgggaccccagcccctaccgcctcctcctcctcctctgaattcttggagccctgtgggcctatgtggtgtgacgtggcttcccctccacccaccctcagctcccgatggcttggggggttctccgcagccagcgaggcccacagccggcctccccgggttctgtcctgcccccgacagcatcctgggccttccggtggtgtcaggagactccaggcccttgaaaggcagctgcgaccccgggtatgactcggagaagtccaggagcaggaaatgggctgcattccttcggggcccctccgtgcaccccagcccctccctgggagagctgccctgaggtcaggaaagtgccgtcctggcaagaccctcagcagctgccgcccacaggacagtcagcgttttcaagcatgggaaggaaaataaacacgaggttaaaaaggggtctgttggccccgggctggtttgtttttcctgtgtaagggaggcaacgggaatgagaaccatctgtgccctgagcgcagcgcaagctgcctgctgggcccacgtgccctcccccaaagaccacagaagccaggcagagccttgctccctt

SEQ ID NO: 17883 - DNA, 3131 bp, Artificial sequence
  DNA replication origin
ttcccccaagccaaggggaagggggtggggggccggggggctggaggcggggtgggcagcttctccagcctcactcccctggcacctggcaggggcaccgtggggtgcttccctcccaagcctggccctgccatgcccggggcactcaggggcatcatggccaaagagacctggctgctctggatggggctctgcccctcaccagccctccacgagcccagtgggatccagctgggttggaagggagccagccaggtgggtgtgtacctgcctgaaaaggcatctactctccgggcacattcctgggtgatcccagtgactgggctctgtgccccacgcctttggggatgacagggtggccctgccccaggtggcatgcctgcctggtgactcccaatgtccccccaggggctgccctgggcccagccgggcaggtgcctggagccccaagcaaggctgggtggtaccaggcctcaggcagagccacacgagcgtgaggtccaggcaggggcttgcgaatgggtggcagccgtcagaggcaggcctggctccccagagcgagggacactattgtcctctggacatccctaaaacctggtgacctccctgataggggtcccagcagctgatcccggggggcgcctagcctggcccccaaggattctctggccccagccaagcagcaagcctctgcctggggcacccgaaatgaggtactggtggcggcacggcggacagaggccttgctgcctccggtctgctctctgctttggtcccagacacagccccattgtgccgtcctggatggagcgctgagcccctagcctggctcctgggccccacgcaggggaggggcgtgagggtgattttgctggcagctgctgccaggggcctgccctaaaggattttcaagggtttcctccgctgatctgatcggctgtgcagggccgcatgtgctccagggcggccgtgctgtgagggggatggatagcagccctggctggagtgagtttgagtgtgagtgtgtggagctgtgagagagtgtgtgtgtggagctgtgagagacgggtgtccaagaccttagccttgggtgaggcctgcacagctgaccatagagttgggcattctccaggctacagctagaagcctggggtcccctggggacacgccaggcaggagccagcccctggcaggggcagtgctcagggggaccactcagagagaccccagacccagccttgcatccccctaagcagggagtccagttgagctccagggtggagtcaggcccagacttgggggaagcgcgccaagccctccagcagggcctgtgacgaggtccccccgggagtctgcaccccaccgtgtagccacagcccggtttgggcaggcggttcctggtcggagctggcttcagagcatggatgcctagacgtgttctgggccagtggaagctgcgggccagacgggagggccctttgctgtcatgctggggctggagagcaagacacggaaaagtctcctgtctcctgaaacccgagtgctgggggcggcccacctgctggcgtgggcggtgggcatgtggatgccctggaggtgggcggaatccgtgtgggcactcctcacgtggctgtactggggtccctcaatgtggatggggctccaggttggcccaaggtctcctctgccccgtctactgccttcccacactgacattccttcctggagagaggagtttcagcttttaaaatggggaactgtgcctggaaaacacactgacagcgaggcccatgaatgtgcccatgagcccactgggtaccctgaggggccctgggtgctgggtcggtggggacgggcccctgggttctgggtcggtggggacggggccctgggtgctgggtcggtggggacgggcccctgggtgctgggtcggtggggacggggccctgggtgctgggtcggtggggacgggcccctgggtgctgggtcggtggggacgggcccttgggttctgggtcagtggggatgggccctgggtgctgggtcggtggggacagggccctgggtgctacagttaatgctcagaattctggcccacttgccaggggctccctggcccagagcagggctttggggtgaagaggcctggcggggacaggccagtggctgagaaggccccggaaagtggggaaaccctgggtggtcgtctcctggcctcccacctgctttaaggccagctgagtgctccccggggctggggccgggaaggggcagcagagccacccaccttggggtgaccctgttagagatgccctccaagcagcagtcaccagctcccagacaggacgtcctcaggtgtggactgggccccccgcaacctctctggccacatggccatgctaccccctaccttcactccatccttcctccctcccctgtccccgtcctgggcaccatccctggtgggtcgctgggcagcgacgggccctaggaattcctggcaagcctgaccccaggtgcttcctacagctgggtgaccttcagtcccctctccagtgattccagctcccgctgtgctcccagcccggtcctgcgcctcactctctcccctcccctggccactgaaggggagtcggtgtggttttccctgggggtgtctggctgggggatggggcagatagagccagctgtgagcagagtctcttcagcatctgctcaggggccagcatgtaggtgacggccttggggaggggcaggtgccaattctgttagcagggctgggactgagggacacggctttcgggtggccggaggtagtaggagttgcagtgctggcttgggaactggccttggtgatggcaccccagccaccacggagggtctgagggttcagtctgttgacgaggactgggcaagggagaggcattctaggtcctgccccgcctttggccaagctgtcctgaaggtggacaaatggtctggcctgagtaggacccctgagcccacaaggcctcaaggtaaggaggagagagcccagggcctgaagacccccacctgtccttggattcctgcctctgctcagaccccgtggccgtctcagggataagacctgcccccccagtcccccgcct

SEQ ID NO: 17884 - DNA, 1181 bp, Artificial sequence
  DNA replication origin
ccctgctggggagggcccgcctctggccctgagcttggcggagaaggccgtgtgcaaggtggtgtatggcgccccccgcccccgcccgctgctgctgcccgtgggcctggagctgtggctctacgtgcagaagatgcgaaacctgcagaggaagaggtgcggcgggcagcgagtggggtggtcacgtgggtgtgggtgccagggcgtggttggaggctgtcttgggatgagtggaggggacacccacctggtgcagctgcaggtggctggctgcattgcctggatcccagattggaggtgcagaatgacagaggcccatccgtgcacccatccccgacttttaggcccaggcccttcccaggccagaagcctccttcgccttgagcctcggatgccacgtctccggctggaagggaggcgggaggtggctcccatcatcagatctgcggagcagcagcgtctgggctccacagacacccaggcctcaggcctgaagcccctctcctccgatgttgcctggaaggagggggcagtaaaccgagtgagaccacttgaaaagtggctgggtggggcaagtgggccttaatcaggaagccccgtgcgtggcgctggctgcaggatggggcttggctggttgtcatggcgacggtgggctcctgtgacccacgtggcatccggatggccattcccagagggatgggtgaggtggctgtgaggtgcctggcaggtagtgggtgggagggcctggccctgaggtgagaggatcacttgagctcaggagtttgagaccagcctgggcaacatagtgagacccccatctctaccaaaaaaaaaaaaaaaaaaaaaaagctgggcatgatggtgcaaacctgaagtcccagatacttgggaggctgaggtaggaggatggcttgatcctgggagatggaggctgtagtgagccgagatcgcaccactgcactccagcctgggcaacagagcaagaccgtgtctctataaaaataataatggtaacataagttttaaaaatgaaaaatgaaagcaacagaaagcaaacaggaatgatggggccggcctgcaagcagccgaggctgaacccttcccccacttctctgaaatcaggtccctcctgggctccagctgtgcctgccacctcctggggccccccaagctgcgccctt

SEQ ID NO: 17885 - DNA, 1376 bp, Artificial sequence
  DNA replication origin
tgggcaacagagcaagaccgtgtctctataaaaataataatggtaacataagttttaaaaatgaaaaatgaaagcaacagaaagcaaacaggaatgatggggccggcctgcaagcagccgaggctgaacccttcccccacttctctgaaatcaggtccctcctgggctccagctgtgcctgccacctcctggggccccccaagctgcgcccttgctgagtcttttgtggctctccgggggcaccctgcagatgggggcccgcctgctcacactggccaccccatggcatctgctgggtgtgtcctccccccgcgaccctccacccagggcagcgcagcagcctgaggcccatgtgacctgtaagagtaggatggaggaggacaccaggccccagagcaggcagcagggaggtgcggagccgggcagccacggagtgaccccacactcctccccggcagctgagtgccaagggcagctccccaaggcccagggtgggggtccctcggtgagcagggctagggtggcagctgacgcacagggtgcttgggggttgtgcagggcccagggtgaggggtttcttctctaaagtccctgcccgaaggtgggggaccacggccaagcagggcgttggtgttcagaagagggcctggcccttggggttaggtggcgctcacacggcggagttcaccttgggatggggcgccatccacatcttcccacagcagcgctgggggtggcgggcagcacctgggaacagcgggttctcaggcctgtcctggctggcagcggcgagcgcttagctctgtgggtgggggaccaggaggagaggggctgggactggctaacccgcagccacacctccgcagcactggtctcccctggagacttggaggctgactgaatccccaggccctggctgggagagcttgggggtgggggaggagccgagatcagatccccaccccacccgacccccatgtggccttcacaagcccccactaccgtctgggagcctcagttgttcttggtgggaattaggggggcctctcccagcagctgtggtcgctcaggaggatggctagggtgcctggcccctgcagcccgtacctctgggatttgggtgaaggcagggtatgggggccacaccccctgcaacaccggcccctgggcctgagggtcttgccggggtcacaaactcacacctttgccccagtggcgttcctgaccttggccgcacaaggggtggacaggaggtgctggcagaggtgtgctggctggggcgcccttgggccgcacacgtgcttccaggcctgtatcccaaagagacacttaggtctgtgagcacagatgtggtgtgtgccctagcccacccaggg

SEQ ID NO: 17886 - DNA, 3845 bp, Artificial sequence
  DNA replication origin
ggagccgagatcagatccccaccccacccgacccccatgtggccttcacaagcccccactaccgtctgggagcctcagttgttcttggtgggaattaggggggcctctcccagcagctgtggtcgctcaggaggatggctagggtgcctggcccctgcagcccgtacctctgggatttgggtgaaggcagggtatgggggccacaccccctgcaacaccggcccctgggcctgagggtcttgccggggtcacaaactcacacctttgccccagtggcgttcctgaccttggccgcacaaggggtggacaggaggtgctggcagaggtgtgctggctggggcgcccttgggccgcacacgtgcttccaggcctgtatcccaaagagacacttaggtctgtgagcacagatgtggtgtgtgccctagcccacccaggggcgtcgtctgtagtgaagccacggaggtgctccggccccggggcgactttgccagggctgggccatgacgccaagttcctctgcacaggatggaggcgtcctgcctagagctggcgctggagggcgagcgtctgtgcaaggcgggcgacttcaagacaggcgtggccttctttgaggctgctgtgcaggtgggcaccgaggacctgaagacactgagtgccatctacagccagctgggcaacgcctacttctacctgaaggagcacggccgggcgctggaataccacaagcatgacctcctgctggcgcggtgagtggggacggtcctgctggcgggtgagtggggcggccctgctggcgcggtgagtggggacggccctgctggtgggtgagtggggcggccctgctggcgcggtgagtggggacagccctgctggtgggtgagtggggatggccctgctggcgggtgagtggggacggccctgctggagcagtgagtggggcggccctgctggcgggtgagtgggggtggccctgctggcaggtggacgcttcctgtcctcagcagttacagtttgaggagggggacagggcaagcagggtctaagggaacgcagtggggaagccctcacctggagggcagccagggctctgggaccccggcagggagctgggtttcagctgacaggcgtgagtgggtctgtgtgtctgcgtgtgagagcctgggctgtgacccgcgtgctgtgcgtgagcactcgtgactgtgtgtggcccatctgtgatcctgtgtggctcagagccccaccctttccctggccccaggccccaggccctgagccccgggcccactcccagccactgctcagtgaggtgtggtcctgccctgggggctgtccctgctttcccatggaccccaagctcccactcacagcctccttcctgcctggcgtcatccactccccagtctccccaacctactccccgccgccccttggggtcttggggtctccagtcgggtccagcccccaggccgtgcctcacgggagcacgcttcccttgcctcagccctgcccagcgccctccccctcagccctgcagctgccctgacctctcagcagggcagagcttcttggagcaaccctcccgcactggccagtgagctcacacctgctcctcagcacccagctcagtgtctggtgggcatgcaccaaacgtcctctgaatgagttagcaggaagttagttctccaccatcaggccccccaagtcctccccggatcctaagagctgcagaccccagccccctgccccaggcccaggcgtgaggtcctgtgtgtagctcctggcacctgtgtgcagcctgtgtggtgatgggcaggagcctgtgccccagacacagcccagcagagcccatacccagggctgccctcgggcctcacttgcccggcctgtgggcccctgcccagtatcacctcaggggttgcaggctcctgtccactccatgctggtccctgaggcccagctaccccaccccatgctcagcctccccccgggcccagaggcctgaccagtcctcagcctgacccctcactcctccctgccatccaggaccatcggtgaccgcatgggggaggccaaggccagtggaaacctgggaaacacactcaaggtcctggggcgcttcgacgaggctgccgtctgctgccagcggcatctgagcatcgcccaagagcagggagacaaggtgggggcttggtccggggctgggtgtctcccacccctgcaccggcctgcgtccagatccgggataggggcgggcgggtgactcaccactcatccagctcctcatgggagggatgacagggaggtcggtcccctagatcccgagtgactcaggagagtgtgggcccccaaaacaggcccccccagcccatgctgacactgcagcccaggcccccaccttccaccctcagttctgccgcccctctcggtgacctccccccgaatccctccacacccccagtcactcactccctggggggcccagcgggaggcagggggtggctctgggctgcggcagtgggaggccgatttcaatggcggtggtgacagcaggaagagtggctccgtctccgcttgtgctggacccgagacaggctttgctgacctccctccatggccctgtgaggcgagaaaaccaaggctggggggacgtgacttaccccccgtcacacagctggaggtgaccaagggggcttgaggccgcagcatctggtcccagctggagctttcagcctcggtcatcagaggacagagctgaggacctggcaccctggccacgccaatccgcagaggagggagggatggtgagggagggcggaggctggcttcccgggtgtgccgtcctcaggcttccgcccctgccttagtgtctgtgactcagtgggagcccccaaggccctcgctgtcgagggctgggacagtgaggacaccggtgtgccggctctgcacatcgtgtggggggccgtggaggcatgcccccaaccctccgtactgcccacaggttggggaggcgagggccctctacaacatcgggaacgtgtaccacgccaaaggcaagcaactgtcctggaacgccgcaaacgccacgcaggaccccgggcacctgccgcccgatgtccgagagaccctgtgcaaggcctccgagttctacgagtgagtggggcagggccagcccagggaccggggctggcctgtgcgtttctgagctccacagacacttccagacccccgaccccagccccatacctcccgacagctcccagggcagtgacggccaggtccgcccacccccgctttctcagctgctggctccctcccctgagcttgcccctgtcagggacttgggggacatgaccaagccccaggtctcagagctcgaggaccctggagcctaccctagccaccctctttccagggcatggccctgaggccgcatggaggccgctactcagctcttctagcctggggtgggtgaggacatgggctgggagggacacggctcagaggcactcggcccccaggaggaacctgtccctggtgaaggagctgggcgaccgtgcggcgcagggcagggcctacggcaacctgggcaacacccactatttgttggggaacttcacagaggccacgaccttccacaaggaggtgagccgggcagggtgacagggtggaggggccgggctgctgcaggggcagggctgagccaccctcttggcggtccctgaaagggcagggtggtatggccaggcagcaggcccgccccaccgagtcctggcctcatctgcacttggtcctgcagctgctagctgctcacccggacacacagatctctggccggccacctgggc

SEQ ID NO: 17887 - DNA, 1310 bp, Artificial sequence
  DNA replication origin
aaaaccttgggccacttttaagcctccaggcagggcagcctttcaaaagacctctcctctctgctgcctgtgaaaggccacaggcctgtggctctgagccccttgttccggccaccacccaccccagacctgcacacaagacagtacttaggggcctgtggtttgccagcctgtctctctccagagagtgatatttacatacatacatgggtggtgggggcaacagggtggcgaattgagggatgggagggggaccccacccgcttgtgccaggggtcagtggccggcccaatgtccacactgtctggctcagtccccacagtggcgttgccactcctgggtcacagcatggtcagtggcagagcaggggatgggacccaggccacctcgcctgggccgcggtaattcagcctgtgggccgggccgggtctgcccgccgcgtccgcgcccacgcacctgtcggccagctcctgggcaatgagcaggtgccgcaggtggtactcggccgcgcgctcgtagtcctgcagcagcgtgtaggtgttgcccagactgtagcaggcctgcgcctccactgcctggtccctgagctgccgagacagttgcagcgtcttcctgtgcagagtggcagggtcagcccccaggaggagggctccagggtgaggggtggaaggtaagaatggggacgcagtctgcccgatggtcccctgccccggaatcccactggggcctctctggggtccagcttcatccccaccctcacatggccacagagcgggactgttggccccagggggacggggggtcctgccaggctctggcaagttgcctgaccaccctgagccgccaccactcctccccggaggacctgagactgctgtgcccactgctcaggctgagatggggttaagtttagggctgggcacaggaccccgtgctgacagccgggctccacccggcaggcgctgctctgtggctcaggccaggaggcagatggcccagacctcccataggccggctcccccaccgcctgcctccccatgagctttgtccgtctgcccttcccggggcagcctagaaccccaccttgccttctggggaggggaggggaggcagtcagattcccagcttggggcgggcacttccttggcctggcatccagcccccccggcctgctgtctccctgggagattgtggggaccacctacttgtagtactcggcggccacgtcaaagcgccccaggaagacgtgggcgttccccaggttgctgtaggccctcctctcggctgccttgtctccaaactccttagca

SEQ ID NO: 17888 - DNA, 2279 bp, Artificial sequence
  DNA replication origin
aacttaaccccatctcagcctgagcagtgggcacagcagtctcaggtcctccggggaggagtggtggcggctcagggtggtcaggcaacttgccagagcctggcaggaccccccgtccccctggggccaacagtcccgctctgtggccatgtgagggtggggatgaagctggaccccagagaggccccagtgggattccggggcaggggaccatcgggcagactgcgtccccattcttaccttccacccctcaccctggagccctcctcctgggggctgaccctgccactctgcacaggaagacgctgcaactgtctcggcagctcagggaccaggcagtggaggcgcaggcctgctacagtctgggcaacacctacacgctgctgcaggactacgagcgcgcggccgagtaccacctgcggcacctgctcattgcccaggagctggccgacaggtgcgtgggcgcggacgcggcgggcagacccggcccggcccacaggctgaattaccgcggcccaggcgaggtggcctgggtcccatcccctgctctgccactgaccatgctgtgacccaggagtggcaacgccactgtggggactgagccagacagtgtggacattgggccggccactgacccctggcacaagcgggtggggtccccctcccatccctcaattcgccaccctgttgcccccaccacccatgtatgtatgtaaatatcactctctggagagagacaggctggcaaaccacaggcccctaagtactgtcttgtgtgcaggtctggggtgggtggtggccggaacaaggggctcagagccacaggcctgtggcctttcacaggcagcagagaggagaggtcttttgaaaggctgccctgcctggaggcttaaaagtggcccaaggttttcctttgtggcgtggtgaggagaatgttctggaatagacagaggtgccggttgcacagcatgaatgtacaaaatgccagtggatcgtccacgtgaaaatgatcaaattcctgttagacgcatttccctccaatataaaaacaaccccctcacccagtgacttggagggtgcccgtaagggtggagggagtgcaagggaggaggcttgccggccgccagggggcgagcgaggccaagggcccagaaactgcccgcaaaggcagagccggccacaggccaggttgcttggactctgcgctaatccttttaatgggaagaaaaaaggcagagctgattggggcttatgcttgaaggtggcagaatttgtgggaggtccagctgggggcattatcctgtcatccggccaatgccccttgggcctgggggcccctgatgaccctcgaagccagggtcatgctggggccgtgaccaccaggggaggggctggggctgggggctggcctggagagggcgggtatgaatctggtctccctctctggcagagtgggcgagggccgggcgtgctggagcctgggaaatgcctacgtgtccatggggcgcccagcgcaggccctgaccttcgccaagaagcacctgcagatctcccaggaggtgagccaggcctgcccccagaagtcccgggcactgcccagcccactccagacgggccgggtcccctctgccccgagcgagcgtgtgcgtgcctgggcccccctcatcctttcagggccattgcagctgcctggtccttccgaggcctggtgatgacatgtctaccatgcccgggggtttttcctgcagcccccagctggtgccttcctgggcagctgcgtctcctcctccttggagagtttgcacagggtctctgtgggctccgcccatcagcgccctcctactgtggtcagggcggaacatcacagatgaactgtgggcctcccggctcccggcctgtccttacatcacccactcccacgccacctccctctgcacaccccgagcctgttcatgctaaagacggtgccagcccctactgaccaccatagacccatgtaggaggtggccgggtggggaggcctgcaggtgcccaggtgagggtggagaggggcgggcatgggaaggtcagcagagccctcgtctgaagagcttcactggcagccagcaggcagcccccgtgtccctctgagtgcaggctacagcctccagggccttccagggctccatgtggccctccccccaaccccatgccacctctcttctgcttgacttaagcaaacagttagttcctgagtgatgtggatgttcccgggagggtcccccacagagcctcggcgc

SEQ ID NO: 17889 - DNA, 2050 bp, Artificial sequence
  DNA replication origin
ccaccagcctctgccacgcccaccgcccccatggaccacgcccacaacagcaaggccacgccccaccgcgtccccgccgggctgaagccccacctccagacgacttcctcctccctgcccacaccccgctgggcagcgccctcctgtgcccccagccctggcgccccctccgcacggccaggctctagcgcggctctgcacccccctcccctcccgcagctcgcagatccaccccgccctccgcacctgccgaatggggaggctgcgtgggtccttccgtggcgcccccaacccgcaacgccgggtccagactcccggcctcaaggccctgtccctgccaggctcagctgagccggggtctcacccagggccgcccaggctctaggtgtgcagcctgcctcccacagcggcagccgggcggcggccccagccaggctgccgggctgccctgggcggggaggaggacccttccccagccctgggggaggaggcgtccggccggctggaaggggtcccgcactcggggcggcacagaggagccagagagggacagaagctgcattgttccagcgtcctcccactccggccccccttttccttggctccaagaaagaaaacgtcgggaggacccagagccgcagcctccgcggagcctttccagagctgctcccagccctgctgccagttgctgctggggtcccagatggtggcagtgccgagccagggacacaggagggtactaggggtgccgcaggagctctcggcagagctccccacccttaggaaaccccggccatgggtagaaataggcctggacatcctggggggcacattccagcccatcccctacccacccactgccatcggtcacagcaccttgtcccacggactcgctgagggccccagagcctctgctccttcctctgtcttcagcctctgcggtggctgacatgcacccccaatttcccaggagaggtcatcgtcagaaacccatgagcactgtggcacaaaaacccaggggatggctgggcacggtggctcacgcctataatcccagcacttctggaagccgagatgggaggatcgcttgaggctgggagtttgacactggcctgggcaacatagtgaggccctatctctataaaaacatttaattattaaaaataagataagaaaaagaaactccggcagcccagcaccacatccaagcctggtgttcccagcctggtccttagcaggcctggggggcaccaggtacgttctgggaggcaggcatcccttctcgggggctggcaaactcaagacctttgggagtgggggacacatgggtggggcagctgctccccccaagcctgcccctcacccacctgccagccacctcaggaagtcggcccaacctggcaccacccccctggcacctattagtcttttcgctttgcaggggacgttctgtcctgtgtctgcagcactgctgaccggcatgggacgaccagcggtccatgaatgaggtcaccacggtggcctcgcatggccttgggccttgcctgattactgccccaggcacatagggctcccacagcccagcccagcccagcccagcccagccctctggctgatgccctctcgcctcccagcagccctctcctacttgggtctgaggacagaagccctccctgcaccgagggctccagggggaggtgggggtggaggccctggagcagccagtggggcaacaggcgaccacctcctgtccttcatccagcagccctgcagcgccactcaggatgcgggtgggaagggctcagggtgaacctcaggcctgtgctgtccctgaggccaagaagaactggcttgtaggcgccattttctggcggctgccacctccgccatgctggcctggcctcgatcccacccctccgcagctcctgatgcggtccgtgcctgtggggagcaagacccccccacaaccctggaactcaccctgggcctcatagccggccaggtcaggcttctctgaggctgccgggctggtcaggcggccgagcaccag

SEQ ID NO: 17890 - DNA, 983 bp, Artificial sequence
  DNA replication origin
tctggaaaggctccgcggaggctgcggctctgggtcctcccgacgttttctttcttggagccaaggaaaaggggggccggagtgggaggacgctggaacaatgcagcttctgtccctctctggctcctctgtgccgccccgagtgcgggaccccttccagccggccggacgcctcctcccccagggctggggaagggtcctcctccccgcccagggcagcccggcagcctggctggggccgccgcccggctgccgctgtgggaggcaggctgcacacctagagcctgggcggccctgggtgagaccccggctcagctgagcctggcagggacagggccttgaggccgggagtctggacccggcgttgcgggttgggggcgccacggaaggacccacgcagcctccccattcggcaggtgcggagggcggggtggatctgcgagctgcgggaggggaggggggtgcagagccgcgctagagcctggccgtgcggagggggcgccagggctgggggcacaggagggcgctgcccagcggggtgtgggcagggaggaggaagtcgtctggaggtggggcttcagcccggcggggacgcggtggggcgtggccttgctgttgtgggcgtggtccatgggggcggtgggcgtggcagaggctggtgggtttggtgtcccgttgataaacacaaggagacttacgtgcggctggaggacaaagagccttggcgcggctcagtcagcgtattaatctcaccgccctctgctggcccctccccagccagcagagaagccccagaagtgtgtctgggggtcaccaccctgccagccactgcccttgtccagctcctctgggtgtgtggcctctatgagaccctgacagcaaccagcccccacctccctggccagagggcacaggcccgggcctcccacacttgctcctgggctgcccaccccccaccccagcaagggtgccaggcaggacgg

SEQ ID NO: 17891 - DNA, 1133 bp, Artificial sequence
  DNA replication origin
tggcaggggtgagaggccagcgagcctgagggcccgtaagcctgttgcgttcgggccctgggtggacgaggcaggtgtggctgcagcaccatccgcctgttccagcagcccagtggcccttgggcagccgccgggatggaggatgcaccctctgtccgtgcgcctaagagggcccagaggggacagtgtgtgggaaatggcacacagggtcccgcacgcagcagatacacagtaaatgcctgctgcttggtcaccaggctcctgccgtgtgccaggcactgctggggccctcactggcaccaagaccgctgagccgcgtccagcagctgataggtgaggaacggggagcccaggagtgagccacatgggatgagctttgggagaaagaaaagcccaacagggaggtgcggacaggaacgggggaggtgcggacaggatcggggggaggcgcggacaggagcggggggaggcgcggacaggagcggggtgggggcgcggacagaagcggggtggggcgcagacaggagcaggggaggcgcggacaggaacaggggaagcaggctgcagcacctttgggagatgaccatcatggtccattccgactgccctcacaaagcaccgcaggccggggcagcaacagcagacgtttactcctcacggctctggaggccagaaggccagggtttgggtgctgtgtgctcgggtgctggcgagagcctcttccgggctggcagacggcgctttcttgttgtgtcctcacctagcagagacagcgaggaagaagggggagcttgagaacactggtggcttctcttaaggccacttgtcattatggggctccattctcatgacctcatgtaaacctcaggacctcctaacaccatcccatggggagttagggctttgatcatgatgctccagcaaagactggaagtcagagagaagtgagccgcaagcttagacggaggaacagcagtctgggcagagataacagcctgtgcaaagggcctgaggcaggggccagcctggtaggtgaagggacagggagactgtctggagctgacggagcaaggcgagggccttggccgaagaagggagggcctcgtgggcccttgtgtgagaccccctcccca

SEQ ID NO: 17892 - DNA, 963 bp, Artificial sequence
  DNA replication origin
gctggcagacggcgctttcttgttgtgtcctcacctagcagagacagcgaggaagaagggggagcttgagaacactggtggcttctcttaaggccacttgtcattatggggctccattctcatgacctcatgtaaacctcaggacctcctaacaccatcccatggggagttagggctttgatcatgatgctccagcaaagactggaagtcagagagaagtgagccgcaagcttagacggaggaacagcagtctgggcagagataacagcctgtgcaaagggcctgaggcaggggccagcctggtaggtgaagggacagggagactgtctggagctgacggagcaaggcgagggccttggccgaagaagggagggcctcgtgggcccttgtgtgagaccccctccccaatggggcggggccctcaggacccagcagagaaggggcaaggcctaggccagcccttaccaaccccatggtccttgcatggagaggggacttaggggcaaggctggggcagcaggcaggtgaggggcaggtgatccggctccagggaggtgaggaggggtgggactctggatctgcagtgaggcggggacagactggatttcagaccagaggtgggcgtgaaggaaccgtgggcagctgaaaatcggggttgctgaggtctgagccaagccggcggggcgggtgctgccctgaggggtccggcaggcacagggggcaccaagatgctcgatgggcttgagttggccattgcacataaacgtctggagctgggtgaggacagaaatgatgatgacagtgtgacggtcagcgtcgggtggccatggggcggtgctgggagaagtttccaaacgttgccctcgcaggcgggagagacaggaagccaagccagtgggccgggcctgtctgggcagctcagccaagggcgctggactcacactcaacgcctcagccgactct

SEQ ID NO: 17893 - DNA, 1738 bp, Artificial sequence
  DNA replication origin
gctcccacccccctatgcccacccttacccagtcttcctgggaaccaagcgtccctccacccgtggacacactggacacgggctgtgcccaggagccctgcgcacacccagtgtgagtccgagggcggggccagaaccagccctggcatcagtgggcactctgagaatccagtcctggcacctccagaccatcagacttggccccattactacgcctcggagctcagcgccctcctcatcagactgcgccggcatggatgggccgggccgggcagttcccctccgcactcatccccccgagaggctcagctcctaaagtgaagctgcttggtggctgcctgcatcaggcagatgtcggggggcaggcccagacacccccttaccctgtccaggccccactgcatcagggagcacagccaccagggttggggcactcgtcaaagttagcagcatgaatggccaggcagggtgccggggcctcaggtgcacccggaccccaccgttagccctgggttctgggccctgccggggaacacaacatccacagagggagagagccggctcaggcgggcagtcactcggtcatttcaggcactgggccccacacacagcccctcccagcctcacctgcacagctgtcactcagccaacatccccctgaccccagcctcagcagggccctgatttaaatatgagcctggccccgaccatgagggagggaggaaatgggcccgagtgtcagggtctctcagggtctcccttacaggcccatgctgcggatgagaacaggcctgggtcttgctggggggctgctgtctgagcattgtgccaccaaatggagtccaagcctccacccccaactgggaagggggtcctgctgccacctagtgaatggcagtgatgaggatgcactgggggcttcagacggctaagaaggcacctggtggacagcaaggtgctacctatggggcagaggggagcccctggatcggcctggctgctagcagccccttcctgagtctgtccatgtgacccgtttaaatggtgagctcctaaacgcagctggggggaaggggacaggagcagagggagctgaggacttgggggcccaggctggtcttccgcctccagcccgctggccccagaccagcccacggcgaatgcctacagcttcatgagagctgggcagggaccgggaactggctgagtgtgggctgtgcgcttccctggcctggcctctgggctccgaggacacaccctaagctcctgctctccaggggcctgggatggaaacctgtgcggccagaggcacacgtggggcccatcaggggcctgagcaggacactgggacctggggccgtccactgctcctcccactcccaacacaaacgcccggggcagggctcccatcgccaccctgtggccacagtggtcagcgggatcagggttagctccggcacattcaggatccggccaggcactgaggtggagccgccccagcctcgggtggtgcagcttgaagggacagaacggggctggggtcgacggcctgttctctgaagggccaccagctgcccacccccacccagatgagcaaggtagctctgaggacagctgctgaccccacacagttcggggcctgctccccacaccatggaaatgacagaggagcacgtctgtgctggggcgggcccttcacttaccacacccagcgagagccccgctccgtctcccggtg

SEQ ID NO: 17894 - DNA, 930 bp, Artificial sequence
  DNA replication origin
ccagtcccctgaatggtggctgtctccattctgctcctggggaggggtaaggctgtgcgtggcctgggcaattgtgaaccaatgtccccatcccaggaccctgaagggaaggccaggccgcctccatttcatggatgcacgccgtaggtgcccagtacccagagaggaggagaggactggggctgtgggcccttggctggggccgggagaggcagggtggggtgtttgagggccagtggcccccgcaaatgtcagccggcttataccagcaatgacagtgactgtgggcgtccttgggtctcgtccccacagcagaaccctgacggccatccacaactgaacacaggccacaccagaggaaccagaggctcagagagatcaggctgctggcccaggccacacagcacccactgccgacaggcacagggccagcccagggccctacgccaggcagcccccgaatctgtctgtgtgggtctgctgaaccccagccagtgtctgcacctgcagcagctgtgcccactttgggtcagagtccgagagggcagggagcaggcaggagtgggtgcccctgtctgtgggctcccgagggtgtggtggcatagcagctgggtggagtatgggggcctgaaatgtgtgaggaccatgcctcgcctggggcacagctggccagacgctgagggacatgggtgagcaggtggcagatgggccatgcagggcatcaggccgaggagggcacatttatctcccagcagacaggggctgaggtgggtggcggtggctctgcctcattaaccccgctgcccatgctctggcagcggctgtgctgacatcggtcccgtgtccctggctcacccgctccagggggagtctcagcaggtcccaggtctccgcgctcagcctctgcgtcctcttgggtctggcccctga

SEQ ID NO: 17895 - DNA, 865 bp, Artificial sequence
  DNA replication origin
gaacaagatggaaactgaggcccaaagagaggcggggcgttccatgcagaagagcccagcctagagtccccaggaggctcctcggtggccggggcctctgaggccaggtgcgaccacaatgctaaacactgagccctgcccagagcccccaccggggtcccaggacagcactgcaccaggtgcaccggggagggacccctgcctccccggagtgcccgggcctgacctggccccgttggctggcagtggagttggggcgcagttgccaagctctcctccctctcggcctggatctgccgtcaaagacgcctaccgtgcgtggcacgtgcacccggacgtcggcgctgtccagcggggagtggctgccctcccggggcctcctctcagcgtccgggccttcctggtacttcctgctcctcacggggaggggtagcgagtccctgctgggcccccgccagtcccctgaatggtggctgtctccattctgctcctggggaggggtaaggctgtgcgtggcctgggcaattgtgaaccaatgtccccatcccaggaccctgaagggaaggccaggccgcctccatttcatggatgcacgccgtaggtgcccagtacccagagaggaggagaggactggggctgtgggcccttggctggggccgggagaggcagggtggggtgtttgagggccagtggcccccgcaaatgtcagccggcttataccagcaatgacagtgactgtgggcgtccttgggtctcgtccccacagcagaaccctgacggccatccacaactgaacacaggccacaccagaggaaccagaggctcagagagatcaggctgctggcccaggccacacagcacccac

SEQ ID NO: 17896 - DNA, 1194 bp, Artificial sequence
  DNA replication origin
ccctgcccctccccaccctgtgcccagacagtgcaggggccttgcagccagcacattcggggctttgggatctgaggcggtgtggctgggtgtggtctgggggtccagagaactcattctggggtggagggtaggggacagggcagggttggcctcagaggctggagacagtgtaggtccaaccaggaatgagacagagaggcagcaaccagaggcttgagttgagctggccgggaggcccttgagccagggcactggggagccaccgagggctgtgggacaggaagggccgtcccggacagaggagtccagatgaggacagcaacccgcccaggtcctctgcgcctgcctccgtagtcaggctgaataaagaggtggctttccccacctggcccagctctggagggaggcccaggggcccaggtgtcagcgggaaaagggctcttcggcaggctgtctgcccacacagccctccagtgtgcccgcccacaggcacggggagggggaggttcactgctgcacttgctgggggagtgtttacggagtgcgcctgtgtgtgagtgcgagcccacgtgcgtgtgtgtgagcctgtgtgtgtgcacgcactcaagtgagcaggggcgggcgctaggagggccgagcccttgcccagggtcctatttaagcctcaggcatcccagcattgaggcagcacttggcactttgggcagggcggtggtggccctgggcaccttgtgtcctgcctgcgctctgtgtggccaagcacccagcgtggctccctgctgctgtggagacagcctgtgatccgcgtgagtctggggtccctggggtcctaacaggtggaggctgagggagcacacgggcctctgtgaagccgggtggggtggtcttgggccgggtgcattcccctcctccgcaggagaaactgggcttgtgccaaagcaagagagactagagtcagactgcaggagggactctgaggcctccgggaaggagggagccagggcttggggcaagggagaggttagagcagggaggcggaaccccgagtcccactggatatgttctactgggacataaatgcaggggaaggtggccttggggcccagggtcctgcttctgaggggctccaggagccccaaactatccagagcctttccccgtaccaggcactgagccacggttttgcacctg

SEQ ID NO: 17897 - DNA, 1174 bp, Artificial sequence
  DNA replication origin
agggtctgaatcccagctcttttttgctccagcatgaccttgggtaggtcacacatgtctctaggccccactctcctgtgccctgggccgagtccagcagaaaactggaagcaggacgggagccctagtcctgggctgtgggggtcaggtgtcgggaattccagttgtctgtcagacagctgtccgtctcctgggctgtgggggtcaggtattgggaattccaggcagcatcggggacccgggaggtgccatctccaccaacattgcgtctcttgttaactcgttcagctgtgagcccagcatttgcagacctggaagaggccaccagccgtgagatggacaggctggggccgggcaggggctgccagcgccggtcgggaggtggacggggcttggaaccatcacaaacacccttcagccctggggcccggaccaggccctgtgaggctgggtcacggggtggacctgcttcagctgggccccttggggggccacaggagaccacgccctccagcctcccttgtttgggtgtgtggactgaggcccagggcggggttcattccttcgagttcattcacacagcagacaccggtgagggctgtgtagggcatggacacagggagctcatggcagggctgacacagggtgtggtgggcacagggacaggaggcacgggaggcttcccgggatgtctgggaagtgttccaggccaaggctggggaggctggcccagggcaggtgacggacagaggcctggactggggtagcacccatgagaggggagaagtccggggcagtcggcgggtgccgagggtgagtgacacgtcctgggggaggggtagccgggtgccgagggtggatgacacatcctgggagaggggtagccgggtgccgagggtggtgacacgtcctggggtaggggtagccgggtgctgagggtgggtgacacgtcctgggggaggggtagccgggtgccgagggtgggtgacacgtcctgggggaggggtagccgggtgccgagggtgggtgacacgtcctgggggaggggtagccgggtgccgagggtgggtgacacgtcctgggggaggggtagccgggtgccgagggtgggtgacacgtcctgggggaggggtagccgggtgccgagggtgggtgacacgtcctgggggagggg

SEQ ID NO: 17898 - DNA, 883 bp, Artificial sequence
  DNA replication origin
cgggatgtctgggaagtgttccaggccaaggctggggaggctggcccagggcaggtgacggacagaggcctggactggggtagcacccatgagaggggagaagtccggggcagtcggcgggtgccgagggtgagtgacacgtcctgggggaggggtagccgggtgccgagggtggatgacacatcctgggagaggggtagccgggtgccgagggtggtgacacgtcctggggtaggggtagccgggtgctgagggtgggtgacacgtcctgggggaggggtagccgggtgccgagggtgggtgacacgtcctgggggaggggtagccgggtgccgagggtgggtgacacgtcctgggggaggggtagccgggtgccgagggtgggtgacacgtcctgggggaggggtagccgggtgccgagggtgggtgacacgtcctgggggaggggtagccgggtgccgagggtgggtgacacgtcctgggggaggggtagccgggtgccgagggtgggtgacacgtcctgggggaggggtagccgggtgccgagggtgggtgacacgtcctgggggaggggtagccgggtgccgagggtgggtgacacgtcctgggggaggggtagccgggtgccgagggtgggtgacacgttctgggggaggggtagccgacagggggcaggttagagtcccgatcttggccagggtctcagaagtgtgtgtggcctgggcaagcagcccccggtctcgtctgggggtctgcggggctagctttggctgcggtgaccccactccctccccagagcatcccgagggccccgtcttcggacgaggagtgcttctttgacctgttgaccaagttccagagcagccgcatggacgaccagcgt

SEQ ID NO: 17899 - DNA, 2075 bp, Artificial sequence
  DNA replication origin
ctctggggggacagaacatggccctgtccttggtggccccaagaggcggctcagagacacctttggggagggtgggggagacagcagggtttcacatttggcagggcagggcagaacgggaagggcttgggggagaggatgcgggagtctgacagcaccaggtcggggccgacatgccgaaggccccgtccggcctgcggcaggggcagaagggaggaagctgagggccatgggggccagcccgggatggaagcacgccctcccaccacgggcagcttggcctgagcctgtcgccctgggtcggggaggccgtggggctgcatgcccagtgcctgtcctcggcaatggcctcgggaggacgtggctgtgactgtgagaccggcgtccaggagtgggggcagggtgggcctggcggtgggcacagggccttagctcgcaccaggctggcactgctgctggggctcgggcgggccgcctgccccctgctccgggcccccggcgaggtccacccgctgctcgtccatgcgcttagcctgcaccctctgaatgaggctgaagaagtcctcgtccggcatggtagggccccggggcagtacgtcaggtggcgggcagcgctggtcatcgatcctggaggactgggtggacacagtgcagttggcggcctcacccccccagccccagtggtccggggctggtcagcagcggtggttccagaggccagcgtgcactgttcacgggcttccccctgtccacccaggaaattggttctggggcctgcctcgctctggggtcttgtgctgggagcccgggccctgagcgcagtcttctggtggccccgccaccaacccgcaggagcccagggcaggcccgcccaggaaaagcaggtccagcgattcccactgggcatgggtgtgccaggcccaggagacagtggctagggcggcgttggatgcctgctccccacatctgctgatccccagggacgggcatgcgtggccgtccctctgcccagccctggaaaccagcacagcctgggactgaccctggcaggcctgaggtctcagcttccagagcccgaagtgtggcgccccccagggcttccccttgtgtcaggtggctgaccccgtgggcctcgcctgctccagtgtgcaggccagggggccaaggggttgtctgggcttctctgaagcgcctggagcaggagggacgggagctggcgcaggcatgcgtgtggatgggggactctgggcctcttgggtggggctggtttggaggtggctggtcggacgcctggccccgggccgaggtttcctctctgctgtggggaggacggcagacctggaaacgtgctggcttggttcgtggtgggccaagcggcctccacccccagcctgttcccaagtctacggaccctgaaccccttcccagcaatggctgcaccccacagggatggcgagacccccagagtttgaggtcctagttgggatagcagttggctcagcagtctccactccggccaccctacctggctcacccccacacagatgaggaggtcattcctggcgtggctgccaggctggagccccggccctggctctgccctctggggctggaccctccgcccatgccgtccactgtgtggtccctggatggtccctgtttttgtcccaccagccagctggcagccctggatccccctgccctccccactctgggggtgctatctggcccgtgttttccctgccgggtgtggagggctggtggggaatccctgaggccatgagctccaggacctgtgaccccccagcccccaccccgagttcctgcatggcaggggggtggcacagcctgggagtgtcctggggttgccagggggggtctctggtgtctccagcagcccggggttcccaggagtagggcttcaggctcagacacccctggtcatgtggtgacactggctgagtcccccaggagtccctcaaacatgaccggagatggcagaaccagcgcccacctcacccctcaggacacaagttgcctccacacacgtggatggcaaaggggccgcgagccac

SEQ ID NO: 17900 - DNA, 2179 bp, Artificial sequence
  DNA replication origin
tctccaagcaggttcctcggccgcaccttcagaggctgtcccagccagtagcgtgggcggcactgctgcgcttccctggctgtgcgcggtcctgggccctgcacggttacttggaccctgtgtgcgtgtaccaccacacgcaagctggctgggaccctggacctggagtacacgttgattctggttcccaaggccccttctggggtggaggaggcaacggagtcaaccagcacagaggctgtggctgccaacatggccaggtgggctgtggcgaggggcagcaggactgcccggcgcacctgtgtgtcccctgacgggggccccgtgggggtgccacccaccacaagcagcgcccagacaagccccaagactgcagatctgccgtcggctcctccactgtggctcagtgtccagaccctgagcccagccggatcagactccaggaaaggacctccctcccccgggtgctgggtgggcggcagcaggctgggtcctcagggggtcgtggggctgacctgggggctgctgcttctgggggctggtcccggccacgtgagtgtcagctcagagcatgctctgtttccctaggggctgggagcgtgaggaggtaggggtgcaggaatcagtggtgacagcaggcagccacttcacccctctgtgccccagctcccccgtggttaaatgcagtgggaactccatctctctgaggtctcagagggcccagacagtgggtatctgtggacactttgcacagtgcagcctcttaccgggttaggcccccacccgggactaagcccatacggaccacactcacttggccgactttatttttcaggaaaaacagaaaaacaaatgtacctcttgggttggaaaggacccattgacaacatggcacagacgtgagcaataaatacgcacatacattcaagtatgcgggggggcgctacgtcctggagaccctgtgttcgggcacctgtccctgctctcgggtgcggccctgcccctccagaagcaggtcacctcaccaggcccagatctgcctctccatcctagcctgagagtggggcctagaggcaccctcctagatggaactgccagccctgggggctgtggggccatggtagggcccttggcagtcttgggaggtgccaaggctgggtctggacaggaggaggcaacctcaggcccctggggcccatctcaggctccagcaggtcctgccagtcctaggatcccgaacttggtgccctgtgagccccctccccatggagagagcagtgatgtcatctcccccagctggtgggaggaggggggttctcatatggggggtctgcagggttgagctgagtgaagcctccccagcttccactgaccacccccccacttgggtgagggtcacagagcctggtgctacctcccaccctgactgggcactgctcttgctgccagtaagcatccctaggaccaggccctgccctttttcctggcttggggttttggaatgtcgaagttcatgcccagccattccctctgctttagagataggcccggctcctgtcgaggcccctgcagggccctgggactcggcggggggcacctcagggctgccactgcagcctggtctgccatgcgtggtctggggggccttctgtggttgctgacctctggccggggagtggggagacaggcttggagggagccctgccccaggacgaagctggaggggtggagcatgcctgtcacacggccatcccaagaccagctctggggggacagaacatggccctgtccttggtggccccaagaggcggctcagagacacctttggggagggtgggggagacagcagggtttcacatttggcagggcagggcagaacgggaagggcttgggggagaggatgcgggagtctgacagcaccaggtcggggccgacatgccgaaggccccgtccggcctgcggcaggggcagaagggaggaagctgagggccatgggggccagcccgggatggaagcacgccctcccaccacgggcagcttggcctgagcctgtcgccctgggtcggggaggccgtggggctgcatgcccagtgcctgtcctcggcaatggcctcgggaggacgtggctgtgactgtgagaccggcgtccaggagtgggggcagggtgggcctggcggtg

SEQ ID NO: 17901 - DNA, 1791 bp, Artificial sequence
  DNA replication origin
acttcggccttccagaaggaggttttggccctgggcctctctggacgtggcctgttttctatcaataaacagacattacttccagatgctggggcctgtggccctcgtggcctttctttttctggagttagaacgattgctctgaatccctggtgctgctgggtgggacataggagccgcaggacctctcgcctcaccacagttccttctacacagagtcacccagctcttgcccacagaggccacagtcgcgtggaaagggggctggatgtggcgtcagagcccttcctggctgtcgctgcgtgactttgagcaggtcaccacccctgtgagcctcagccttcctctgcaaggcccttgccgcccccctggccagctctggcggcctcccttccgtgagccagtgcagacctgagccctggtcctcggccgccggccgtcggcgaaacagtgagcaaaccaggctgcctgctggcccaggcaggacgagcagctatggcgtggccgtgtgttaggagctccagacccctcccgggggagccacctgggcctccttccctcggtggacagcgctctggacgtccccagggccctccgaggtgtgtggggtttgtctcccagccttgtctgtgcgcaggatgttcccgtgtttatgaaagcgagcaaacacagcagcctgtttatttgcagaagcgttctgggcagcgtaaccttcagcattcatcacccgccacactccggcagggaagagaatggggcgaggtgggaggtggaggcaggactgagcacgacagggacccagtgcggcccctcccagcgggacacggccaggactgccagctcacatccggcccgtgggaggccggggcgcggcggcatcgttcccagtgtgcttgtggcgtgggctttgcctcgattaccccctgtccttctttcagccaacaaccctctattattcccacccagagccttctgtgccatttgtggaaactgtcctcttctcggctgagccaccggcacccaggcctgctcctccatggaggcactggctgggggtctcttgggggcttggaagtgcagtggggctgggcttggcttggctgcctcactgcctccagagggcctggaccagcatgtggggaggtccagggagccgtctggacctggaagtgcagaattagagcaaggagagccgcttgggccaacccctcctcttacggatggggagatggcggctggtagttgggatgtggacgttaccatgtcttttctgtctgatgccagcacctctgggcccaggctggccctggagggaaatccttcccaaggctggcacgttcctagagaagacctatggctaccccccgcgtgccagaagcatcccgccagctcctgcctgaggccccctggaccctgtctccctccgcccttccctccccgcagccccaatcccacagccaggtttctgcaaggggctttgccatcctaatctcctgccactctacacccccccgccccaggacatccctgcctcccgggcacggttgctggcctgggcatccctcgtcacagcgtctctccaagcaggttcctcggccgcaccttcagaggctgtcccagccagtagcgtgggcggcactgctgcgcttccctggctgtgcgcggtcctgggccctgcacggttacttggaccctgtgtgcgtgtaccaccacacgcaagctggctgggaccctggacctggagtacacgttgattctggttcccaaggccccttctggggtggaggaggc

SEQ ID NO: 17902 - DNA, 1665 bp, Artificial sequence
  DNA replication origin
acagcacgggtgacccgcattcccgctcggacactcgcgcgcagccccgcggccgtccctcctcgctgcggcccgcggtgtcctcggggtgcgagctgcacgtggacgcagggccccctcaggccgccagggggcggcatagcgcagcgcgcccccgacccggaagacggaagcccaagaacgccgcttccgcccggcgcccacttccaagatggcggcggggcggggccggggcagggcggacggagccggcgagcgggatgctgcggactgcgctgcgcggcgcgccgaggttgctgagtcgcgtgcagccccgggcgccctgcctgaggcggctgtggggccgcggggcccgtccagaggtcgcggggaggcggcgggcctgggcctggggctggcggcgctcaagctccgagcaggggccggggcccgcggcggctctggggcgcgtggaggcggcgcactaccagctcgtctacacctgcaaggtaggcgcgcggcgggacggaaccggggacagacccgtatctgacgctacacggcctgcggggagaagcggcccgccggggatccgggaggcggcgtggtcaagtcacaggaaggagtggagccaccccttggggcttctgggagggagcggaggcggaccatgaggaggggtggagccgtccctggggcggggccttcccgggagagggcgaggttgggggtgggtggagctatccctcgggggcggggccttctctggagagggtgaggtggctggagctacccctagaggggcgggtcttcccgggaggggcgtggcggccctcacagcctcaccagctaccctgtcccagccaggtctgcgggactaggtcctccaagcgcatctccaagctggcctatcaccaaggcgtggtcattgtgacctgccccggctgccagaaccaccatatcatcgctgacaacctgggctggttctcggacctgaatgggaagaggtgaggcctgtaccccagggctgggccagaaggccacccagaagtaccctggcctccctgggggaaccttgccctagtgttgaggtttatagatctcacctgggaaatccagccaccttatcaatacaagacacacagttaaatgagaatttcctataaagcccagatagcttttgagtttaagtatgccccaagtagggggtgcgtttttatttgttaaattttgccagccctgtggccctgcctccctgcctctgcctgccctctgccatcactggcagccttgtccctctctagcgtggaacttttttgccctctgccatcttggggtggctggcccacagcaaggcttggggtgtggaccaggaggtgtggcctgggccctggctgctgggagagcagtggaggtggtgccgggagcctggtccgggccttgcctggccgggaggtcctgggcaggacagtaacagcgacagcaggtctgagaccagcatgccaggtgcttggtggtacctggcccttggagctgggactgtcctcccatcagacccggggctgcagattcttccctctggcacatagggggcaggagcaggagactgggttcctgaggcggcgcataccggcagagacacagggctggtgagggcacacaggccagcgtctgaagtgcccgtgt

SEQ ID NO: 17903 - DNA, 1019 bp, Artificial sequence
  DNA replication origin
cccctttcttgggcactgcagcagcttggggggctttttggacgtggatgtgcctggtcctggttttccgagggcctttacagtggatgaggaggtgaacacaggagtcctgagagcaagcaccacctcgggctttgttgtagaaacaatggcccggaccccaggctggagccgtggcttggcctcctgggtgtgtcttggcatctgaaatgcaggctacccacaccggctcacctccaggggtacaggcaggtcccacagggagagcttggcgctgagctgaggctgtctgggctcctcgcctcccaaccagtctgcagttacaggggccagtggggggcgggtgagaaggacgggttccctcaggggagccggccggagcccgagccttcccccttctccaggacgcaggcctgagcagcggggagccgcccgagaaggagcggcggcgcctcaaagagagttttgagaactaccgcaggtaggcgggcggcccccaggcttctccaaaacgggctggggagcggcagccgggtcgcgcctgagacacctgtcttcacaggaagcgcgccctcaggaagatgcagaaaggatggcggcagggggaggaggaccgggagaacaccacgggcagcgacaacaccgacactgagggctcctagccgcagcagcgcaggccccgaccagggcacacccaccggcccggcctcctgccacccgggggtgccgacgccctggggcgcagacttccccgagccgtcgctgacttggcctggaacgaggaatctggtgccctgaaaggcccagccggactgccgggcattggggccgtttgttaagcggcactcattttgcggaggccatgcgggtgctcaccacccccatgcacacgccatctgtgtaacttcaggatctgttctgtttcaccatgtaacacacaatacatgcatgcattgtattagtgttagaaaacacagctgcgtaaataaacagcacgggtgacccgcattcccgctcgg

SEQ ID NO: 17904 - DNA, 2334 bp, Artificial sequence
  DNA replication origin
gggcagtgtggccgggtccagtccttggcgaagtggcctaatgggacatcttgactctctttggaagctctcactcccccaggacctggaggacacccagctctcagacaaaggtgaggtggggacagcagtacacccagaggcctcccagcttccccaagtgaggcccatcttcagcacaggcagcccgtgccgcaatgcctgtgtcaacccccacaacccccactccacagacagggaaactggggctggggataagtaaaatggtcaaggtcacctagagaacaaactacagagcccagctggaacccagggccccagctagtgggacaagtgtcccctggggtggagagtgtgggggtctgggcagcccccatgggctgcagaggtgagcaggcccaccgtcctgagagtgtggggcccctctgggcagcccccacggggtgcagaggtgagcaggcccagtcctggctgctccaagcttcctcctggacagagggaggtggtaacgagcgaacgaccaggtgcatgaagctagaagatggggcgagatggggccccacgtggcttgagggaaagggctgaatgcaggggtggccaagggcctgctgtgtcccggtgcagtgggggtaaggcagtggcaggggcttctagcgggcagggcaggccccctctgcctgtctgggggaaggactgggtggctagctgggagcagctcccgagtgtccaggagtgggcagtggtgatgaggtaggtgtttgcactgaaggtgctgtcaggtaggggttggggagggcccagcagaggggtcctgggaggctgcaccggagttggacaagcttcctgagtaccaggccgtggcctccaagcagaggcggaaggggaaggaggagccgcagacggggaagtgaagaccagcgcctttggctgcagctcagaacacttgaacatggggatgccaagcccccatgtaggcacagaggcgagcaggacccaggagtccggctcaggcactgcccccatccccctgggtggctgtggcaggagcaggggcaggtgtgaaggttggagggtgagcaggggaggggctggctctaaggggctgccaatggccaggacagccctggcctggccctcaccgcagtggggctgagactggacgtgcgtggtttctgcccaagggtcctgatccctggtctgcccaggtcctggcggtttctgagggggtccagccgcctgaaggttctctcccaattgctgcagtacccctgcccccacttcaggaggacccagacagccactgtagctgtccccaactctctccccagggccgccatgcccacagatgctttggagtgatgggggacggtgctgctcaggcccagggtttaagttcccccgaggtctgggaggcgttcctccctggcaggcagccagctcgggggagggatggtcactggcgggagcgttgggcctgggctggcatctggcggcctcctggagcaatgaacaggcaagcgaggccataaggcctcagtctcatctacagaaagcagagtctacactggacccatgtggggatcccaccaggccttggaagacagccccactgcaatgccggggaggggtggggcagccgtgctatacgtggcccagcagatgggcaggtcccacaggcacgactctcctttccaggctgccttgccggcggggggagcccgaaacagccctttgcagctctgcaccaggagcaggttttgcggaacccccatgtaaggcttccccggggtggggtcctcccagccgtgggcctcagggtgaccgatcacagggagagtggctccctgccctgggcaccccctgcggtggccccgacgacagctgaggagtgaccacaaggtctctgcccacagtgctcggggtgcggtgtctgggctgcgaagtggatccccctttcttgggcactgcagcagcttggggggctttttggacgtggatgtgcctggtcctggttttccgagggcctttacagtggatgaggaggtgaacacaggagtcctgagagcaagcaccacctcgggctttgttgtagaaacaatggcccggaccccaggctggagccgtggcttggcctcctgggtgtgtcttggcatctgaaatgcaggctacccacaccggctcacctccaggggtacaggcaggtcccacagggagagcttggcgctgagctgaggctgtctgggctcctcgcctcccaaccagtctgcagttacaggggccagtggggggcgggtgagaaggacgggttccctcaggggagccggccggagcccg

SEQ ID NO: 17905 - DNA, 1716 bp, Artificial sequence
  DNA replication origin
tgccagccgttgctccagtctgggcagaaggggttaggtgagggcctcccagcctcggctgcaggggtggtcaagccgtcgtgtttgcacattcgctcctgcgtctcagtgtccgcagtgaggacaggggtggtaaagagtgctgcggtcacgaaggacgcttagctatggacagtcagggtctccatatcaagccgcgtccaaaatttatcaaatgtgcacgtgtgggggtacatagcacacgctgtgtccaccgggggtgcaggcttgggaggagacagaagggcagcagggacaactgtcacatttacaatcccccacgtgctgacttcgtgtccgcagagcacacaaatggaggggctgtgaccagcctccgcgcccagcggcttgacgtcctccggagcctctgcttggagttgggcggccgggccgagggcccagggcaagcttggggccctcactgagggtcggccttgtgctgtcccgtcaggccatagccacgcgggaggagctgcacgcacagcacgcccggggcctgcaggagaaggacgcgctgcgcaagcaggtgcgggagctgggcgagaaggcggatgagctgcagctgcaggtgttccagtgtgaggcgcagctactggccgtggagggcaggctcaggcggcagcagctggagacgctcgtcctggtgggcctggggcctgcggcagggaggggagccggcgcgtgggatgcagggccaggggagcacggagcctcagccccggccttcccgacccaacccttctctgtgacgggccccaacctaaccaaacccctcctggcagtggggtgagggcacacgagcagttcagggtcccagcaggaagtggggctgcagggccggggtgggtcctgggcctggccatcaggcagcctagcaggttgttctgggcatggagggggcctggtgtggctgagggcatgcccagggctccctggaggatcccgctctgtgccctgcccaccctgtgcctggggagccctctgccctcacagcccacccaccccattttctatgaccacagagctccgacctggaagatggctcacccaggaggtcccaggaggtgagtgagaccccagccagcacgaggctggccttccttcacctggggtcctggctgagctgccaccaggcatagccccacactgcccgtcacatggccctgctcggtgggctgggctgggtggaggaagagcaggtggccaaatgctaaggcctctgatggctcaaggggtaaggtaaggcacggacagtgcccacctcctggccgcccaatgtccgtctgctgggcacctgagtctctgagaagctctgtgcagggggtgacggcaatggctgcacccagctgagggccaagggctggggtgggcagtgtggccgggtccagtccttggcgaagtggcctaatgggacatcttgactctctttggaagctctcactcccccaggacctggaggacacccagctctcagacaaaggtgaggtggggacagcagtacacccagaggcctcccagcttccccaagtgaggcccatcttcagcacaggcagcccgtgccgcaatgcctgtgtcaacccccacaacccccactccacagacagggaaactggggctggggataagtaaaatggtcaaggtcacctagagaacaaactacagagcccagctggaacc

SEQ ID NO: 17906 - DNA, 1579 bp, Artificial sequence
  DNA replication origin
aaaaaagtaaacgatgatgaagtcaatacttccccaccccagcctactgtcagggaaaaccgtgttcaaccttcccgctccaccttacagacttacctgtcatctatccatgtatccatctgtctatcatctatcacctatctatctatttatatatttggttttgttttacaaaaatggaaacattctgtcttgttttaccagtagctttttttaatcttaaaaaaagcttggctggacgtggtgtctctcgcctgtcatcccagcactttgggaggctgaggcgggcggatcacttgagcccaggagttccagagcagcctgggcaacacggtgagatccctgctctacaaaaaaatgcaaaaattggcctggcgcggtggctcacgcctataatcccagcactctaggagggcgaggcaggcggctcacttgaggtcaggagttcgagaccagcctggccagtatggggaaaccccgtctctactaaaaacacaaaaattagcctggtgtggttccgggcgcctgtaatcccagctactcaggaggctgaggcaggagaattgcttgaacccaggaggcagaggttgcagtgagctgagatcacgctactgtactccagcctgggtgacagagcgagactccgtctcaaaaaaaaaaaaaattaactggtcgtggtggcgcatgcctgtggtcccagctatttaggaggctgaggctgcagcaagtcaccattgcgctattgcactccagcctgggccacgggagtgaggcctgcaaggcctccagtgctacgtgctgtgagccggatggagcgtcgcggggcagggctgtgtctgcttcccatgccccgtcccaagtcccatcctggaggttgtttccaatggacaccattgctgcttcggctaaatgctggatggcactttgtccacatcaggagccttaaaacgagacccctggggctacaaaggaagccccggcccccatgagagcagcccaggctcagagctcctgtctcagccccacctcagcctcactcgcgcctggcccacgccaaggcaggggaaaagggcagatccagctgtgcccccatgggggttggtgtggctcccagggcgggggctcccacgggacttcccgggagcgcgttggccagggattagggaagctgccagccgttgctccagtctgggcagaaggggttaggtgagggcctcccagcctcggctgcaggggtggtcaagccgtcgtgtttgcacattcgctcctgcgtctcagtgtccgcagtgaggacaggggtggtaaagagtgctgcggtcacgaaggacgcttagctatggacagtcagggtctccatatcaagccgcgtccaaaatttatcaaatgtgcacgtgtgggggtacatagcacacgctgtgtccaccgggggtgcaggcttgggaggagacagaagggcagcagggacaactgtcacatttacaatcccccacgtgctgacttcgtgtccgcagagcacacaaatggaggggctgtgaccagcctccgcgcccagcggcttgacgtcctccggagcctctgc

SEQ ID NO: 17907 - DNA, 1276 bp, Artificial sequence
  DNA replication origin
gcacagcctcatgaaggccgaggacgactgcaaggtggagcgcaagcacacgctgaagctcaggcacgccatggagcagcggcccagccaggagctgctgtgggagctgcagcaggagaaggccctgctccaggcccgggtgcaggagctggaggcctccgtccaggtggggccgtaggcagggcaggtgcagcccaggcagggcagtgggggccttcccagccaggccattgccttttgcccccttcaggaggggaagctggacaggagcagcccctacatccaggtactggaggaggactggcggcaggcgctgcgggaccaccaggagcaggccaacaccatcttctccctgcgcaaggacctccgccagggcgaggcccgacgcctccgggtaggagggcaggcggggagacatggcccctggggtccaagccaggctggacgggctgagctccgcccactccgtgcctggaaggtggggtgtggagaccccagtgcagcgcctccactcacccactcctggaggcacagtggacggtgccctctccttgcccgcctgccccccatggcaaaggccaacctctgggctcatggtgcctgaggcacagcagtgtctgaggcctgccggagggccctgtcctgccgcggtctggaagtgcagggctggtaggggcctggggactcctatggcctcccccgacatcccaactggcctgaccacatgcttctgagcccctgcccggagtataccccaagggccagaatggggggcctcaggcctgtgggggctgagctgccgccccctgcagtgcatggaggagaaggagatgttcgagctgcagtgcctggcactacgtaaggactccaagatgtacaaggaccgcatcgaggccatcctgctgcagatggaggaggtcgccattgagcgggaccaggtgggcactcgcaggggcaggacaaagcaccccactcgcgggtgggtgcaccagggccacggcccttgagggcagttgtcagaggatttttaatctttgttatttgtttttgagatggggtcttgctatgtcacccagggtggcctcaaactactggcctcaagcaatcctccggcctcagcctcccaaagtgctgggattgcaagctgagctgccacacctggtctgttttttaaatgacagaagcaatacttaacactaaaaaaaagtaaacgatgatgaagtcaatacttccccaccccagcctactgtcagggaaaaccgtgttcaaccttccc

SEQ ID NO: 17908 - DNA, 2903 bp, Artificial sequence
  DNA replication origin
agggatgcctcatgatggggataacgaggataacgacacttctggaagggacgtttctcccccgtgtgcagctgggtggtggccgatgccatggcccctggcaggctgctgtggcctcctgggctccataaggtgggctgcagcccttctgtgaccaaggcgtgtgctggccatgccgtgtggctgtgtgcccccctgcacatgccctgccccgctgtcctgagatgctggcgagggcgagggtgttcgcacagagcaaagcatgccttactgaagaagtctccagaagcctgtgaccaggtcaaagtggctgggtgcgggctggccttgtccagccccctgggggtctctgctgtctcttctacttgccaggtgccagggctgggcctctggggcatccccaggacccccagcccccggccaggctgggagggctgggagcagctttcctctggagggcagcggacttccacttccgtctgcctcttggggcctcctgggctgggcgaatcagaaagcaggtcaccagggactgtccccctgtgggaggactggcgggactgtggagttaagcagaacccatcaggaagtgcacaggcgtccggcgtgctcctccctccctgcagccccgggcagcatctcccagaggctccgcggcccaggctcctggtgtgtctgcagtgcaggtggctcctggaagaccctcaggtgggtgggtctggtgctttctgaaaggtggccaggaaggttggcgttggcctagttcaggatcctggcactgatcccccagagcagcctgaggcttcccacaggcagccaggcagcctccgccatgcggccccgtccctttcacggcccctgggcggagatgtgttcatttcagtggaattacggtggcagatgggaccctgcatttcaagctggggaagcaggaaaggggcccagtgttcccaggactgtctaccgtgtggccagtgtttttattcagtcccttgtctgtcaaaactgtcctgaatggggtgacaaagtgcagcgggaagttgagaaatgcctcaaaagaccaagcctggggcaactatgtctccaggagcagtgacccagctcctctgggctggaaaccagcgtttcccagcggggctggaggctgtctgaggaccacgtggctgctcccagccttgccgcagtcccagtctcagagggagtggctttcagcggctgaggcccccaccatgctggcagaaagggacagcagtggctggtcccaacatgggtagttctgttgcagccactgggatgggggccgggcctcatctggggcaggagaagagtccagggattcactggtgcccggcacctcaacctggagaaaacaccgcagcagcactcctggccagccaagggcaacactgacagcccctcccagggttgcggggccggcagggggtgacagagacacgctcctgtgggcagctcttcccggccagtgcagcgaccccgcagctgcagcagggctgggtggccactcttgcatcatcagcagccggccgtggaggagggagggcacagccagggatgtgagcaggcgtcggtcaggggaatgaggaagtcccacaagaaccggctcccccagctgctgtgctggtgggagggccactggccaacctgctctcacccagcttgggctggccatagtgccaggcagttgccctcagctcctctgcccattccagccatggaggtggctaaccttgcaggctccagggcgtgatgggagtgtccaggaggcagaggccagagggggtcatgctgtagggggagttcctctctcagaccccatctgtgcctcccccgctgcgtatctgggtgacatggatgccaacgggcaggagcaagggctgggaaaggctgcggaggggccctcggctggtctggtggggagcggggtcactgtgtctctgctgcctccctgggggatccagcgtggggatgggacatggagctgggcacctctcctggatgcccctgggctgatccccctcgatgccctgacgagagccctggcccagcgtctgagaaggagtgggagctgggcccgggtgggggcaggagccggcatcgctctcagcactgccccacactccccagcctgcctgctgaggccatgtcggactacgagaacgatgacgagtgctggagcgtcctggagggcttccgggtgacgctcacctcggtcatcgacccctcacgcatcacaccttacctgcggcagtgcaaggtcctgaaccccgatgatgaggagcaggtgctcagcgaccccaacctggtcatccgcaaacggaaagtgggtcagtgttgccccgcgggccccaggccccaaacccaaccacagagtcagctcggaggtggctgcacgctctgccaccctgaccctcaaccccaggagagccccgcctggctttgcccctggcctctgactgaggcccaacctcaaccctggcacgtggcccgtcccccagcctctcctgccggcttggtgctgccaagaggggcagcggggctcccaccgcagcgggggctcctgagacagccaaggggcgggtgggcagcacttggtccccagcctagtaccaagacccgcagggtacctcatccaagacccagaccacggcacacctcatctgcatgccagcctccacctgtccctgcccccaggcccacccaccccagccctctgcctcgcctgtgccccgcccccagttaggcctctctggcccgcaggtgtgctcctggacatcctgcagcggaccggccacaagggctacgtggccttcctcgagagcctggagctctactacccgcagctgtacaagaaggtcacaggcaaggagccggcccgcgtcttc

SEQ ID NO: 17909 - DNA, 842 bp, Artificial sequence
  DNA replication origin
tccctggccacctgggcctctccagggacaaaggccacactgccatccgcttctgcaggactttgggagagggcgtgtgtgggaggagctggggtgtctgtcctgcaggaaggctccggttccctgttcatattggctgggggctgccaagagctgctcaacgctggggccctggggccctgggccgcccgagtctcagtcaggggaggcagcagagtggccagcagccctgcggggccaggggtccctgctggcctgggaaggctcaccacagctggtacaggaacagggagaagcccctgggctgtgagcacccaggtgacaggcagggggacactggtcgccacatgtggccctcctatgtgcgtcaggctgaggggctggacgggcagtggggtggggctgggggctgcggggagaaagggtggcgcctcaggcaggccctgcttccgggatgcagcgggggcctgagactgtccgagaccactctcggggcagctcacagagatctggccggggcccagggcaggggcttgggaagcagcaggggctgtgccctcggcctctgagaagacaggagcgaggggcagggcttgcatggtggagagtctcttgtccttggctgaagtcccagcctcctgccaggagccagaagtgccaggtttggctgccgcgggggccccaggcccagagagcggtacatttaagacggtgggacccggggctgggcggccgtgtggggtgtgtggtagagggggctggaggatcacagacgaggagaccagcagctgggacgggagcaccaccgggccccgggtggcctccctggcacgggcctcctg

SEQ ID NO: 17910 - DNA, 783 bp, Artificial sequence
  DNA replication origin
tgatcaccaagctgttaacagtggttatttctggggacaatttcaatgacaaatgctttttaatttttttataacaaacgtgaatcatttttataatgcagaaaaaccaatatgggttcaaaccacgccccctcccaggctactttggaaggtggtggcaggcctgacccagtggcacagccagatcaggccaacagttaccgagatcgggggatcggcaggatccaagtcctcagaaggcagtgaatctgtcagaaacacaagcaacaccgtgttggtaaccagcgtcttgggcagggtgggggcgcagctcaccactgcttcttgggcagacctggggttgtgaggtagtgacagcgcctcaggctgaggctggcggtgagcggaccttccctccctgacagcggggtgggcactggaccaaggccgggttagccagatagagaaaactctgaccacacactggggacctccaggcacacaggacaaagctacacagggttcactggatggcacaagctatctttactggagagacagggaaagtttagcagaaaacggacctctccttcaggagcttagccggtcagatgggaggcacggatgtagaggccctcaccacaggagaaagatagcaggttgcctcagaggcaggccctgggtctgggagaggtgggaagcaaggctgggggggtctcctgtcagggcagcagctggtggggttggggtaggctcagaagctaaagggagcatggaggagagcatgtggggaggggagcatgt

SEQ ID NO: 17911 - DNA, 1489 bp, Artificial sequence
  DNA replication origin
ggagagccacgccaaggacgggggagggcgtttctctttgttgttgggtgttttgggctcccgggtctgtgctagtgattcctttagattttctctgctaatgtttcattctcccactctctctctagcgtccttctcccttcagacttcctggaccacagttcctaagaaaaaagcttgacaaacatttgttagtgtcaggcactgccacgttccaggcgttgttctggatgtacagagaacagccagccttccctttgggagcttccttcccaaccatgctgttagtgcctgccacctgggcagtctcagtgtgtgtctctgtgaacgtttctcaaatgccctctgtggtccggctctgtgtcatgggagagcaggatggccaaagtgggtcacgggctgtgtccttgccctgtagtgactttgccactgcaccccacaccttctacgctgggtggccagtttccatgtggcttggtgtgggagcagagacgggacagtggggcctgtccttgttcatccactccctgcctgtgctggttgcagcctcagagcaggcgggagatgttcttggggcttaggctcctggcagagcacatagcaggagtttgtggggtctgaggttcctgtcccagggttccccgattctgtgcctggcctattaatctttctctggggagcccagtgcccactgccgagcaggctcctgccatcccccatgggcgggtgtgtctgaaggagaatgggatcccggcacggtcttggtttctaacatctcggggtgtgttttggaggcaggcgggagtcatggatgtagatgctgaaagagagaagataacacaggagatcaaggagctggaaaggattttggatcccggctcctcgggctcccacgtggagatctcagaatcaagtctcgagtcagattctgaagcaggtaagccccttgtacctagcctcctggggtcctggtaagaacagctggtctgcctcctgggttcctctcaggcacattagggagtgatggtagccgggtgtggtttctcaggcctgtaaacccagggactcctgaggctgaggtgagagcattgtttgatcccaggagttcatgtccagcctggacaacgcagcaagaccctgtctctaaaaataataataataataataaacgatggctggtgctgcttggaccagacccaattttttgccaacactggtgtctttctgtactccagccagagagcttctgacaattcctcctttgctagcccctgaaccagctggctgtgtgtgtacactgggctctaggcatcccagggtctgggcctggcctccttgggcctgtgcagggcttctggagtggaccatcctgggaggagggggcaggcctgaacctcaccagatggcagtctggacagtccatgcctggatggtcaacacagctcacacccctaggatctcttcttctcacatgtgcccctccccacgt

SEQ ID NO: 17912 - DNA, 903 bp, Artificial sequence
  DNA replication origin
gcgtgcgtctcggggactgcgccggcgattccgcggtggccgagcctcggagggggtttccccagttcacgcagcgagcaggaggcggaactgggcctgggccgggtctgtctcccaagccagtgcctaaacgcccatcgtcctggcgcatcctggggttccctgggcccagccgagtctgggtggcgtccccgcagctggggctggagggaccgcctgctgcgctccgtcttggtgggcagccctcatgaccagcccttgggagaggggtgcggggagagggacagcccctgatgtcagtggctcagcacgtgtgactttgacctccttcctgctgatcattgctcacctgagcgacacggggagggggaggcagcagcctcgtgtgaggcttccagaggaaagcgtctccgccggcccggaggcgctgaaccagcctgcggtcgctgccagctctgcctctggccggctgttaactgagtttacaggttcacaagcatttcgggcataaacaaggggctttgtgaaggagtgaggggacctgggctgctgatgcggctaacggtgctcgcgggtggatgctttggttttgttccagttgggcagggccccagtcagcctccagcagggagagccacgccaaggacgggggagggcgtttctctttgttgttgggtgttttgggctcccgggtctgtgctagtgattcctttagattttctctgctaatgtttcattctcccactctctctctagcgtccttctcccttcagacttcctggaccacagttcctaagaaaaaagcttgacaaacatttgttagtgtcaggcactgccacgttccaggcgttgttctggatgtacagagaacagccagccttccctttgggagcttccttccca

SEQ ID NO: 17913 - DNA, 1804 bp, Artificial sequence
  DNA replication origin
tgggggttctggtggacgtttcaagtggcattttgtacaatgcaggttagaattcaggaatttcaagtatgtgcccgggtctgtcaggtcccagttgcctttctgacggcccccctcagagggacggcgatgagcactaaatgcttttttgactattttcctatagattttttttaaaacttttttttcctcctgttccaattgatagctttcttatttaataaattctgtagttcaccgcactgtctcttctctgctgacttagccagtccttggagaacgccgtgggcttccacacctcacttgctcttgccctaactggtgccttgtgctggcagattctctccaggtcctcagcccttggggttaggggcagactcagaccactgctgcctgggcctgaccactgggacccacacgtgatggacgtgtgagtcacgcagctgcacgtttcagagctggacagactggattctagcattggatcatcttttcggatcatgtggttgaatttttcaaacaaggcgtctgaattgctagacccctagccttagctacaggtgaaggccagagctttccagcagtcactgtggagcggtcctgctgcgtagccctatgcgcctcctgctcctgctggttggtgaaagcaggctctggattctgttggcagagctgacttgagacagggtgctgtggttgggaagtgccggaatgaggttctgagtgtataggcagctctgggagccctgtagcagcaggatgggggcatctggggaggatgcctcaggccacaggccttccctgaggccctttgggagagacagcatttgatggggtgggggtcacaaaggccagatcgccaggcgggtcccatccaccagatgcgtgtgaagtggggtggtcccctggccctcatgccagcagctcatggagcaggtggggcccagggaagcgcggtggggatgggcatgtgggttttgcgcacccctctcttttgatgtctgtgtttgaagcgtttgatagtaagaagtttaaaaatacaatttgtggcgcggtatttagtgcctgccttctgcctccagatttcaagcccgatgcagggactgaaacgaggcgctcgaggagcccccagccgcctggttccatcccctccatctgtttcttgccaatccctagctcccagtttggcctcacctgggcctagccctttgccaccaaaagcccacctcctaggtaggcagggcaaaccctctttatagttctccagctgatgcccctagctcaccccaggctggagtggaggccccctcaactggctgggcccaggatgtctttgcagcaccgatacttagaagctctcaggagccaggaactgtaggcccctgcccagctcccggccgagttagccctggcacgttcctgaaggaatgaatgcccacttaggggagggccccggggcagctctccaggccaggagaccccagagggtgtgcacaggtgaccagggaagcgagtttgtgtggtgcgggcccccaccctctggcctcagtctcctgcacgtgcctggagatcggcctggcctcggcgatcctgagcatgcagggcaggctggggaaaaagcctttcacgtagactttctcatccgttgcttaaccaaaccccaacatgtccgttaacagaggatgaaacaagcacagagaggtccagcgatggccgaaggtcacagccagtaagggccggtcttccggatcgtgaccaggtggccgggtgcctgtccctgtctgtcccctgccttgaggtcccg

SEQ ID NO: 17914 - DNA, 1514 bp, Artificial sequence
  DNA replication origin
tgcgatcaacactttactctgggtgaagactgcatatttaaggacacaactgcacatttagatcgagcggtggtgacctcagggtatacacggagcttcatgctgagaacacccaggggtcctcaagagtcttcctcctcgtctttaacttcagaaattctgtctatagatttaaggatttcggcaacaagattcagtgtctcagctccggaaaccagttgcctgaaaacaagcatggatatcaggatgggtggcagcagctactcagcagcaacagggttctggggggagaaaggggaggggttggtagggggaaaaagggaggggttccaaggggtagggaaaggggagaggttctgagtgggaggaaggcgagggtttccagggggaagaatggggagggtttccacagggggtggggggcagaaaggggaggggttggtaggcagaaaaaggggagaggttctgagggggagaaaggggaggaattccgggggtgggggtggggaaggaaggggagggtttccagagcggggagggattccacaggggaagggttctggcggggagaaaggtaaggggttccagggagaaagggacagaattctggggggagaaacagaaggggtcccagggagcaaggggtggggtttgccggggggagaaagggacagggttccagggagcaaggggtggggtttgccgggggagaaagggacagggtcccagggagcaaggggtggggtttgccggggaagaaagggacagggttcctgggagcaaggggtggggtttgccgggggaagaaagggacagggttcctgggagaaagggaggggctgggggagaaccacaggttttccactcctagctcctcttggaggagacccacacctgacttcacaggagacggctcccttgttcacagggagtgctctgggggccaacaccgccctgcagagctcagcccaatgggtggcagacactcaccactgtcacagtcatggtggctggcgtgtccccagccaggcacagcagtaagggccttctgggaagtggctttttcagcaggagggaaacccccactatttcctttattcagagcttcagcgcccacatggggtggggctgaggttcagtgcagggtgctgtggctgtctgcacctcccaggtgggatcagacactgcgaggcaggttagaaagcctgtggtctgtccacacagtgacccagagagctaacaggaccactgagcacgcgtccctccctgcagctccctggtcctccagccacggtgccatcagcctgggcccccacccaggatcactgacgaccactccaatctcacccctttccccgccaggcttcccggtgcctcccaggcactcacttgatggaagcctgtgcactgttcatgaccacccggaggttctgcagggccacgtcggcgttctgcttcaccacggtcaggctggcaccctggccgcaccgcagggcttcattctctcgctggaa

SEQ ID NO: 17915 - DNA, 741 bp, Artificial sequence
  DNA replication origin
ctggggatagctggcccacgagggcatccgtggggagtggggggccagagcacagacactgcacgatgagcccttcccaggggtggtctgagagtggaggcgggactgggaggggcacaggggctgtgaagggccacagccaggttgggtgccctcctgctccctgggttggggcccgtgtccggtatgaatgtgaggacatcagtgatgctttttgtggtttttcttttttgggtaacagaaacgggctgtaaaggcagaaaaccacgtcgtgaaactaaaacaggaaatcagtttgctccaggtaattaaaggaagggacttcagtgtttttctttgatttgtggagtcacataatgaattcagtaagaaagaggcgaaagactctgctggggtttcccctgagcccaagcagagaaaggacttcaaatgaggacagcagccgcttcctgtcagggcgtgaagcagagggaggccctggagctctgttgggagtttggggtctggcacggggcatccacttgtaggagtccctattgccatagagctaggtgctgagcatatactggagtgaaggggaagccattaggcccccagtcccagaggcgagcccccagttaggccagagcatgcatcttgagtgccaggcccccacgggtaagccctcgcctcgccaggtggtgactttcagccgggttgcctcggagctgctctgtccttagccgtaaccgtccccccagg

SEQ ID NO: 17916 - DNA, 1519 bp, Artificial sequence
  DNA replication origin
ccagaaagactcgagccgcccccgccccaggccgaagcctggttcgcctttggctcacctcagccgcgaacagccccaagaacccgagccccgcagcaaccgcgtcgccgccagcaccacagccgccatcttgcgtctccgccccgcttcagtcgtcacttccgcttccgcccacggcttcccctccccctcgccgacggcccaaggcgttcaggcacgcgctttcggtgctcggagcggaagcagcggcgagaggctcggaggcgcgggggcggccgagcggcgggcgacgggggcgggcgacgggggcgggcgacgcgggccgcggcacgggcggagccggggccatggagccgccgctgccgggctaggcaggtcgtgccccgccgggccggcggcgatgtcgggctaccagcgccgcccgggcgccaccccgctgtcccgagcccggagcctcgccattcccgacggtgagcggggcaggggccgagtccagcggtccaggtgggcggcggccgccccggcacgcagtaaagtcgctgttgtcgttgcttccagctccagcgttctatgagcgccggtcttgtctcccccagctaaattgtgagcgcccccatggcagggacctggactcccccttcttcggcattcggccggcctttatgtgctatgtgcccagcccggtgctggcttccgtgggagacacaggtgagagacgagggcgccggccccggggacgcttccagttcccgcgccacgtgtggcacctccgctgcagcacgagctcgtccattgacccatcaatgtgcagagcgctcactgcgtgccaggcactcggaattcaaaggcggagtcccctgctaggagctcacagtctggttgcggggagacctcccccaagacagacagttccagtacaggatggttagtgcccggggagcacaggagcccgcccgctttcctcgtggggctggagtcggggtgccttcacctagtgggcagtgattggaaaccgagctggagcattccatctgcctccacagccgggcagtggccagatctggttcgtcctcgttctacccaagcagaagtgctgctgggtgcccggggtgtgcaggagtgtttgtgtggttatgccaggatctgaggacattcgggggttgtcacaagacaagaggacgcgcttgccccggctgggcttcaaaatctgctgaggagccgctttcagaccacggacaccagggccagtctgcaagtcaggccatctccagggtcacaagtctgggagcttgtgttttttttaaagttttctcggctgaccgggcgcagtggcttacgcctgtaatcccagcactttgggaggccgaggcaggcggatcatgaggtcaggagattgagaccatcctggctaacagggtgaaaacccgtctctacaaaaaatacaaaaaaattagccgggcgtggtggcaggtgcctgtagtcccagctactcgggaggatgaggcaggagaatggcgtg

SEQ ID NO: 17917 - DNA, 1958 bp, Artificial sequence
  DNA replication origin
ccagcaccgggctgggcacatagcacataaaggccggccgaatgccgaagaagggggagtccaggtccctgccatgggggcgctcacaatttagctgggggagacaagaccggcgctcatagaacgctggagctggaagcaacgacaacagcgactttactgcgtgccggggcggccgccgcccacctggaccgctggactcggcccctgccccgctcaccgtcgggaatggcgaggctccgggctcgggacagcggggtggcgcccgggcggcgctggtagcccgacatcgccgccggcccggcggggcacgacctgcctagcccggcagcggcggctccatggccccggctccgcccgtgccgcggcccgcgtcgcccgcccccgtcgcccgcccccgtcgcccgccgctcggccgcccccgcgcctccgagcctctcgccgctgcttccgctccgagcaccgaaagcgcgtgcctgaacgccttgggccgtcggcgagggggaggggaagccgtgggcggaagcggaagtgacgactgaagcggggcggagacgcaagatggcggctgtggtgctggcggcgacgcggttgctgcggggctcgggttcttggggctgttcgcggctgaggtgagccaaaggcgaaccaggcttcggcctggggcgggggcggctcgagtctttctggacgctccgtcttcggtttctacaggtgacatggcgcccgtgggacgggctcgcacttcgggacactggtgtccccgaggcgacgggggccctgccttgctttgcgcctcgagcccggggacgcagtcccatctgtctctcctctccccggctgctgggtcctctccccccctcacttcccgggtcgacgggccttctccgaggccatgcctcatatttgcccccgcgcttcacctaccgcgtgctccttcaggaggctgagccggtgggggcccagctctgttagacccgcagggttctgacaccagggtccaggctctcggttgctgcggtctgtccgttgatctctgacgtttaagaaccctttccgtacccaccgctcctcccacccaagtgaccgggcctgcctttccccacgctggaactttgttccgacagcacaggcgtcgcccctccccacacaacgagcgccgtttcaggggtgcggaggtgctgcctccaggagatggatacaggctggagcgtaaacaaaatatcggcagtcgcgtaaatgctttggagtaaacaagcagcctttcatgatagaaaatagcaggaaagactagactggtgagggatagtcctccatcagggtgacatttaagggaagagctgaagaatgaaagaaggggtaggcatgggcaaagggcaagccctggaacggtgaagaagctttggggttgatgagtcaaatgtgttccaggaattgacaagaatcagtgtgaccaggacctatgggagtgtgggggttcaagagatgagtttggagagggagacagaggccaagtcacaccccgccttcggaccaggttaataagggatatggcttttatccaagacttcggtggtgctgttggagggcagagctgttaagtgctttatgtgtacaaactgcacttagagtgagttactgttaataagccctgtttttacagagatagcaactaagacccaaaggacggaaccagcttgctccaggtcccgtggctgagcctttgttgtcagcctctgctttgtcttccaaagtctgtagaaataagtcctgtagaaaggcagatgctcacttttaacccagacaaaacataactaaccgcacctaacaggtcatcacaggtttgttgtctcaagcctgttgtaactgggccgctttctctgttttaggtttggacctcctgcgtacagacggtttagtagtggtggtgcctatcccaacatccccctctcttctcc

SEQ ID NO: 17918 - DNA, 956 bp, Artificial sequence
  DNA replication origin
cacgtacgacagcacctccaagcagaggacgccctcatacacggtgaggcctgcccaccgctgcggtgcagagtgcttccagggcaggcatctcccacagccgggaaccgatgcctggcgtcaggggtctgagcctggacggcctggacttgaaactcagctctgcaccttggccttgtggcaagtcccctttggtggagaacggcgccctctccatgggtgttttcaaggctgggtgagccggctggcacacagggcaccagccatgccctcgcctccggcctgcagagcctctgccctctgcccgttgcaccctcgctcaccctcctgccaggcccatggctgcatctctgggcatgtcccgatatctggatatctgctggaagcctcaagaagccactgaggcagggcagggtaggagcagccgctgtccacagggtctctccagcggcgagggacaggccctggcccagctggccacagacgccaggcaacaaaatgggcatgagtgtcaggggtcccagaaggcttccttgtggggggcgcttgagaacagcagggaggtgagcgggccacgccccacggctcctcacaagtaactggacctcctgcctctgcaatcttcccaaaggaccgcgtcttgtacagaagccgccacaagggtgacatctgtcctgtgagctactcttcctgccccgggatcaagacgtccgaccaccgccctgtgtatggcctcttccgggtgaaagtgaggccggggcgagacaagtcagtgttctcccgctcaccttcccccttgggcctgggggtcgtgccgtcgtcccatgagctaagagggtccctgtcatcgtggggttccacttggggctttgttctgggaccttcagggctgtgttccccgggatcggttggactcatcctggagcaggagaaggcaggaaggggagaggctctgg

SEQ ID NO: 17919 - DNA, 1233 bp, Artificial sequence
  DNA replication origin
ctcctcatctccctccacgcccgccccccaggccctcacctttcctcatctccctccacgcccgcccccccaggccctcacctttcctcatctcccgccacgcccgcccccccaggccctcacctttcctcatctccctccacgcccgcccccccaggccctcacctctcctcatctccctccacgcccgcccccccaggccctcacctctcctcatctccctccacgcccgccccccaggccctcacctttcctcatctccctccacgcccgccccccaggccctcacctctcctcatctccctccacgcccgcccccccaggccctcacctctcctcatctccctccatgcccgcccccccaggccctcacctttccgcatctcccggatgagctggtcgtgctgcagcagcgccggcacgtccaccaccaggccctggcacaggagggcgtccacgactgtgcgcccgccactcaggcggaagttgaagtctccaaaccagaacacctcatcgaagcgggtggtgacgtccgctgcggcacagtgggccatgtgtgggcacaggcagagggacggcaggtccttccccttccccagaacatggcctgggagtggctctcaggggaagtgggtcttgggcgccagccggtggggccgggccctcaggggtgggattcgcactgggacagttccagaaggcacctggagcagcctcaggagcagacgatgcccatggcaggcgatggccacgtccctgctcctctccacacagccaggggaggcggcggggcgggcagtggcgaggaccaggacccaggctagtgggccacgccgagtggacaggatccgcccaccccactaaccgtgctaaagaaccgcgaggggccatgcgctgggggcactggacgtttcggccctcgcttcccaaagctcaggacgctgcctcttcagaactgccctaaaaacgacgggcgcccgtgtgcgaaccacggcggcaccacccacacgcagcgtggacgccctcacctgcgctggagcgataggggttggtgtcgggcacatttctgggcaggaccagggcttgtacagtcctggtgtagtccagcagccgctccgccaccttcccgtcacctgctgtgggaacagaaatggggtagggaccacagggttccggatgctcgagtctccctaaagcgccgcacctctggactgtgccctgactgcgcacccc

SEQ ID NO: 17920 - DNA, 1184 bp, Artificial sequence
  DNA replication origin
gctgcaggccctgcagtgcctgcccaggggctgccgtctctgaagcagctgggtgctgagacctgtggtcatggctgggcacgggtctgcagtgcctgcccgggggctgccatctgtgaagctgctgggcgctgatacccggttcgtggccgggcacagatctgcagtgcctgcccgggggctgccgtctctgaagctgctgggcgctgagacccgggtggcggccgggcacgggcagcctccacgcctgggtgggaggcatgggtcagatttttttccagtggcaactcggagagtttaaaatcaatgagatttgattttggtaacaaactgttggcgtgcgagagtagaagggcagccggagcagggccgggccccaaggcctcccgggcccccatgtcatggcgggaacagcaggtggctgccgcccacacaggtgctctgggggaaggagttgaggtgggccccacctccctggcccatgagtccctcaggcgggaggagctctgctcactggggtctcggcgggggtccaggggagccactcaagtggaactggggcctgtggcccccggcaggtcccaactctggcccaccaggccttctggcaattgcttctccgcgcaagacaccaaggccaggtcgtggggtttccctggtagctcctcgaggggctctgggcagcaggtctgggggtggcggagctgggaggccatgtcccccagccggccgtgcttcctcctctgcaggcgggagtgggagactcgtctgcaggagacgctgggcccgcactatgtgctgctgtcctcggcggcccacggcgtgctctacatgtcgctcttcatccgcagggacctcatctggttctgctcaggtgggcgcggctggaggggtgggcgcggctggaaggtggcagcgtcccacaggtgagctgagggctgcccctcccacagaggtggagtgctccacggtgaccacacgcatcgtgtctcagatcaagaccaagggggccttgggcatcagcttcaccttttttggcacttccttcctcttcatcacgtcccacttcacctgtaagttgcttggtgcccgcaccgcaggtgctgtgtgagaacagcttcctctcctgaccgggaccctgtccaaggcaggggtcctgaccgctggcttcatcttccacccag

SEQ ID NO: 17921 - DNA, 1153 bp, Artificial sequence
  DNA replication origin
cctccccgaacagcaccctgtgcccactgccttggcttatagtttgggagctcctctctgtggcttttccaggatcccaccaccaaaaagcccaaaccgtcaccctctcatgcctcttcccgggaggtagggagggggtgtgaacccgctctgggtgtttgtgcaaccaggtcaggccttgtgttcctggagagcagacagcagtgccgcgggggccaggagagtccttgcttggggctgggggcagctcctgacattccatgggttttgctattgtccctggggacctggcccagacccccagggatgtgtcctgtgcctggccctgagcttggggtcctcccgtcacaggagttacctggagggcagcctcctggccagcggggccctgttgggggcggatgagctggcccgctacttcccagaccggaacgtggcactcttcgtggccacctggaacatgcagggccagaaggtgagtggctgtgggtggtgctgggcggggaagggtggggtggtgctggacaaaggcgggtgagggggacggggcagctctgtgcctcatcctggggccaggagggcagagccccgaggtgcaccccactgctaaccgcagtacaggagggtgagagtgggtaaggacccccatcccccagagctcccacctgcacctccctggccacgtggctgcagaaagtaggggagggggttggggcaacgggcctggccgagaatcacctgctcaaggtgagcgggagggcggccagcggggcacgcgtaggggtggctcagggacagggtgggcagcacgggctggggtcatggtgacgggagggtcatacaggggtggtcgttggacagactcgtgcttggagagggaaacaggccgagggccaacgtgaggcgtgtttggtgtgtcagaggctgcctcggagaccgggcagctccctttttggccctggcctcagtttcccctcattcggaggagtcgctggtactcaaggcaccgcagtgggattcacccacaggcgcctgcaggtttcgggaggagccggcccaccacatgctccctccttccaggagctcccgcccagcctggacgagttcctgctcccagccgaggccgactatgcccaggacctgtatgtcatcg

SEQ ID NO: 17922 - DNA, 930 bp, Artificial sequence
  DNA replication origin
ggtcatgagttacaacggccccaggacaccaacacagaaaccacctcacacctctcccttctcacacctgtcctgcctcccgccgcggctgacagacaagacttgggcaccatggcagtggggtggggggaggaaaagaagggtgcaggtgactctgccaagtcatagtgggagcatctcaggacaggcccccagactgagaccccaagacaagaccaggcttgggagaggtcatgggttcagctgcagttccttccagcaacagctggagcccaccaaaatgttcctcatgagcaagtggctaaacgaaagtagcctcaacacatctggggcctcttgccgcagaaaaaaacaaagggggcaggccgggcgcagtggcccacgccgggaatcccagcactttgggaggccgaggccaggagttcgagaccagcctcgccaacacggcgaaaccccgcccctactaaaaatacaaaatttagctgggtgtggtggcgggcgcctgtaatcccagattctcaggaggctgcggcaggaggatcccttgaacccaggaggcagaggttgcagtgagccgggatcgcgccgctgcactccagcctgggcgacagagagagtaacaaacaaaaacaaccaaaggggcggatcgtatacattgacgacatttcccaagactaaacaagaaaaagcgccagatacgtaattgtatgcaggatgccatcctgtctaccttaacacaacgtcacgcccacgaatggttctgaaacgcacaggaaaagttctgggaagggcgctgctgtggggtggggctgggagatggggtggctgcgggagacccgcttcgttctttccggttaggcatcttaaacgctgctgatgggaacggtctcacgaggttccagcagcctgaacactacaacgaaggcggcg

SEQ ID NO: 17923 - DNA, 1806 bp, Artificial sequence
  DNA replication origin
gtcatgctgttgatttcattccaggcctgcgccacctccgggagctcaaggctagggaggattggccagaggaagcacctggtgctgaactaggcttgccctgctgtgaacttgcacttggagccctgacgctgctgttctccccgaagaacccgaccgacctccgcgatctccgtcccgcccccagggagacacagcagtgactcagagctggtcgcacactgtgcctccctcctcaccgcccatcgtaatgaattattttgaaaattaattccaccatcctttcagattctggatggaaagactgaatctttgactcagaattgtttgccgaaaagaatgatgtgactttcttagtcatttaggatgatttaaggatatagtattcctggtcatttaagaatgttcattcattgaagccggagctgtctctgccacaggagagccacatggtcggtagtaaccagggcctctccaagcccagctgtgagtcactgcccagtgagtcccgcgcttcctttaaggtgctgggagcaaagagagggtgactgaggcagaccccaacccctgctctgcaccatctgggccctcgccgtgtttgaacctggctgaatgagtggagggcgctgtgttctcaatcagcgcctccgaggagccgtggggttccttcggcattagttcacggtttttgagagaggccttagttactgcagtgaatttctttcctgttgcaaagacgcttccagcctcactttactttctgtggcctgatgaggaccatgggtgattttgtgtacccaaagcgctggggactgcccaccgtgtggcccagtcactgggaaggagccccagagagccggctgtctgacatgatggctcagggtggtcatccaggttgaaaactgaccgtgtgatgtttgatttgggcttcatttcgtgtgtaggagcacggttagactcactgttaaggaagctggatgcacttctctaaaaggctgcactttccgtgagcacttttcgtggtacaatccacatgacccactttctcccctgggggacgttggttcagaggttggtagcacttggggagagtatcttaacacagtttcttgacagcagctctggaacttagtatttctgccccgagttttgccacactgagactttgagtagctcctggtggactcaaccctgttcaactcagagacgggcctcctctcactgatgcaaagctttaaggcttctctgactgttctgaaactcttcgtattcttgtcaagtctaaagagactgaagaaaagatttaaatactaataaaaatcagtagataatttctgtaggttctgctggaggaatacaaactgtttggtgttttaaatttaagtgtagaaattgtagaatgtggaattagcacagatccttcctggctttctgtttcacttgatcatttagcccagaccacccaggatgttttccaaaatgttccacaggcgtgtcccgctggatccatttgtccttgtcacttggagaaaggccagtccctgtgacggggcagccctctctgtccctcggtcagctcgtgtgaatcctgggacctcttccggtcggctctgcccgctgttctggggtcgactgccacgacttttgattcaagaagcttcctccaggcgggagcggctatttttcctaaatgagaattgttacattgcaaattgttgaataaaatattttgcgctccttcaagcaccttcacctgtggttccctttggtttgctggaagcgagtgagtgcaggtgtccgcaggcc

SEQ ID NO: 17924 - DNA, 988 bp, Artificial sequence
  DNA replication origin
tgtgaagggctgaaagagaacgcgtctgggccgacgagccgaggggcggggccaggggcggggcgcgcgctgatgtcgtaagccggacacgtcggcggcgcggcggccgcggagacccgagccggatgtgccaagatggctgcggcggctgaggtgtctgtgctcgtcgccagcgtcgggtgggctttcgcccgcggctcctgagggatcggtctcagccgcgcgggtgagggggcgagcgcgggtgagggggcgagcgcgggaggaggaaggcggaggccggccggcggagccaggccgtggaggtcggggcgcggaggagaggaggcggctgggcccagccccgagcgggcggtgcatctcgggtcccgccggggccggtcgaggggacagacgtccgggcccccgggccagagcggaaggccggacgcggcgcgggccgccgtgggactcgagggactgacgtggacccggctgggctgcggtgacgccggttcccggggcgggaggctggacccccaggcacccctcgtaagactcttaacttttcaaatgagcgtgtcttgtcctcaccggctagaaggcttccttagcgatgctggtgaagagacacatttacatttgaaccaaagagcagagttgtttgtttgtaatttcttgattgggcgatcaggatgttgcaacagaggccgagggttagaggagtgtgtgtgatccggctcgcccctttgtgatggaagtgttacagtagagccttcagaaacatcagagccatttaaagtcagtttttgccgcttaagaacacttttaaatggcttgtaagttgggtgtggattgtatattaagattttgttttacatgtgtgatgccgatgttaaccaaagaggtatttcccatcccccatgtggcaatacgaagcaaacggaaccgcagacggttcttcctagaagtgatacttttgcaagtttcagcacaatgcagcctccct

SEQ ID NO: 17925 - DNA, 846 bp, Artificial sequence
  DNA replication origin
gggacagtagaggatgcgtcggggaaaccccaggacgctggccagggactggcggcagccatcgaccaacttccggcgccgctcggtgcccgcggccacgccgtaaccaggcaaccagcgcgcaggcgcagtcggccctccgcgtcccgcagctccggccgctcccggcgcatgcgcggccgccgccgcctgccctccagcctcccagcccaacggaagaatgcgaggagcgcgcccgcgtcagggccccgcgcttctcagctgggcggagtagccgttctcggtgcgtgagcctgctggcatcggtcctgcagactgatttcccgcttgtggccttgattgaagaatcccatctcttctcacatcttaaaacgaaaaaagactgggagaaagagccagcgtaaacagggcgacgtactgggacggccccggcgcgcctggccgggcaggtggcgaggggcggggccaagcggtgaggcggcagacggacgccggaggggggcggggccacgggcggggaaggacggccgaggggcggggccaaaggggcgggaacgacaggatgaggcggagaaagacggacgacgggcggggctaagggggcgggacgaaagaatgaggcgaggaacgacggaagaggggcggggccaaggggagcgggaactacaggataaggcgtggaagacgggcggggggcgggacgaaagaatgaggcggggaagaacggacgccggcgaggggcgggggcagagggggcgggacagagggatgaggcggggaggacggacgccggcgaggggcggggccgagggatgggctgtgaagggctgaaagagaacgcgtctg

SEQ ID NO: 17926 - DNA, 1164 bp, Artificial sequence
  DNA replication origin
ttgtccccagctgggccggcggctggtgagggagggggtgatatccgtgccacgccagcagggccgcaggcggtgcagggagagcttcagtccggctgacgtggcaccagggccaatctgctcagctaacatttgcctttcaggagtcagattcctgacctgtttgaacagagttagggagcacgtggtagggcccagccccagccccgctgcccccatctgcttcttcccagtggtcgaggcgctctgcaccctccgcggaaggaggtgtcattgtttgccctttccaaagagggggatgcagaggtggatgctgcctctcaggcgtggggctcgccttttgccgctcgcgagttcaaagaacccaagagccaggagcccagggctcgaccctctagggtcctccgaaaccctgtggtcccaccggggtgggcactaagctatgggagagaccatagctgcagaaaccaaccctgccctaggcataaaatgcaaggtctctggacctcagggcagggatgttagacagcggcttctgttggctcctaggggtgtgaatcaccacatcacctgcagggggcgcggctgtctttcttccccctcttctccctaatcctgagtgcacggagacagctctcagcagtttgtagcctgatgtggagtggagggttcctgcaccctacacccgagcccatccagcctctgggccatagacccttccgttgaaggcccagcctgcccctgagacgctgtgtgccctttttcaacttccttagtctctgagcatcaggtcttcatctctaagatagagcaagatgagcacctaaacgtttcagggctgaaatggggttgccaggacaacaagcatggcaggggcgaatggggacatcaggtgactgactgcgagccagcagaggcctccacccagtgctgggaggtgtcccgccggtggtggccatcactattcctggtggggctttgctgcttttgcctgcagcatccgctggtttctccattctccaagtctctgcccctgctcacacctggaggctggacacaagtgtcaccacttccctgaacccccctaggtgggctggaatcagcatctggtgcaaagctctgtgaccactgctgtaccacattatgcagagcacacaggacagg

SEQ ID NO: 17927 - DNA, 1264 bp, Artificial sequence
  DNA replication origin
gaaattcagggcccctccgctgctggagcccaggacggtgctggtgccagaggccacaggcaggtgggagagacgaggtgggccagtctcaaaggccagccggccgcccccacccagcgccgccatctcgggcttggccgccacgttcaggtgcccgatgcccaggtgggtgtcgggcatcccaggcaggtggttgaggggcacggacggagactgctggaacggggagggcagcagtggcggcgaggccacgtctgacaggtagccatggggtgactccagggagtccacgggcgagagcatgccggagctgtccagcaggcagcccttgccgtcctgggacttcttcctccgtgccttgaggtccttggcctccttgcttccacaggccaggcctttgctgctgggcttgcggaccttcttgccctgcacgccgggcttgaggctgcccaggtagccgttgggcgagcagagcgggggcgacagggtgggcgtgccccccagcggggctccgtgcagctgcgggctgcgcaccaggttgtactcgtccagcagcctcacgatgtcgtgatgcatgcgctcctgtgcgatgtcgcgcggcaggcggtccatatgatccgtgatgtcccggttggcaaagtggtccagcagcaccttggcggtctcgtagctgccctcccgggcggccagaaacaggggtgtctcctcctgggggatgagggcgggggccggtgaggggggccaggccaggcgtggggaccctccccaaggttccatcaccagaggaagcagcagtacaacctcctccgcggggtgggggcaggcaggctgctcctcaggaccccaccccagcgtcctgcaaccacctagcctgactcttgttaaatgttaaggctttgatacatcttctgaaacccacccagagaggggatctgtgcagtcctctaccctagatcagcggggctccacctctatgggggggtcacagaccccactgaaaatctaaccaactgcaggccctcttccctgcccccaataaggcacaaaaggaaattcctggagcggttcagaggcaccggcgagggcaccagggagggagctcgtcatctggacggccatcaagccaccctggtggccaccaagctccttcctggggtctcctctgtgcggtggacacgtcacaggtctgggtgaggctgctgtgtgggagtgggaaggggcttcccaggccttgatgccctctggggcccagtctctgtggggc

SEQ ID NO: 17928 - DNA, 2354 bp, Artificial sequence
  DNA replication origin
ccgctgcatgcggctgtgtctgccgacgcacaaggtgtcttccaggtaggcagtggctgcctgtgtgcccacctgccctcctcagggccgcctggtggtctggggcagtggccaggcttacgtggccctgggagcctgaccccgagcacagctgagtccgggacaactggtgcctccacctgggaccttcgcagtcagcgaggtgcgagggggagggcgtcgggcccatctgtgttctccagggaagtcaggcagaggcgggtctggcaggaggcctgggggatctgctgagtgaggcagcacctccccacccccagcaaaacaggctccatcagggttgtgggccttgctcaaggtccaggttccactgctgcagcccctcgcagccccgcccctccctcaaccttggctgccggcgtagcctgtggcagtgagaagcagggtttagaggctgccgctcggtgcctgcagacctagggctcagcttgccggtgagctcgtggcaagaatggatttagggatttggatgcctgggtctccagggagtgtccctggcaggggctgcctttgcagtcacccctgctgcgagtccccaggctccaggcggccctggagcaagcaggttcagatgggcacagcccggggagttaccacagagcttctcatttcctgatttcttagctcaggtgacacattgtcatctcgcagaaataaatgtaggtgagcagaaagagcgtggaagggagccccgtgcgggtttggtgtgtgcctctctcagctgccttctttgcacagatgtggaagttcccaggtgctttgcaggaatcaggccaagttgccttttgcacccgccagtgagcaggggccattcctcctgccagatgccaagacccggctgcattacaagggctgcccaccccctctctgggcagagccggacactagctcggcggttctgagacggctgtagggccgtgagcccggcttcctgagtgccagctgtaaccgccgttgggggcagggacttgacctctctgttttgtaggtggtcatggcagctaggaccacagtgaggattaaatgaggccacacgtggtcacgatggatcccactgtcaccaaggggcctgtctgtgggcagcacagcccctgcccccatccgggcccctcctcaggggcagccccatggcgtttcgtcttgcccggccgtgccgatctcaggagggtctcgtctgtgtccggaagacagtggggcttcccgtccaggcgttcgttctgggcaggaggcatcggtgtacgtctgcccagcacccgcctgagcctctccctgttgcccagatcctgatccggaaccgagccacagacctggatgcccgcatgcatgatggcacgacgccactgatcctggctgcccgcctggccgtggagggcatgctggaggacctcatcaactcacacgccgacgtcaacgccgtagatgacctgggtgagcccacgggggcacggctgctctgtcgtggggcgggaccgccacagggacgggtgggactgggttgcctccagctggtctccaacctaccccatctgcttctttcacgcaggcaagtccgccctgcactgggccgccgccgtgaacaatgtggatgccgcagttgtgctcctgaagaacggggctaacaaagatatgcagaacaacagggtgagcgcgaggctgggatgccaggggagacgtgagggctgaatccacagagaagtgagggccaaacccacggggcgcagggacacaagggcctgacccacagggtctcgagggtcgctgggcccgcatgtgggccccacccgcatgatgcgggcacctcgttagtgctcctgccttccttcagcccccgtttatggagcccttccaagtgcaggtccagctgtcaggacacggcggctcgcccctcagacccagccctaccctcctgggcggcagtcatggcggggcacacagcctggcgtggggaacgctgctgctgccactgctgtgtcaccgtcacctggacctcaccttctgtccccagctgtcaccaggcgggggtggggatgggaatgtggtgacgcaggtggtgcagattgagccagaacacgcgtggcggcagctccctgcggggcggggcctcttggtgtgttcaccaaggccaaggacctcaaggctcagaggaagaagtctcaggactatatccaaggggagccacccccagccctcatcctggccctgcagctcctggccctgcagctgctgttggtttcccctgggtgctcagggcacaggtgcagacacccccacctccctgccgccagaacccccacccc

SEQ ID NO: 17929 - DNA, 2100 bp, Artificial sequence
  DNA replication origin
gccgcccctgcttctgggtccccggtgggaggtgggacctggccgagcatcctcaccgggagtctgcccctcccgacccagggcccacctcccacgccaggcccgggccaggggtctctgggggcttcctagggagctcgctcagcctcacttctcgacccctcaccccccaggcccctgaagaacgcttcagacggtgccctcatggacgacaaccagaatgagtggggggacgaggacctggagaccaagaagttccgggtgagtcgcgaggctcccgggctcctgggctcccgggcacctgctgccgggctgccctgacaggctctgctcactccctctatgtagttcgaggagcccgtggttctgcctgacctggacgaccagacagaccaccggcagtggactcagcagcacctggatgccgctgacctgcgcatgtctgccatggcccccacaccgccccagggtgaggttgacgccgactgcatggacgtcaatgtccgcgggcctggtaagggtgccagcagccagggcttccctagccccgtggcccacctgcctctctcccctaagccccgaggctggggtacagttgatactctggaaacttagaattgggggtgagagctttcatccttggggtgtttcccattcagagtagacgtgggggggtcctggagtcctcctgttcttccaccaaccccttcctggggtgataccgcagggccactctgtccctgtaaattactcttttctgaaaccttcttgagacatggaaagcgttgattttctttttctttttttttttcttttttttttgtttttgagatggagtctcgctccgtcacccaggctggagtgcagtggcacgatctcggctccctgcaacctccacctctcgggttcaagcaattctcctgcctcagcctccccagtagctgggactacaggcgcctgccaccacacctggctaatttttgtatttttagcagcgatggggtttcaccatgttggccaggctggtctcgaactcctgacctcaggtgatccgcccacctcggcctcccccagtgctaggatgacagcgtgagcctccgcatcctgctgaagcattaattttctaactgcatgcttctggggtcctctttttcctgggtggattttgggtgccaggtcttgggcaggtcaggaagcagttgcccgccaggagtttaagctggattcggctctgtccactgagcagcccaggcggacttcagctgccccttggtggctgtgtgcacggggccaccaagtgctgggtggtgcatccacaccgtggccccttgagcttggggctgctgcccccctccccctgggctgcagctggggaccggccctccagactgagcacccgtctctgcctctgcagatggcttcaccccgctcatgatcgcctcctgcagcgggggcggcctggagacgggcaacagcgaggaagaggaggacgcgccggccgtcatctccgacttcatctaccagggcgccagcctgcacaaccagacagaccgcacgggcgagaccgccttgcacctggccgcccgctactcacgctctgatgccgccaagcgcctgctggaggccagcgcagatgccaacatccaggacaacatgggccgcaccccgctgcatgcggctgtgtctgccgacgcacaaggtgtcttccaggtaggcagtggctgcctgtgtgcccacctgccctcctcagggccgcctggtggtctggggcagtggccaggcttacgtggccctgggagcctgaccccgagcacagctgagtccgggacaactggtgcctccacctgggaccttcgcagtcagcgaggtgcgagggggagggcgtcgggcccatctgtgttctccagggaagtcaggcagaggcgggtctggcaggaggcctgggggatctgctgagtgaggcagcacctccccacccccagcaaaacaggctccatcagggttgtgggccttgctcaaggtccaggttccactgctgcagcccctcgcagccccgcccctccctcaaccttggctgccggcgtagcctgtggcagtgag

SEQ ID NO: 17930 - DNA, 2230 bp, Artificial sequence
  DNA replication origin
ctggaggcaccggacggcgggtgcgaggccccccgaggaaggcggcctgagcgtgtcccgccccccacagccccctgtacgaccagtactgcaaggaccacttcagcgacgggcactgcgaccagggctgcaacagcgcggagtgcgagtgggacgggctggactgtgcggagcatgtacccgagaggctggcggccggcacgctggtggtggtggtgctgatgccgccggagcagctgcgcaacagctccttccacttcctgcgggagctcagccgcgtgctgcacaccaacgtggtcttcaagcgtgacgcacacggccagcagatgatcttcccctactacggccgcgaggaggagctgcgcaagcaccccatcaagcgtgccgccgagggctgggccgcacctgacgccctgctgggccaggtgaaggcctcgctgctccctggtggcagcgagggtgggcggcggcggagggagctggaccccatggacgtccgcgggtgagtgagacccggcgcccacggtcaatccccgcaactctcctgggccctccccgacggcctccctgcccctcacggccggcgccatggcaagcagtactctccccactttatggtaaaagagacggaggttccgagaggacctgggacttcagggcctgcgcaggcaaggagtagaggcagcattccagctcagggccctgaccccacagccacacccttttcctgggccactgccttcccctggacaggcggcactcctgtgcccagtaggtgattttgagattgagctgtgccttaggcactggatactacactgattaaaactcagccctctgccaggcgaggaggctcacacctgtaatcccagcactttgggaggctgaggcaggcggagcccttgagcccaggagttcgagaccagtctgggcaacatagggagaccttgtctctgttttttttaaaaaagtattaaaagaagtaaaaaacaaaacactcagctctccaggggttcccacagggctgaacagccccaccccagacaagaatgccgcttggtcatggcgtctgcctggcttgggctggagaggaggcaggtggaggtcctgggagggggcattgctgggccttgcagttggaggaggagctggtgggggtggggggtcccacggtgggagaacacaggcaggagcagcttgagtgcagggggcaccccacaaggctcccgcccatgcctactcgatctggggcagctggacccaggagccaggttggttgtgcccttcgtgtgcctgaccctggtgggtttgcctgtcagttctgctggcttggagcaatcctggaggtcagaagcatcatctcacaggctggatgggatcctgctcacgggaacccagtcctggggagcagagctcacccccagccagcctcaccacacagcccaccaccgctgcacccacccccacctcacgcctgtgcttcctgcagggcctggggatggctcctgggggaggactgggctcctggcacatactctgtcctgagatgaggaaacgtgtctgtggcaccagcaggagccagagagggtgtcagggcgggccagggagagcgcgttggtgggtatctgggatgagccgtgatcagcactggccggagtcggggggctggcaccagtcccctgcagggtagctgctgtcagacctggcttcccaccaccccaggctgcctcaccatgtcctgactgtggcgtcatgggcctcagtgtcctgcggcagcatccctggccggtgggcgggggaggaggaagcctcgggtcccagcccctctctgattgtccgcccagctccatcgtctacctggagattgacaaccggcagtgtgtgcaggcctcctcgcagtgcttccagagtgccaccgacgtggccgcattcctgggagcgctcgcctcgctgggcagcctcaacatcccctacaagatcgaggccgtgcagagtaagtgtggccccatcccgggaacaggctctgcctgcagggggtgccatccccccgtgccccagacacgctggctgtttgtgccagttgctacccacgggtgtgagcgttgccgtccgagttggggtagggcttttctggaattttctgaatggcactccgcccccacctgcggcggtcacagctgccggtggagccacctgggaacgagtccagccacgggaaagtgggtgcctg

SEQ ID NO: 17931 - DNA, 2501 bp, Artificial sequence
  DNA replication origin
ctggcctccctgggtcagccaggctgccctgggcctgtcctggccatcaggcccctagggttgagcagaaggggaggtgctggcgaggcagaatctgctggagcggggacccaccaatgccctccactcagcccccgcctgcccacccccttgcagctcctgcttcaacggtggcacctgcgtggacggcatcaactcgttcacctgcctgtgtccacccggcttcacgggcagctactgccagcacgatgtcaatgagtgcgactcacagccctgcctgcatggcggcacctgtcaggacggctgcggctcctacaggtgcacctgcccccagggctacactggccccaactgccaggtgagtgcgccggccacagaggtgcccgaaggaggggccctgggtgggtgcctacctgcgggaggtgggaacggtcaccccaggtcccactgtgtcggctcggggtcacccccacacccccgggcagagggtttctggggatctgagcagccggtgaaggaacctgatgcggaagcagcaggcaccttcgtttcaatcccaggtttctggagccggggcaggagctcaggaattggggaattgaggaaaagtgttccttctagcaaaggccgagggtggtctggacctgctgagggccctgagggagacccagcccaggctgttcctggtgtgggggtggtggggagtccaggggcggcagtttccacttctgtagaatgggttgcagcctgggttggagtaggccccttggcagatgtgcgttctgagctaccggggaaatggccggggcgcgggcacccagctgaccccaatctgtccccagaaccttgtgcactggtgtgactcctcgccctgcaagaacggcggcaaatgctggcagacccacacccagtaccgctgcgagtgccccagcggctggaccggcctttactgcgacgtgcccagcgtgtcctgtgaggtggctgcgcagcgacaaggtaacctgctgtgcccacccagctcgggtcccagcccatcaaggtcctctgtgggcctgggcctcacctgtctaccaccccatcccccgcaggtgttgacgttgcccgcctgtgccagcatggagggctctgtgtggacgcgggcaacacgcaccactgccgctgccaggcgggctacacaggcagctactgtgaggacctggtggacgagtgctcacccagcccctgccagaacggggccacctgcacggactacctgggcggctactcctgcaaggtgggggtccctcctagggtaagggttgtggccggcacgagtgttgccacacaccaggccctggctgggagctggcccagtggagaaaactgaacctgataggcccatgcactgttcagtctcattaggggagggctggggtaatcagggtagactgcctggaagaggtggcctgtggaaagcctgaaggagggtacctatactgagaagtgggatggggttttcccttcccctagattgtgtctgggcttggccaacacctaccctgaggccctcacctctatcctatgggacggggtccacccacccccaacaggcagtgactccggtcaccgaggccccgccagggtctgttgggctgggtctctctccaggtctgacaggagcgaggggcccgtggcttcgctggacctgagggcagctcatgtggccctgtcagccctcacagtggggtgtgggagcactgcatcctggcgccggctgagccgaagggcccctcgttctgtcgcctgcacagtgcgtggccggctaccacggggtgaactgctctgaggagatcgacgagtgcctctcccacccctgccagaacgggggcacctgcctcgacctccccaacacctacaagtgctcctgcccacggggcactcagggtaagggccgctgcacggagggctggtgttggccatccatggccagggcaggggcagggcaggcaccccgggaccggccagaggcatccaggaaccagccagaaactcccattttcctgtgtgaggccaaggccgactcacagctgcccagggaaagggcccagagcgggggtcccagtgggaagggcgtctccacggcacccttgacacctgcctctcccgagtgtccgtgcagccccagacctgagcgctcgtcttccgggacggacacgcggcacggcagggccggggtgtggcgggcttgggccactgacgaaacctggccccgcaggtgtgcactgtgagatcaacgtggacgactgcaatccccccgttgaccccgtgtcccggagccccaagtgctttaacaacggcacctgcgtggaccaggtgggcggctacagctgcacctgcccgccgggcttcgtgggtgagcgctgtgagggggatgtcaacgagtgcctgtccaatccctgcgacgcccgtggcacccagaactgcgtgcagcgcgtcaatgacttccactgcgagtgccgtgc

SEQ ID NO: 17932 - DNA, 811 bp, Artificial sequence
  DNA replication origin
tcctgtgtctgccccacgggctggcaaggtgaggctggccagggcccggtgagggctgggatgggaggtcaggatgtctgcgggacacaggcagctcccaggcaggctagatgagtctttgaagaggagctggtgggtgctgaggaggccctggtcggagaagttctggaatcaggaattgacctgggagcaccgttcccaactccagttcctgtgaccttcttaggccaaaattaggggagaggggatggtcctggggtcacggaagcctactcctgggtcgggagaggcactgtaggtgggtgggccagcctgggaagggcctggagggccaggggccgctggtgaccaaccggcctcctcctgccccgcagggcagacctgtgaggtcgacatcaacgagtgcgttctgagcccgtgccggcacggcgcatcctgccagaacacccacggcggctaccgctgccactgccaggccggctacagtgggcgcaactgcgagaccgacatcgacgactgccggcccagtgagtagccccgcggctctggcctcctccaggaagctctcaggcctcagttcccccgggcagggttggtgcgcatggtgctggccataagcacccagggaggccggagtgtggccggggagggttgggtcaggtgtgggggatgtgctgagggatggccagggtggttcaggagggccccagagccggcttgctcctccctgcacttcgcggaagagtcacgagagcccctcccacggctcttcactgagccgaggatggctcgggcccggcctgcactcccg

SEQ ID NO: 17933 - DNA, 1261 bp, Artificial sequence
  DNA replication origin
ttcgcacaattgtcggaaactctggcgcagttcctgcctgcccgggtcaccgtggaaaccaataggaagagaggccctggaaagtcgccccagcaggccagggagataatgggggacagggaagataacgcagtccccacggctataaacaggaagctcggccatgggcttgtgcagaaaaaggccctcggctgtgcacgtggttcccacatagcctttgccagacaccctgcgtggccctggaggtctccaggccgtgccccgtgccccgacacgcaggatgtgctgggggcctgggcctgtcccctccatcgcagcccttgtttgttggcctcccgtgatgggcgtttgctgcctgtgacacggagccccaggattagtttcaggcctcggtctcaggccagggcctttcctcgtcacccagagatgagggggcttgcgtccggggtgggcccaggtccctgcagtgtcgtggagcccacccgactgaggccgcctctcctggtgcagtccttgttcctgggcacgcctggtggggtgaggcctaggctgtgccccgctgccaaccgggaatgaggggtggcttctgagcgtgacatttgtgcagcttgtcttcagcgtccccccatctgtgctccactcctccctgggtcagggtcctggcacagccgggagcgctcaggggtctcggtgcacatttgcctcccggcgggaccagcagacggcactctgatggcggaaagaccagcaggcggtggccgatttgggagatccctctgggtgaggctcccggggtcacgtgtgtctccttcccgcaggtgccacgtgtgaggtggtgctggccccgtgtgcccccagcccctgcagaaacggcggggagtgcaggcaatccgaggactatgagagcttctcctgtgtctgccccacgggctggcaaggtgaggctggccagggcccggtgagggctgggatgggaggtcaggatgtctgcgggacacaggcagctcccaggcaggctagatgagtctttgaagaggagctggtgggtgctgaggaggccctggtcggagaagttctggaatcaggaattgacctgggagcaccgttcccaactccagttcctgtgaccttcttaggccaaaattaggggagaggggatggtcctggggtcacggaagcctactcctgggtcgggagaggcactgtaggtgggtgggccagcctgggaagggcctggagggccaggggccgctggtgacca

SEQ ID NO: 17934 - DNA, 1497 bp, Artificial sequence
  DNA replication origin
gatctcagctcactgcaacctccacccctcaggttcaagtgattcccctgcctcagcctcccgagtagctgagattacaggcatgtgccaccacacctggctaatttttgtatttttagtatatatggggtgggggagtttcgccatgttggccaggctgatcttgaactcctggcctcaagtgactcagccacccccgcctcccaaagtgctgggattacaggtgtgagccacagcgcccagcctgcccccactaaaggactctgcgagtctgagtggatgggcacctccgccagcccatagggcattgcagacccgggagtgcccaggccccggccgtgctgctcgggcctccctcgacctgcagtgtggtcccccttgcaggtacaagtgcgactgtgaccctgggtggagtgggaccaactgtgacatcaacaacaatgagtgtgaatccaacccttgtgtcaacggcggcacctgcaaagacatgaccagtggctacgtgtgcacctgccgggagggcttcagcggtgagtgggctgcgcgtttctcagtgcagagggccgccctcgagtctggggagctggagacacaggatcgggacccaggtccagccagcaccatgcatggtgtctccctcccgtggcaaagccttagctccaggcctctggctcttggagatgaggaggggcctggggtggggagcaggcccagggctgctgttgtggggccctgccaaggtgcctgggagtgctggacatgccgagtgctgtccccttccctccaggtcccaactgccagaccaacatcaacgagtgtgcgtccaacccatgtctgaaccagggcacgtgtattgacgacgttgccgggtacaagtgcaactgcctgctgccctacacaggtgaggggtgggtggggcctgtgctggagggggcggggcctatgtgggaggggcgggacctgtgctggagagggcggagcctgtgctggagagggtggggccaggggtgggggcggcctgggaagccgtgactggagggtaaagtggtggctttcttggggcggggccttccagaaggttctgcgcctcactgagtgccttaggcccctgcagtatgtgggccttctcccgggggtggggttggcagattagcaaagatacaggatgcctgggagaaaattttcatgcaagcatgtgttttacctggcaagcctgccgcaagacacaggtaagatgcaggtgaatccttagcagggccgggcctgggtcactgggctccgtgctcccggcgcccaccctgctggggtctctgggggccgggcttccccacccccgccagccggacctgagggattcctttgatggcgggctctctttgtgtgagcggaacaaggagccctctgtttgggctgagcggggagggggatgttcccccaactgtccagcccctgctatgaacccagccaaggggatcacaggaaatgatctcctctaga

SEQ ID NO: 17935 - DNA, 1955 bp, Artificial sequence
  DNA replication origin
acagggcactcagggcagtgaaactgacaaggtcatggacaccttggtctgggccacctggtccagaggccgagagcacagctcagccccaatcctgagtaggtgggaatgccacgctcggagccctcctcaggttggcacaggtgaccccaggtctggtcatgggtgtcccgggggccgccagtcctaagtcttcctgtgcccgcccctcccacggtccagggtacacggggacgcactgcgaggtggacatcgatgagtgcgaccccgacccctgccactacggctcctgcaaggacggcgtcgccaccttcacctgcctctgccgcccaggctacacgggccaccactgcgagaccaacatcaacgagtgctccagccagccctgccgccacgggggcacctgccaggaccgcgacaacgcctacctctgcttctgcctgaaggggaccacaggtggccggccaggcgggtggccggcggggggccagtgggcagggcgggcctgaggactgaccgacacgtgccaccccttcaggacccaactgcgagatcaacctggatgactgtgccagcagcccctgcgactcgggcacctgtctggacaagatcgatggctacgagtgtgcctgtgagccgggctacacaggtgagcggccctgcacgtgggggctgactgcactgtgctcagaggtcaaggtcagccactctgccctggggctgctgaggggttgggtgagggctttggtgctgcccacctgggcagaccgtggtctgcagcagagattgcagcgggaccagggctataactggcagcacgatgggtccccccgacccctcttgtctccggtcagagctgtcccaggccgtgttggcagagtggcccagcaggccaagagggagcagccagccctgaggccaggcttaagtaccttctgcctctgtggctcaccagcacctttgagcaggtccctctgcctctctgggcctcagattctcatcagtcagggctgcagtagcccctgcccctggggcccctgggaggatgacttgagtgggcactggtgcccggggaggctggcacatggcacattgtgatccaagatggtttctgacacctggaaggatgtggccagaagggtgatcgccccggctcaacagacagggaaatcgaggttgacgtgggtgggaccccctgggcgctgggcctcggagtctgacccgccctgcccttagggagcatgtgtaacatcaacatcgatgagtgtgcgggcaacccctgccacaacgggggcacctgcgaggacggcatcaatggcttcacctgccgctgccccgagggctaccacgaccccacctgcctgtctgaggtcaatgagtgcaacagcaacccctgcgtccacggggcctgccgggacagcctcaacgggtatgcggcggggccgatcatggggacacatcagtcctaaaccctgggagctctgctgccaggagggtggcacctgcacagagcttgagatgggccagaaacgggcctcggacggggctgggtggcagggagctcccctcggggacgcacatgcctctgggtcctcagtcagactacagtccacacccagcagctgtgtgctgcgtgtccttgtgggctgcatggtgtgctcaggacacaggcccacagtgaccctggaacacgtttccatggtaacagccgcaagtgtttctgatgcccatgatgtgcctggcagcactctgcctggatgggaccatttaaatcagcagggaccccattgccctcatttggcgcagagaaggcacgtgctttgttcggggccacacagcgggcaagtggtggggggcttttcgcagcaccctactgccctgcacttggcatggtcccctcgctaatgaaccaaacccctgccgcagtcttgggtatgggaagcgctgcggccccc

SEQ ID NO: 17936 - DNA, 1926 bp, Artificial sequence
  DNA replication origin
gtttctgtcccaagtccacagctgtgcccagtggggcactggggccgcgcgtgcccccctcactgttgccccaccccacaggctacgagggtgtgcactgcgaggtcaacacagacgagtgtgccagcagcccctgcctgcacaatggccgctgcctggacaagatcaatgagttccagtgcgagtgccccacgggtgagggccacccccgccccctgcccccgggtcgtctgcaccctggcctcctgaggggtgcctgggcgtgggttgtgtcccctgcccccgggccatctgcaccccggcctcctgaggggtgagggccgcccccaccccctgccctcgggccgtccgcaccccggcctcctgaggggtgagggccgtgggttgtgtcccctgctcctgggccgtctgcaccccggcctcctgaggggggcctggccgtggattgtgtcccctgcccctgggccgtctgcaccccggcctcctgaggggtgcctggccgtaggttgtgtcccctgcccctgggccgtctgcaccccggccttctgaggggggcctggccattggttgtgttcagattcccaggagagcgagggttttgcctcatgagtggatgggagtgttttcagacttccccgaaggaagggcagggcccagtggggagtgggagcttgcccaggggtcgcggtggagcccagggccaggagatcctccttgatctgggtgcagccccttctgcctggagagaagggtataccaggagctgcagtgcccagacagggaggaggctccagcctggctttctgagggctcgatgctgggagggaggccagcctgccctgtcctgccatgtcccctgcccaacggcacgccagcgacaagggtatgcagagaaccacgtggggcaggttggcctgcaatggagatgatggctgcccggggcggacttggaggaactctcaggggcctgggtgaaaggtgtttccatctgtcccagagctgggggccggggcgcagagcccagggaggcgttgccagcccaagcctaggctcccaagacatagattacccgtcccagacactggagcgaggggagccccattctcagcccggctccactgtagccatagcaacccagtcggtttgggaaaaaggccccttctgtgggagcgagggcgtgtggtgctgggggaggggctttgatccggggagcgggcagcgggaggcagggagagctggagctggctgagctcaggctgagtgtgccctggggagcccagccaggcgctcactgctggggtctggccaggggtccctgaagggccatagtgctgttgcacatgactccctcccctcccctccccggccccaggcttcactgggcatctgtgccagtacgatgtggacgagtgtgccagcaccccctgcaagaatggtgccaagtgcctggacggacccaacacttacacctgtgtgtgcacggaaggtgcgggctggcgcccaccagcggggagggactggggacgggacagggcactcagggcagtgaaactgacaaggtcatggacaccttggtctgggccacctggtccagaggccgagagcacagctcagccccaatcctgagtaggtgggaatgccacgctcggagccctcctcaggttggcacaggtgaccccaggtctggtcatgggtgtcccgggggccgccagtcctaagtcttcctgtgcccgcccctcccacggtccagggtacacggggacgcactgcgaggtggacatcgatgagtgcgaccccgacccctgccactacggctcctgcaaggacggcgtcgccaccttcacctgcctctgccgcccaggctacacgggccaccactgcgagaccaacatcaacgagtgctccagccagccctgccgccacggg

SEQ ID NO: 17937 - DNA, 1619 bp, Artificial sequence
  DNA replication origin
ctgcccggggccgacagctcctgttccctgcaggtcagtactgtaccgaggatgtggacgagtgccagctgatgccaaatgcctgccagaacggcgggacctgccacaacacccacggtggctacaactgcgtgtgtgtcaacggctggactggtgaggactgcagcgagaacattgatgactgtgccagcgccgcctgcttccacggcgccacctgccatgaccgtgtggcctccttctactgcgagtgtccccatggccgcacaggtgagtgccttgaggcccaggtgggcgcagggggctcacatgggccaggcctgagctgtgtgacctcacccagggactgtggccctcctgcacccaggataacctgaaagggcctttctggtcagggaggccggtggtcgctgtgagtcccccggaacgtcccaagtgtcacgggatgcccgacggggtcacggcgggcagctcctcctggggtgtcagtggggttggaccccagccgtgggtggtgtgccatgcctggcccaggggccgtgcccactgaccgccgctgcctgcccaggtctgctgtgccacctcaacgacgcatgcatcagcaacccctgtaacgagggctccaactgcgacaccaaccctgtcaatggcaaggccatctgcacctgcccctcggggtacacgggcccggcctgcagccaggacgtggatgagtgctcgctgggtaggtgccagcacagggggtgcggccaggtgggggtggcagcctggccccagaaccgatgagaagtcgattctggcttcagggggtgcccagttagatgggggatgggaccctgccagtccgatgggggtggtgtgcagtgaggtgttgcaggggccagggtgcctggagcagcctctcacccgtgtgccctcgccaggtgccaacccctgcgagcatgcgggcaagtgcatcaacacgctgggctccttcgagtgccagtgtctgcagggctacacgggcccccgatgcgagatcgacgtcaacgagtgcgtctcgaacccgtgccagaacgacgccacctgcctggaccagattggggagttccagtgcatctgcatgcccggtgcgtcggccggggccagggcgggaaaccgagtcgaggctgggcagccttggaggggcagccccgggaacatctgtgggttgcttccgctttccccagcctccatgccttctgggcccacagcctgcacagggcatggggaaactgaggccaggccacagggccagcagagcacgggggcagtgctaggcagatgagggtgccgggccaggggccacgggctgcaggggagcgggtgcgcagggggcccgtggtggctgggacactgggctggaggcagggttcgtttctgtcccaagtccacagctgtgcccagtggggcactggggccgcgcgtgcccccctcactgttgccccaccccacaggctacgagggtgtgcactgcgaggtcaacacagacgagtgtgccagcagcccctgcctgcacaatggccgctgcctggacaagatcaatgagttccagtgcgagtgccccacgggtgagggccacccccgccccctgcccccgggtc

SEQ ID NO: 17938 - DNA, 1049 bp, Artificial sequence
  DNA replication origin
ccggccagaactgtgaggaaaatatcgacgattgtccaggaaacaactgcaagaacgggggtgcctgtgtggacggcgtgaacacctacaactgccgctgcccgccagagtggacaggcgcgtatacgggtcgccgcagggcggggtagccggggcggggctgctacccacttactaaactgcactcacaggcatagcggggagcagccgagaccctgtcccaggccaggcagactagggttggccgagaaggacaacatgatgggggccccacttcccgtggccagggtctggtgcccctcacctcgggggtcagcacagacagggccctggttggtctgtgtgggccgtttgcaacctggctccaggcagcccctgtgcccagtggggtgtcctggcattgagggccttcagcaccccactcaggccacgcttcctgggccagtcacagggatgcctggatgaacagacaggccctgtgttcgggaattaccctctggtggggtgacgggcaaaggtgcaccccgacgcagcagtgtccacagagcacaaagaggaggcaagactccatggtgctgggcctgcagaggaaggagtgatttaggctggcggtgggtggaggagtcagcccaggaaggcttcctggagggggcggcattgccaccctgcgtcttaggggacagggagctcagggagtggcagctgcccggggccgacagctcctgttccctgcaggtcagtactgtaccgaggatgtggacgagtgccagctgatgccaaatgcctgccagaacggcgggacctgccacaacacccacggtggctacaactgcgtgtgtgtcaacggctggactggtgaggactgcagcgagaacattgatgactgtgccagcgccgcctgcttccacggcgccacctgccatgaccgtgtggcctccttctactgcgagtgtccccatggccgcacaggtgagtgccttgaggcccaggtgggcgcagggggctcacatgggccaggcctgagctgtgtgacctcacccagggactgt

SEQ ID NO: 17939 - DNA, 1165 bp, Artificial sequence
  DNA replication origin
ctcactgcctgctgtggagtctggccgtttcagggtgagatgaccatccgggggcctccccaaatgactcaggcctgccagaccccagcttcagactgtccccggcggcccctgcacccaggccccctgaagggccctcagccacctctgggtggtcaggagcccaggagacagctgtgtgtggagtcacggggaaccgagatgggggcggccctgagctctgcaggcccgggaactggctgggatttggggtcgcacagcctgcctggcacgtcagcactgtctcctcgtggggtcgctggccgaggctacgtcgcagagggtccagctggggtccacggggctctcgctggcttcccgccctctcccccactgtgtgcctcagccagtgctttgcagggcagccctggggtcgcaggcccagccaggggccccatctgcctcggagccggggtgcagggccccacacatgagtgggaccgggactcaggctccaggctctgaattttttttttttttttgagacaggtctctgtcactcaggctggagtacagtgacgtgccctcagctcactgcagccttgacctcccaggctaaagcgatccttctgcctcagcccctcaagtagcttgggaccacaggccggcgccaccacgctttgctacttcttgtatttttttttgtagagacggggtttcgccatgttgtccaggctggtcttgaactcctgggcgcaagcgatccacccacttcagcctcccaaagtgccgggattccaggcgtgagccaccgcgccagggctggggtctggttttgggtgctccccaagctgatttgcattttggattttggttgtctctggctgcctgcttttgctccggtccagcagacagacagaacggacggggtggtggcggtggggcaatgtctcagagggaggggccgagcaggtgggagctccaagggcaacgggggttcaaaggcatctcgggagggcggcaattagtaaccggctgcaggtttggctgttgccgaacgcgcctttctgggttgatcattgaaccagcgggagttgagtggattaatagctaactggctgccttggaggcctgggtggggccatacctcgggggagggggccctggcagcctgtggaggaggagg

SEQ ID NO: 17940 - DNA, 1661 bp, Artificial sequence
  DNA replication origin
cgcaacccccagggtttcccctgcagtggggctggggccggagagggcgtgggagctgcgggggcaccatcacttcccaagccatggcccttcctgccatcctgctggtctcctgcgggtgtgggtgacaggtaggcgcagccgcctgcccgtgtccccagtgctccccgatccccgtgttgtacgtaggagcctctctgctgtagttcttgtttgagtaaattttgcagcagctctaaaaataaggaagagttttgaaaacctccagtctcggccgcgcgtggtggctcacgcctgtactcccagcactttgggaggccgaggtgggcagatcacaaggtcaggagatggagaccatcctggctaacacggcgaaaccccgtctctactaaaaatacaaaaaattagccaggcatggtggcacgcgcctgtagtcccagctactcaggaggctgagggaggagaatcacttgaacccgggaggcggaggttgcagtgagccgagatcccgccactgcactccagcctgggcgacagagcgagactccgtctcaaaaaaaaaaaaaaaaaagtgaagagaaaaaagaaaacctccaatctcagctgcacagaatggctgttaggtgggaatggggagagggcattcaggcaggggtggggctggagggtgcacagggtcctggctgacccacgggtggcccaagggctgccccacccccttggaagccccaagctggcctggcccctgcaaaggggaagctccctggctgcccagtcagctgagcccagccacctctgcgtgcagacaccagacgtgtgcgtttcctgcaagtcactgggcgagcgtggggtggggacagacactccctggccagcttggatctctgcagggtggggcgcagagcccttctgctggtgggggctcagatgccttcctagcagcacgggaccctacctccagtcacacggattgaggggccaagctcttggggggccgtggttcaggctagggcaggtggggtgtgtgcggccttgtccaaggccacctgtgtgcagagctgatgcccacccgccttgggcagggtgggtgaggacctcctggtgaggcccagcggcagagatgccaggggtgctgggccggctcagagccactgcccgtgcaggggcagctcagggccctggggagtgggcagggagggaaggggaggggctggtggggttcactcacttgagtgtgggtagatctcagaggctggggtgctgggggctgggtcacccgtccggtgaggggtgtgctcactgcctgctgtggagtctggccgtttcagggtgagatgaccatccgggggcctccccaaatgactcaggcctgccagaccccagcttcagactgtccccggcggcccctgcacccaggccccctgaagggccctcagccacctctgggtggtcaggagcccaggagacagctgtgtgtggagtcacggggaaccgagatgggggcggccctgagctctgcaggcccgggaactggctgggatttggggtcgcacagcctgcctggcacgtcagcactgtctcctcgtggggtcgctggccgaggctacgtcgcagagggtccagctggggtccacggggctctcgctggcttcccgccctct

SEQ ID NO: 17941 - DNA, 1110 bp, Artificial sequence
  DNA replication origin
ggcacctccaggtggcctgaagggagggaaggcccggcctcggggagcagtgaggccagcacgaccctcttgtccccttgtctccagggaaatcgtgccagcaggctgacccgtgcgcctccaacccctgcgccaacggtggccagtgcctgcccttcgaggcctcctacatctgccactgcccacccagcttccatggccccacctgccggcaggatgtcaacgagtgtggccagaagcccgggctttgccgccacggaggcacctgccacaacgaggtcggctcctaccgctgcgtctgccgcgccacccacactggccccaactgcgagcggccctacgtgccctgcagcccctcgccctgccagaacgggggcacctgccgccccacgggcgacgtcacccacgagtgtgcctgcctgccaggtagtgctgcccgctggccggggtgcacgagcccctccccggctgccaggcccagggggtgggaacggggcgcctggtgtaggggcagccctgggagggcccatggcggggagttgggaaggcgggatggcgagttccccagactgcgtgtggtgtcggggggacgcgtctggagcggggtgtgcgctgggaggaggcttgcacagggtccaggtgccagcccgtgtctctggagtttcccggaactcacattcgagctgtaggacgccctgcctccccccagtgcaggcaccctgacttgcgcaacccccagggtttcccctgcagtggggctggggccggagagggcgtgggagctgcgggggcaccatcacttcccaagccatggcccttcctgccatcctgctggtctcctgcgggtgtgggtgacaggtaggcgcagccgcctgcccgtgtccccagtgctccccgatccccgtgttgtacgtaggagcctctctgctgtagttcttgtttgagtaaattttgcagcagctctaaaaataaggaagagttttgaaaacctccagtctcggccgcgcgtggtggctcacgcctgtactcccagcactttgggaggccgaggtgggcagatcacaaggtcaggagatggagaccatcctggctaacacggcgaaaccccgt

SEQ ID NO: 17942 - DNA, 1146 bp, Artificial sequence
  DNA replication origin
gcaggggaaaccctgggggttgcgcaagtcagggtgcctgcactggggggaggcagggcgtcctacagctcgaatgtgagttccgggaaactccagagacacgggctggcacctggaccctgtgcaagcctcctcccagcgcacaccccgctccagacgcgtccccccgacaccacacgcagtctggggaactcgccatcccgccttcccaactccccgccatgggccctcccagggctgcccctacaccaggcgccccgttcccaccccctgggcctggcagccggggaggggctcgtgcaccccggccagcgggcagcactacctggcaggcaggcacactcgtgggtgacgtcgcccgtggggcggcaggtgcccccgttctggcagggcgaggggctgcagggcacgtagggccgctcgcagttggggccagtgtgggtggcgcggcagacgcagcggtaggagccgacctcgttgtggcaggtgcctccgtggcggcaaagcccgggcttctggccacactcgttgacatcctgccggcaggtggggccatggaagctgggtgggcagtggcagatgtaggaggcctcgaagggcaggcactggccaccgttggcgcaggggttggaggcgcacgggtcagcctgctggcacgatttccctggagacaaggggacaagagggtcgtgctggcctcactgctccccgaggccgggccttccctcccttcaggccacctggaggtgccagcctgggctccaccttaggtgctatcacatttgatcctcaggacctgccgtgagaccggtcgcctttggcagatgaaggaccacagctcccaagaggcctgagcctgggccgtctcttcccagagctgacacctccagacacccttcaccctaacaggtgagggccagtgcacggcaggaggaagggggcaggggcggcctggacacagaggctccccttgtctcgcagaagcggggacagcaagagttgggccagagcaagcagctgaaaacgaggcgattccaggtctgggaggggggcagggaccctggggcaggggctcccaattacttccgggtcagagacccgggcctggatcccgccaagtacctcaagttgcctgggcagctggcg

SEQ ID NO: 17943 - DNA, 2228 bp, Artificial sequence
  DNA replication origin
tttctttaagccagttggtttgggacttttggcttctggcaacagatggtcggccagagtggcccttttgcgttctctctacccaagccgtggtcacgggtaaaagccttcggggaagacagatgcctcccgggcctttgggacaggggcgtggctggctgctgagaaacgcacaggaacccccacccccagcctccacaagcccctcggggtaaggcccccccaggccactgccacacatagcacaggtttgattggagacactggggtgggaataagcgggagaggaggcgaggacttggggggccggtgggggtcctgtgggaagccggcagcttcagggccggtcctggggcaggcggccgccgcagccccgcacccaggtgggctccggaaggcgggacggttccctctgtacatcccatctggaggaggccatgcccacccagggcctgagccgtgaggctgctgccttcccgggccgctggggccgctgaggctggtggcatgttctgcttcagaggcttcaccactgggaagagcggcgcccggcgggtcccagaccttttcccggagcgcaaggccaggaggtgactggggccggagatttatgaccacagcaggtggctggggggggcaggctctgcgcctgttgccgcagggaacaggtgagaccaggcctgggtggagatgcaggacccctcccctggctccccttgttctctctgagcccagactgtgtgtccggggtgaggggcagcctttcacccaccttgacggggttgcagagacctggcagagggacctcctcctggcaccttggtttccccggctgtaatgtgggtgcttctgctcctggctgatgtgcctggatgtgagttatgaagactcaatgccgaaagggaaacgtgtctgggggctgagcgtgggcagggaacgggccagccttcatccccagtgcgatcttgacatgagatgtcccatccccattgcagtctcagcctgaggtgtcccatcagaaaggcttcctggccgggcgcggtggcttacgcctgtaatcccagcactttgggaggccgaggcgggcagatcacgaggtcaagagatcaagaccagcctggccaacatggtgaaaccctgtctctactaaaaatacaaaaattagctgggcatggtgtcaggtgcctgtagtcccagctactcgggaggctgaggcaggagaatcgcttgaacctgggaggcagaggttgcagtgagcctagatcgcgcccctgcactccagcctgggcaacagagcaagactcaaaaaaaaaaaaaaaaaaaaaagaaaagaaaaagaaaggcttccacgtaggaaggggctgatccacactttccgtggctgccatcatgttgacacctgaaggttggaaaaaccacggcctttgttactgcccaagcaatgcctgttcgctttagcaaagctgggaagaaaagcagataggcctgcagacccggaggctctacggagctaatgcacccggctcctctccatggctctccgcgggtgtagacccagacccctgcccgggctgtggagtccaagctgggttctgctggaacatcctagtctctagcttgttccccaagttagcagtcatttgtcttcttctttctttctttttttgagtcttgctctgtcacccaggctggagtgcagtggcgtgatctcggctcactgcaacctctgcctcctgggttcaagtgattctcctgcttcagcctcattcagtggcattcagtacattcccaaagttgtgcaatcgcggcatgtgtctggttccagaacattttatcagccctaagggaaccccgctaagcagccgttgtgcccgtgcccggggtgtggggggaggcggctgtgcccatgacaggttcccggtgctgagtggcgggggcgctggggaagcaggtgggaactaactgccctggcacatctgccaacagctgtggcggggccttcgtgggcccgcgatgccaggaccccaacccgtgcctcagcaccccctgcaagaacgccgggacatgccacgtggtggaccgcagaggcgtggcagactatgcctgcagctgtgccctgggcttctctgggcccctctgcctgacacccctggacaatgcctgcctcaccaacccctgccgcaacgggggcacctgcgacctgctcacgctgacggagtacaagtgcc

SEQ ID NO: 17944 - DNA, 942 bp, Artificial sequence
  DNA replication origin
acgcaaaagggccactctggccgaccatctgttgccagaagccaaaagtcccaaaccaactggcttaaagaaaacacatgtcaccccttccaaaggggctctggggaattcactcaggccttgctacggctcctgccagcccagtgagcgacgggcacagccccggaatgaggctccccctcctccatcccatgtggccggtcactccggggctgcagcgacagacctgcctctgcgggcacctgttgggagggcagacgtggttcccactgcatgcagatccagttacaggctggccggtccccgaggtggagcggccgctgggaacccgtggagtgcacaggctgggctgggctgggctgtggccacaggaggggcgccctccctccacataaatgccccattgtcaggcgggagttggccacagctcccgcttggagaaaaggccctttttgctttcccagccgctgaagtcggcagggggtgggtacaggacagagggcgctcggtcatcaaagccggggctggaggctcctcagcctggcccatgcaagctggtcccctgcctcccggcccctcgaggctccaaggagcgggaaaagctcacctgctgggcaagacggggaggaggggcaggggaggcccatcccacagctttaggggaccccagaggggagacgctggaggtccgagcccctagagcagtctcccaccaagtgccctgaggtcacaggacattggctgtccctgaatggaccacgacactctgcccggacaccgggccccactccccaccctgagcgcggaccccaacgtggaggactgtgggagaatctgcccaaccggacgcatcccagttaacgaggctgtatcacgccgggccagcaagaggaaaacacgccccataaatcaggcgtcggtgctcggacaaagggcggctgg

SEQ ID NO: 17945 - DNA, 858 bp, Artificial sequence
  DNA replication origin
gcaggcgccggggccacttggcaccctccccccgcagccctcctggagtccccgcccgccgctcacctgcggggggcccagataggacaggttaccccagcgccgccaggccactgagcgtgggggatgggacaggcaggtgccgggtgaccctaagagggacgcacggaaggggagtccacgggggcacacctggcgtgggttgggtctcctccgtgggagcccgagagctgggtggcttggtggacagggcagctctctcgtccagtcgggggagactggcgttccctatctcaagcctcactttttagccccagaggggtctccccaccgcccctgataggaggagatgcggggacggtggaaggtggggtgcgggtcactcatggaagccctgaggatccccgtgggcgcggcagctgttgggtgccacctcactcggccaagccctggcgcccacctcgcggcccacacccacctggccgccgggacagcattgaagacagagtggcccgggtaccgggggtgtggccagcgccaaagctgtgaaggatttgctcacaggctggtggtcctggccatggccatgctgcaggcctgaggtccctcccaccttctcagggacgtctgggtgctgtgcggagggcaggtgttcgccgtctgtagggtgctccagctctgtggccatgtgggagagaggtacagactggggcgggcacaggctggaggctgcccacagcagcagcgggagactgggcccaaagctgccccccacacacagacccccacacctggctcaaaactttctccaggctcggcccggttccccccagctagcgcgtctcacggaacctccaa

SEQ ID NO: 17946 - DNA, 870 bp, Artificial sequence
  DNA replication origin
actcccaccctccctgccagggccgctccatggaaatgcgactccagaaagcagcaggaggcagatgctgccgagacctttcacccaggacgaattctaaattgtgctgttttcctttctaagctaagcggccatctgccacccccaggggacagaagacagttccctccgccccaaaatgagaaggaggggtgagagggactcagtgcgggtaggactcactcacttcctgccctcaaggagtttatggtcatgcagggccagggatgggggcacaggcagaggccgagcagaggggtgggggtgtggggtcagctggacccaacccagctggggtgtcagtgatgtggctggctctgcacccgccacaggaaccagagaccctgggtgggagaggtgcttcccatggctccaccaggtgacagcacctcccaaggcaaggatgggcagggacagtggggggggatgggcagggacagtgcgggggggatgggcagggacggtgagggggggatgggcagggacagtgttggggatgagcagggacagtgcggggaatgggcagggacagtgagggggatgggcagggacagtggagggacgggcagggacagttggtgggacgggcagggacagtgcgggggcctctccggtgcacaggagctgcacttcccagaggggaaggaacggccctgcacaccccggctccctgggaagggaaggggaggagctgcccggctgaaatcagcatcttaacacatcccacctgctccccagcagagccacaggtccagccccacctgccctccttgggcctcactgccaatcccggcccactgtcctgccacagaagcccaagggtcccctggc

SEQ ID NO: 17947 - DNA, 1129 bp, Artificial sequence
  DNA replication origin
actgcaggcccctcccccaggtgcccctccttatgggcccctcccagggctgcaggcacctgcctggatcccacttcccaagtgtggggtaatcccaggcgcccggtgatcacgctgggcccgggcagagtgaggctctgagggggtgccaggggcacagtgggccagtatgtgagccgggctgggcgctgggactgggccggcaggcgagcggtgttccgagaggaggattcctgggctcggaggcccctctgtgcctcgtgtggtcagagagcagggagccggcgggtgtgatggggatgaggtgacctctggggccaccactgaagccgccgtccatctgcggccgaatcgggaggcacacagaggtgtcctggtggtttcccgggacaggcgggaggaggcgcaggagggcggcgtctgcccccgggatgccaggagtgctcctccggcagcgtgggcttcggcttcgtccctctttcaccagtgccgacgccccgcgggtgctgtgggtgaaggggcatcggtgccctcctgctgggcgggaggaaggaaggggagcgggaggctgggtctctctcgcccagggctctgcccccaccaccctagggttttgtgtttcggtggagctgtaagaatgctttgtctgctccagacttcccggtcctgggagatcaggtggtcaggcaaaacatccagaccgtctgggtggggctgggggtgcgggggacacgcgccttcctcctctttcccagggagcttctgccactcctgtgccaccctggggagctgccttgccctgccccgctctggtccccatcagcaggtgtggttctgagctgccttcagatccgggtggtgtgctgggcatagctgccccgttttctcacctgtgaaatgggcccattacacgcccccagggcggttgtgggggtcccatgagacagagcttggaaagcccgagtgtaggtcaggccaggagggttgtgggctcagtttcttcactgctgggctggtgtgtgccggacagatgtctcgggatcccttccctccctgcagcattcttaacaaggacgctggacatggagtcagcacctccgggcgactgccctgctggctgtggggctca

SEQ ID NO: 17948 - DNA, 1431 bp, Artificial sequence
  DNA replication origin
cctgggagggatcctgagtgctcccccctccacccaccatgcacccattgccccgggagggatcctgagtgctcccccctccacccactcccaccctgcacccattgcccctgggagggatcctgagtgctccccgcctaccctgcacccattgcccctgggagggagacttctgtagaggcctcacctctgaaccccccactcacaggctcaggggcccagggctgggggcgtcctgccgtctacactccagattgagcccgcacggttaaacagggccctctccgcacgccctgcctaatgcaaagcggtggcttcgggtgggtccccaaggggccttgtgaaccctgggggcctggcccctcccacctggctgcacccgctgggcgggagatcccatcctccgagtcctcagcccctcagcctcagctgcagcccagacaccagggctctgtggggcgggggtggggcagcggttccctcaggtctgtggggctgccctgctgtggttcctgcaatttcctggaaggaggtctggggcctggtgtccagtggggcctgtggggacggactcgggggctctgtggggagggactgggggctctgtggggacggacttgggggctctgtggggagggactggggggctctgtggggagggactgggggctctgtggggagggactcgggggctctgtgaggagggactggggggctctgtggggagggactgggggctctgtggggagggactgggggctctgtgagagggaactggggggctctgatgtgctgggcgtgcacaggggaggctttgcctctgacatccacacctgcagttcccaggcacacacagcggccccatcggggtcctcgcaatcacagtctgtgagtggccactaccaagggcgtctccggatcaggccaggcccagatgctgcccggacccaacccccacagcgcctgccgccacagtagggaccaatggccacagaacactcacccggcctcacttgcacggggctgttcagtctggtgggcaccaggtgggcgctgttctcgcccagtgggaggcctgccagctccttggttgctagttgagatttttccccaagaaatagtcgtgttgttccttctgctccgcctggcactgaggttggtgacacgccccgaccttgctctaattggcagatgagaatttgtcatcagatgtcgaccctgtctacgcagtcccctggcctcggagtccattgtgcatctctgaagggcttgaattggttgtttaaagctgggtaaatgcccccttgacattctgttgacactgtcaatttgctgaacaaactcttccacaggtagcacaggaggccagtctcgccccagcctgagccaaggcccagggaggcaggtcctgtgtggagtcagcctttttgt

SEQ ID NO: 17949 - DNA, 1234 bp, Artificial sequence
  DNA replication origin
aagtccgtccccacagagcccccagtccctccccacagagcccccgagtccgtccccacaggccccactggacaccaggccccagacctccttccaggaaattgcaggaaccacagcagggcagccccacagacctgagggaaccgctgccccacccccgccccacagagccctggtgtctgggctgcagctgaggctgaggggctgaggactcggaggatgggatctcccgcccagcgggtgcagccaggtgggaggggccaggcccccagggttcacaaggccccttggggacccacccgaagccaccgctttgcattaggcagggcgtgcggagagggccctgtttaaccgtgcgggctcaatctggagtgtagacggcaggacgcccccagccctgggcccctgagcctgtgagtggggggttcagaggtgaggcctctacagaagtctccctcccaggggcaatgggtgcagggtaggcggggagcactcaggatccctcccaggggcaatgggtgcagggtgggagtgggtggaggggggagcactcaggatccctcccggggcaatgggtgcatggtgggtggaggggggagcactcaggatccctcccaggggcaatgggtgcagggtgggtggagaggggagcactcaggatccctcctggggcaatgggtgcagggtgggtcggggggagcactcaggatccctcccaggggcaatgggtgcagggtgggagtgggtggaggggggagcactcaggatccctcccggggcaatgagtgcagggtgggtggagaggggagcactcaggatccctcccaggggcaatgggtgcagggtgggtggaggggggatcactcaggatccctcccaggggcaatgggtgcagggtgggagtgggtggaggggggagcactcaggatccctcccggggcaatgagtgcagggtgggtggagaggggagcactcaggatccctcctggggcaatgggtgcatggtgggtgggggggagcactcaggatccctcccaggagcaacgggtacagggtaggggggcgcactgaggacactgctggggagtttctcctcccagaattccacaggtctcggagatacactgaaagcaaccccaaaatgctaggaccgcctataaccgccctgcaccacccctggggcaaccaggcaccccgatgctaacacgcacgcatcctcccgacagggagaagt

SEQ ID NO: 17950 - DNA, 800 bp, Artificial sequence
  DNA replication origin
cagcatggagagggaaaagcgggcggcccggggcgtggggttctggagtcccgggatcagggaggaccgaccttccccctcgatccccccgtggaggcggactcgcgccgcccgtgcctggagccgagttaggaggccggtgtggggtgctggggccccggaggccctactccgggcccgcccttcacccgccgcgcgtggggcttgccgccggtcggccgggcgggcgggctgcctactatttttcgatttgaatagagtcggttttggtttcctgttgcttctccgggccatttatcttctttcttcttcgcctctggcccacgccggggcggatgttggggcgcggagtgtgggctctgcggcgccgcgttcgccttcactgacccgcgcggccgggctgggtccccgggctcccggtcgccccgcccgccggtgccccccagcccggctctcagtttgggggaggggttgcgtaagaagccgccgcgcccggggggactgaactttccttttgctttgcggagttgaagtttggaaagcttgggggcggagagcgggacgcgggtggggggctcttacatttctccccgccgcacagcgagcggggtctctggggaatcgagtgattaatccactctttctccgagagttggaggcgagaattatctgtcctcttccagaaagtgcggctctgtgtcacacccccctcccccgtttctcagccccggtaagatggggagggaggggcttgagtaattgatcccttctcgagatggggtcgaattccttccgaatgg

SEQ ID NO: 17951 - DNA, 3057 bp, Artificial sequence
  DNA replication origin
ggctccgcgcccggctcgttccttcgctgcgctcgcgcccgcgcccgcgccccgcgccccgcgcccttgcgctccctcccgcggccgaggcactagtgaggctcagagtcgaggtgcgctccgcccccgccggccccgccccgcccggccccacccccgccggtccccccgccccctccgcggccacctcctcccgcacgccccgtccgcctttgcgcctccccgagctgagccgcgcgtcccgagcccagcctctccggggaggagggacccggcggcgcggcgtgggtcgggagcgggcgcctgggactacttctcgtttgaaagttttcagaggccaaaagtttgagccggggctgcggaaggatccggctctggcggttgccgcgctcggcgacaactggcgactgaaatttgcatgtgaataagcggaggagcccggggcggaatggggagggcgaggccgcggacagccgtgtgcaccgtgcgctgggccgggcggggagcagctgaggccacgttgggggaccccgggcccggggcagggctctgggagagtggcctagccgtgtgtgcgcccctagcccagcggcttcactccctcccgagggccccgtggccgcggctttaggcgtccagaggatcgatcgccgccagacatccctggccgtgattgcccgagcacttgaccgcgagggatgggggcgccgcggcctctgggcaggggactccgggcgccccgagggagcagccgggaccagtgcctcgcggacggattgtgccccgctcccccaagggggacccgcgtcgacacgctcctcggtcaccgtcctcctcctgcccgggcgccgcctgcctaaggtggccccagaaagcacaaacgggtcgggcggatctgccgctggcgccggcgcagcccttcccacgtgctccttccggctgatttatttctccaccacgatgccaggcacgggcaccctgtgccaagcctggttaagcgccaggagtccaaaatgcctgccatagtccctgcgcaaagttcacggcctcgtgccagggacagacagcgccccctccccaccccaacacagggtggtgagtgcgatggcagaaggcgcgtgtcccggcgcccctcctggagtaggagggctaagcctgccctgcggggagaccgaaaggctgggagggacctaggactgtgggggcctggggggagggctgcagaaaccccagagcatggtggcagaggcaggcacagaaagcaggacaaatctcacacctgaccccagcaagcctttcctggcacacctcttgccaaatgctgagcactctggaaacagccagtgcaggcggcctgtcccgcccctgtagctgctgctgggagcctccctcgcctgcgtcctcccagaatctggcctcacttctgcaggcctggggtaacatcttggggtcagcgccccaggagaggaggcgcctggaggcagcagagatgtttatgtaacagcagccaggcagcctggaggagcagattttccatagaaggaagcgcggggctgtgcagctcccaggctgaggactctgcccaccacgacgtcctctgctcctggtgggtgggggtggggtggggcatagggaggcccgaaggcctcaggcctggtgctgatcgggtgcgggtgcgactgcctgtgtgcctccattggcatctctgcctgtgggccccaggccagaagtaatggcccatgtagcccaggcccgggggccagtcctcagcattttgcggaggggcggcctgggaggggaggaggggatccctggatagggggtctcccctggtctgccccagctgtgccgacagcacctccaccttgggcctccatcctctaccagcagagaagagagtggcccattcggtgtccacccgtcaggccacccagcagccaggcacgctcataagcccgcgttacggatggtgcggccgggtgcacaggcccgagggaagcacaggcctcggcctcccagctcccaacccctgcaccacccacagccgggagtaccccatggacagctgtggccgaggagaagccagggatgagggggatgggcctcacctccccaccagcctgggaagggggtaggcccctggcaagtaggtgagaagctttttcattcacaagttgtccgggctccccattcctctttgtcaggccagcgggtgtgggcagtcgggggaggctggggtcctgacacaacaggagtacatctgctggcctagggcctggagaccttctcctacaggtcgggaggcagccctgggcagcgggcattgcggggactaaagagaaacaagagcaggttgtgtgcagggcaccccagccactccagaaacccaatgggagggtgggggctaggaccccaagaagctgaattggggtgcagtgccgccaggcctcccctgtaggagtcactttgggcttcctgtcccaacttgtggtgggagctggggcaaggttccaggggtaccccgaatgaatggggctgttcccaagctggccagggagcctggaagcagatgagatggggccgcagagcctggtttgcggaggggagaggcagacgtgtcctgcagccctctcttcttcagaggccccctgcgggtgctgaggggagagtggcttaggcgttgcaccccaggagactgaactgggtcagttcccccttgtttgctgccagagaaatgggggtaccattgtcagggtgagctaaggaggccctgctgacattggcccaaccaggcccctcctttgcggctgctgtggggactttcgagagcagagcacacccctaagtgcgtggagaggtaagcacagctggtgagcacacggggacagcgacggagctcatggagacccaggtgaccttaaaacaccccagggccggctccggccccagagagatgtggtccgagtagaggggggtcagcagtgacctggtgggtgggtgtatttgaggggtgcctgtgttgaaagctctgcagtagattctaaggagcagccaggg

SEQ ID NO: 17952 - DNA, 1120 bp, Artificial sequence
  DNA replication origin
tgtgacacagcccccatcctgtgtcctggcctggttgccccaggccctcctgctggaggcccaggaagatctggcgccggcccctgcactgtttggtcaccatgttcaagccccttccctcctccaggccgctgctctcacttcagccgcctcttcagagaacctccccagccctcaccccttctccctgcaagataaatcccccggcagccctaccctcacctccacggactcctccctgccccacctcgcaggtgatgaccaactctcaggggggttgggggagcccagagcatgtgggggctttcacccactcgacaccaagcccaggttcctgttgactgtccagggctgtatgtgtgcctctgtgtgtgcacttgtgtgtctgtgcacatgtgtttgtgtgtgcatgtgtttgtgtgtacgtgtgtgtgtgcaagtgtctgcatgcacgtgtgtatctgtgtgtgcatatgtctgtatgcgcatgtgtgtgcacgtgtttgtgtgtgtgcatgcgtgtgtttgcgtgtacgtgtgtgtgcatgcatctgtgtgtgcgtgtgtgtctctgagtgcatctgtgcctgtgtgtctctgtgtgtgcatgtgtctgtgtgtatactggtgtgtgcctgtgtgtatctgtgtgtgcatgtgtgtgtctctgtgtgtgtactggtgtgtgcatgtatctgtgcgtgcatgtgtctgtgtgcatgtgtctctgtgtgtgtagtggtgtgtgtatgtgtgtgtctctgtgtgtactggtgtgtgcatccgttggagcatgtgtgcatgtgtgtgtgtctgtgtgcacgtgtgtgcacgtgtgtctgtgtgcatgtgtgcatgtctgtgtctctgtgtgtgtactggtgtgtgcatgtgtgtctctgtactggtgtgtgcatgtgtgtgtctctgtgtgtgtactggtgtgtgcatctgttggagcatgcgtgcacgtgtgtgtgtctgtgtgtacatgtgtgcattgtgtgtgcaagtgtgtctgtgtgcactgtgtttgtgtgtacatgtgtctctatgtgtgtgtgtattgtttgggtgggggtcccctgcttgctctcagccctctcttggcccgaccctg

SEQ ID NO: 17953 - DNA, 1000 bp, Artificial sequence
  DNA replication origin
agtcagggagtgagagagaatgagtgagggaatgagtgagtgagtgaatgagcaagtgagtgaatgagtgggtgagtgaatgaatgagtgagtaaatgagtgagtgaatgaatgagcgaaggagtgaatgagtgagtgaatgagtgaatgagtgagtgaatgagtgagtgagtgagtgattgagtgaaggagtgagtgaatgagtgagcgagcgagtgactgagtgaaggagaggtaggggtgagggaggggaggcccaggcaggggcgggtattcccagcaggatgtgctaccttctaagcgggtcttgggttgggccccagaggctgcaggtgagcgcaggggaagagcactgcctgcaggaggctcaccctgctggaggtcccggtttgaggctgaagcctcaaacggtctgggggcctggccgaaggcagagctgggcagacaccatccctgccctgccagggctgccctgggccccaggtggctcaacacagctgggaactgaaggaggcacctggattttgagggagacaaactgcgtgggtcctgtctgaacaggctcatttcagcacccagtgtgtggggcagggcccccatccccggccatgctcagtggccagaatgagccctgaatcggagctaaaggcagaggtgagggtcccagagaccccacatctccttcggaggccaggcgcctggccccagtgtggagctccaagcccctcccccagcgcccagccacatcccctgggaggaccaggggccctgtgatgtggggccaccaccctccccctgacccctggcattcagccaggtgggagaaggccagcttgttcctcctgtggtgccccgcccacatgtccctccccaggctggggtgggcgcagcctcattggagcaaacagttccttccttcttgcccgtgactggggtctcaatgtttcccttgcctcccatgggtccccctcactttcccacaagcacttatggcataaaa

SEQ ID NO: 17954 - DNA, 1144 bp, Artificial sequence
  DNA replication origin
aatgagtgagtgaatgagtgagtgagtgaatgagtgagtgagtgagcaaatgagtgagtgagtgaacgagcaaatgagtgagtgagtgaacgagcgaatgagtgagtgagtgagtgaatgagtgagtgagggaatgagtgaatgaatgagggaatgagtgaatgagtgagtgagtgaatgagtgagcgaataagtgagtgagtgaacgagtgagtgagggaatgagtgagtgagtgaacgagtgagtgagtgagtgaatgagggaatgagtgaatgagtgagtgagtgaatgagtgagcaaataagtgagtgagtgaacgagtgagtgagggaatgagtgagtgagtgaacgagtgagtgagtgagtgaatgagtgagtgaacgagtgagtgagtgaatgagtgagtgaacgagtgagtgagtgaatgagtgagtgaatgagtgagtgagtgagtgaacgagtgagtgagtgagtgagtgaacgagtgagtgagtgagtgaatgagtgaacgagtgagtgagtgagtgaatgagtgagtgaacgagtgagtgagtgagtaagtgaacgagtgaatgagtgaatgagtgagtgaatgagtgaatgaatgagggaataagtgagtgaatgagtgagtgagtgaatgagtcagggagtgagtgagagaatgagtgagggaatgagtgagggaatgagtgagtgagggaatgagtgagtgagtgaatgagtcagggagtgagagagaatgagtgagggaatgagtgagtgagtgaatgagcaagtgagtgaatgagtgggtgagtgaatgaatgagtgagtaaatgagtgagtgaatgaatgagcgaaggagtgaatgagtgagtgaatgagtgaatgagtgagtgaatgagtgagtgagtgagtgattgagtgaaggagtgagtgaatgagtgagcgagcgagtgactgagtgaaggagaggtaggggtgagggaggggaggcccaggcaggggcgggtattcccagcaggatgtgctaccttctaagcgggtcttgggttgggccccagaggctgcaggtgagcgcaggggaagagcactgcctgcaggaggctcaccctgctggaggtcccggtttgaggctgaagcctcaaacggtctgggggc

SEQ ID NO: 17955 - DNA, 1082 bp, Artificial sequence
  DNA replication origin
cttgggcttccggagacagggagatgtttggaaggttcagctcagcctgggtcatggcaggtgacccagagccactgagagcagggtgaacctggggcctgtcctcacccacccactcacccgtctgttcctagaggccctgctgtgtgtggcttgcagaggccgggccgatgagagtctgcccccaggagcgcaccacaggctagagaggacgctcccaccctcgcagcccccatcaaagccatggaggggagagagccacgctgggagaagtcgtgtgtgccccggatggtctggaaaggcctctggggccttgagggacaggaagggggcctgggcatccccagcaaaagcgtatacaaggccttgtggcaggcaggctcccgggcctccaaaacagacaggggaagtggaggccactggatggtggggcccatcccgagggagcccagctgctgggaggcattttgcatcttgatgtgatgacagtgggaagtcccagggcagctctgagcaggggatgctgcctgcaccttagaaactgcagctgtgggttgggcgtgggggttgaaggaggagagaggtgtgggaacaggggtcctggcctggacatgccacgtgggtagggtgccgtttgctgaggcagtgtgagcggaagaggcaggggtggtggggagggggtctggtttgggatgtgtccagtctgagaggcgtatgggaaagtggctgaccctagacctggtaggggggtgcaggtgggacctgacgaggcctccctgagagggcagtggaggaggcacggtctgaggaccggacctggcaggggcctgagtctatcagaggcaaggaaggggtgaggccgtggtcagctcccggggtgtgtgggctccgcaaggcctggtgggagcgaggtgctgggtccttctctgtcaagtggggacagtgagtgagtgcactgagcccgagaggttgagacactacagaaacagcagcggctcaaagagcggaggaaatctgtggatgcccccaccgtgcgatgtcccccccgccatgtgacacacccaccatgcgatgccctctca

SEQ ID NO: 17956 - DNA, 884 bp, Artificial sequence
  DNA replication origin
gaggaagtggaggcaggcaggctgctgcccaggcctctgcagaaggctcgatctggcatccctgggcaggacaggccctccctgccttgggagagggatgttatcagtgggaggggctctggccacccagcctggcatcaggggatgtcggtgtgtttgagtattaacccccagcggggctgaaaaaccagcctgccgctctcacctgcccacctggccccagcccagcctggcacccgaaactcctggtttcagtcttcactgtgtccgaggctgggggctcctccttctgccagcaaaccccagcccctgcccccatcatcgctcctgagaaagcccctcccactcctgaggaaggggtgcctggccgggccccactgggtggggcaggccttgcggggctggggcactggagtcactaggagcagggcgagtctggacaggtcagggccaccctcgagtctccaggctggtgccagtggggcctccgcagcccacatgggagcaagagcaaggtctgcctgtggaggaacctctggccactctgtggagggccctgcactgggaaactgaggccatctgcatctttacaagacggaggagacagggagggtggggcctagagccaaggagggtggggctcagagggcaaggctgtcccagggggagggaagggtggagggcccaggtggcaggagattggggtccaaaatgccccagatgtggggggctgggctgggctgcacccaccaggacttccttgggtcacctggcacctcctctgtcctacgttacccacccactagcctcacctccaggcccagaaactccacagcagaactgcagccgtgggagctggggaagcccctgagtgcggggtccag

SEQ ID NO: 17957 - DNA, 1145 bp, Artificial sequence
  DNA replication origin
gctgggctgcacccaccaggacttccttgggtcacctggcacctcctctgtcctacgttacccacccactagcctcacctccaggcccagaaactccacagcagaactgcagccgtgggagctggggaagcccctgagtgcggggtccagctgctgccccattgacaggggaaagtcaaggctgggtggggtgggggggatgggcaggagcaaaggcggctcccattggccacctccagtctgaacccagcagctagcacagtggagaaggccccagaagctgccctccctctccacccagcttcctgctgctaaaaaaatggacacaggcctgtctctgacacttcagtgaccaccaggcggtgcatggcctggccctcgagccagtccaggctactgcctgcagagcccggagtagggctcacatgcccacatgggccagcgatgggcccgccattgcgctgggggcccagggcagagacggcccagcaggtgatgtgaaggccatgagcgtgtgggacacatgggtgcccaggggaacaccaggagcacctggggcagtgtgggcatgagggcagcagggcagtgtgggcaggagcacctgggggagtgtgggcaggagggcagcagggcagtgtgggcaggagcgcctggggcagtgtgggcatgagggcagcagggcagtgtgggcaggagcacctgggggagtgtgggcatgagggcagcagggcagtgtgggcaggagcacctgggggagtgtgggcatgagggcagcagggcagtgtgggcaggagcgcctggggcagtgtgggcatgagggcagcagggcagtgtgggcatgagggcagcagggcagtgtgggcaggagcacctgggggagtgtgggcaggagggcagcagggcagtgtgggcaggagcgcctggggcagtgtgggcaggagggcagcagggcagtgtgggcaggagcacctggggcagtgtgggcaggagggcagcagggcagtgtgggcaggagcgcccggggcagtgtgggcaggagcgcccggggcagtgtgggcagcggggcagctggggccatccctgggcctgttgggctgctcagccccctcccagtccccaggccctcactgcctttggccactgta

SEQ ID NO: 17958 - DNA, 2470 bp, Artificial sequence
  DNA replication origin
aggccaactcactggcccaggaggcctccctcacccctgactgctgagttgctgctcccaacacctttctgcccacatggtccttttagagctgccgccccccagctagcctggtgccagccagggactggcagttcccttctgcgtcctcagcccagcctgaggacacctagaggaggtacacagtcagcatcagcttggtggaaacatattccctccctcatggctttgtcctcaaagaagggaggaagaataaaggaggggaggagggagggaagaagagagggaaggagggagggaggagggagggaaggagagaaggaggagggagggaaggagggagggaggagggagggaaggagagaaggaggagggagggaaagagggagagagggaagaagggaagagagagggaaggggaaaggaaggagaggagaagggggaaggaggggagaggaagggagggaggaagggggaaggagggaggtaggagggagggagggagggaaggaggggagagggaaggagggagagaggaggaagggagggaaggagggagagggaaagagggagagaggtaaggaggtgagagggagggaggagggagggaaggaaggagggaaggagggaaggaggagggagggagggaaggaggggagagggaaggagggaaggagggagaaaagagctcaggaatcctttagcctttgaagtggctcccagggggacagcctcactgtccctgccccaattacacagttacacagtaagagcaccaataaaacctgagcatttgatcccaatttcaaagatctttgatccagcctgtgcctcccctgtccctgtgcccggggcgccgggtggggcccagcctggcctccctggtcctcctgcagaagcccctccgcatcgctctcggccgggtctgtatctctcctccccatcttctctggatgcttctgtgactctctcctgactgggtctctctccttcagtcagtctcccactgtctctctgtctcactgtctgtctctttctgtctctttgtcctctgggcactggccccacttcctgggaaaacaggagctgcggggtctccttgttgagggacaaatgccaaacgggccggggccatctgctcaggggccctggaaaactggcccaaagctccagcaaatggccctgacgatggggccttccccgcccctgccctctgcggggctcttcctggagaggctgtaaagagttactgagtgtgtttcccccgggtctgttgcgggcaggcggggtacctggtggctgggggaagggaaggcatggcatgcccctgctctgaggagggcatcccagggagagtgggggtcttctcccctggaatatggcccagacccctatctcaggaacctgaggcccccagggcagggccaggcgggtgggcggccatggccaaataggggctccaggcaactcccggtcagtgttgcgcggcccctccctgcagctgcccctccagggtgtccacaggacattcccagtgcctgctgcacccccagccagctgccccaaggtcacatttcttggcagataaccctcccagcacccactgactggccccgggccccagacttttcctgagccccctctccaaccccccgcactttttggggacccactttccaccatcaccgctagggacaggtcgggctgggggcaggtcaggctcggaggggaggcccctggaggaacagtggctctgagggtgagcagctccttgggaagcaccgctgtagccgggccagaggaccgcggcttctctgcctttccctcggcaaatcttttccgagcacctgctctgccaggcctggagcaagtcagttgaggtgcggaggagactgggcactctctgtcccccagagcccatctgtggggtggtggcagcagccacaggccttcaagcgctcaggcctggggcttggagggtgacccagaggtctgcgctgcctggaaggctgccgcccctgcgccctggggtactagatggccctggcatgcgccttggaacgagcgggtggcattggggtatccaatctccccccgcccctccctgcgatgctgcctccctgccagaagtgcttgccagtggaattgcccctcccaccgggccgggcagtggagggcagagctatcagaaggctccccagccctcatgggcttcaggggacagagggaccagggagtcgggcaggtttggccagctgccacctccctaaggcacctgcagggaagggcggcagtttctaggaagccagctggcagggtggtcctgcccaaagggttaccgagggctgctgtgtggagtggggctgcagctcagccaggcctggggaggcgatgtgactgcagcactggagagcccctgcacagcccgccgccctgcgctccagaacctaccgtcctctggggctcccag

SEQ ID NO: 17959 - DNA, 986 bp, Artificial sequence
  DNA replication origin
cgccttggaacgagcgggtggcattggggtatccaatctccccccgcccctccctgcgatgctgcctccctgccagaagtgcttgccagtggaattgcccctcccaccgggccgggcagtggagggcagagctatcagaaggctccccagccctcatgggcttcaggggacagagggaccagggagtcgggcaggtttggccagctgccacctccctaaggcacctgcagggaagggcggcagtttctaggaagccagctggcagggtggtcctgcccaaagggttaccgagggctgctgtgtggagtggggctgcagctcagccaggcctggggaggcgatgtgactgcagcactggagagcccctgcacagcccgccgccctgcgctccagaacctaccgtcctctggggctcccagggccaggtgtcggcttcacagcaacaaggcccaggacttgcatggggcgggggaggggggtgggggggcggaggggagggcgacttcggtgttttccagcattattctagtggccacagcccccaggcctgtttcctctgtaaatggagatggcagcccaccccacgggcgctggaggggagctgaccctcaggccagtcaggagccctgtgacgggactcgctggagggcacccaccctcgggaccaggctccctggactccaagcctgcgcccccacgtccaccctgctggtaggaggcctcggggtgtggcccctgccaatgagctgctccatgaggcactgagccattgacctctgccccaggctgtgtggcccgaggctcagcgctcagcagtagatatgggcatgagggggaggtcaggtcagagccgcagagctgggaactcagcgctcagcagtggacggtgggttccgggagcagaaaaggttctggcctctccctgtagcctgagctgggaaggcggccatggggggcaggtgcggccaggcaggggaagcggccat

SEQ ID NO: 17960 - DNA, 2051 bp, Artificial sequence
  DNA replication origin
ggccatggggggcaggtgcggccaggcagggggggcggccatggggggcaggggcggccaggcaggggggcggccatggggggcaggtgcagccaggcagggggggcggccgtgggggggcaggtgcggccaggcagggggggcggccgtggggggcaggtgcggccaggcagggggggcggccgtggggggcaggtgtgggcaggcagggagggatccctacaggtggcagctcacgctgcaggaccagcggccccaggaacacaagggctgccctgtgtgtgtctgggggaccaagggggtgaacctaggcagccgtagaccacaggctgggtggccactcatgtggagtccaggggacccagggagctccaggaggcctctggaaccctccagaaccttccagaacttcacacttgaattttgttctgtcccaggcaggttctccagcctcaggtccaatggccaactcatgcccagggcaggcccagtgtggggcttgggcgccgagggagggaccgcacaccttgagttcctgccgagtccagagaatggaggaagtggccagtgagggcccaacttgctggtgggcctctctgagcccagcatcctcttctgaaatgggggcgtgatgttcctgcctcccagggagatctgcagaccagccctgcgaggtgtggagtcagcccctgcgcgtgcccggtccccactcacattgccacctgcctccggtgtggctgcgaagtcggagggaggagagagccagccaggggtgtgggcgccaagatcagagactcgcacgctgctggacggaatgtggaccggcccagctgctgggtcacctgccggcagctcccgaaacaaccagtcaccacgagacccagcaactccacccctaggtgtgcgcccaagataaacggaagctcctgtccgcacaaacacccgtgcggcttccttcactaagggtggaaacggcccgggtgcccatgggtgggtgacggatgaaccgggtagaccgtctgtacaatggaatatttatccttccgccacaaaaacagaagaaattcggacgcaggcttcagtacggacggggtttaaagttgtgatgtgtacgccacagtccgtgtgtgattccattcccgagaagcccagcgctggccagcccctgggaacagaaggtggctgagtgggtctttatggctggggggctggggctgggctgatgacgtttatttttgatgaaaatgttctgggccaggctttgtggtggctcacaactgtgatcccagcactttgggaggccgaggcgggcggatcacctgaggtcagaagttcaagatcagcctggccaacatggtgaaaccccatctccactagaaatacaaaaattagctgggcgtggtggtagcacgtgcctgtaatcccggctactcgggaggctgaggcaggagaattgcttgaacccgggaggcagagattgcactgaaccgagatcgcgccactgcactccagcctgggcgacagaacgagactccgtccgaaaaagaaaaaagaaaatgtcctgaatggacggtggtgacggccgcacgtagctgaacgtgctggagatggtggaatcgccactgtcggtggagaaattcatggagcgtgaattacggccgaccccggaaaaacgcgggtttgaactttgggctcacctgcacgtggattttctcctttctctgctgctcctgggtcagcaagaccagcccctcctcttccttctcctccccagcctcctcagcatgaaaaagaccaggatgaagacctttagggtgatccgcttccacgtggagacgaggaaatgcatcctctcttccttaggattttccgaatggcattttcttttctctggcttactgtattgtaagaacacactatatcacacattcacgatacaaaaacgtgcatcgactgtttatgttattggtaaagcttctggtcaatagtagcctatgagtagttaagtttcggggcaatcaagagttatacttgggtctggcgcagtggtt

SEQ ID NO: 17961 - DNA, 1037 bp, Artificial sequence
  DNA replication origin
caccacacagctgggcaagagtccctagtgtgcggcttcctcctgggagcctcccagcagctgacgtggccccgtcatcccactctccagagagtagcgctgaggctgagatgctgctgaccatcccaggccctgacaaggcgtggtgtgtgctgtgcgcacaagatcccacatgggtgctctgaccaggttccccaaattcaaagggagaacatggaggaccagggagggacagggccttggcccaggtctctaggtccaagttttgggagctgcctctctctgatgccccctgtcctctctggggaccgagcaggctgggacatgtgcagtgggggctgggcctcctgcagccccacgagatcctgcagctgctcagccggtgttgcaaccgggctcccccactccagacgtgtcccaacctgcagcggcccctgcccctgggcccagaggaaagcctcgcccgccttcccagggccaggacaagccccagcgaggcctggcccccgtgccagctctgagcgtgagaaagtgctgagccggggaggagggtgtggagtggctccaggtgagtgcccaccttcttgagcccagcccccagcttctgcccttcctggccgctgaccctggccctgtcctggagctggggcagagagtaccaacctccagcccctcgggggctggcccctggctgcagctcccacgcctgcccctcagctctgcccctgaagcagtgcgtggctgcacacagctggcgctaaatagctgtctccatcaggacaggaggcagagctgggtgtctggccatgtggccagcaggggtctgtaggggtggaggaggctcgccagagcagttccttccttgttggagtcactgatctgggctgtggtgggccctgggtcaggtgtggggcctgggccaccccagagatccctgctgtcctgctgtcccaagagccagacacagagcccagagtctttgggcctccttggcagccctggggttcccaggatagggagccccacattcccagcat

SEQ ID NO: 17962 - DNA, 2883 bp, Artificial sequence
  DNA replication origin
gcagctggtgcccgtgagccaggggccaggcgggaactccgtagacccctctgagcccagagctctgtgctatttttaacaccactgggagaagtcaggcaaatagtgtgggcccctccccacagccctgtgacctccacccctgtgtttgcactctcactgggcaaacaggcggcgataaggcagagattagaggatcgctcagctcccaataaacagcttcttctcccccagcatgggattcccagcaccagaccccaggctggcagctgcaagggctgagagtgcaggtgcccccgccctgcccccacccctgcccccgccctgcccccacccctgcccccgccctgcccccacccctgccccgccctgccccgacccctgccccgacccgtcgtggctctggcttcccggtccgaggcatctccggcaccccggggcacaccaccaacccaggagcccctgccacccccgcagtcccaccctgcaggtgggcatctgccggacggggttggggtttgtctccagcaagggccaaccaggttgggtttggatggacatggttggagctcggccaccatgcacctgctgtctgctttgccgttgctgccccgtccagcctggctctccaccttttggtgctggctaggaagagttgaggtggtggaggggacgtgctgacacacagcaggcacttggcaagccggcgacctggcctcccagccccacactggcctgcctggctccctcagctgccctccggcctgcgcctggcctccctcctgcacccgctccagctggcccgagttcccttgaaagtgcagggccaggaggggacatggcagccagggaggcatgatggggcccagcagagtcgacagtcacttccagagtggcgggaggcgctcgccctcggcaaatgccactcgggatggactcagtctggggtttgggcagagtttgagttggagatccgcagagctgaggctaaggttggtttggagccagggtcagtctgtgcctgggatcagaagccaggctctgattgaggtcagaggtcaccccgtggctgggatgggaactcattctgtgcctgggtcagggctcaggctatggctgggagcagagtttagtttgtagctgggatcaggggtcagtctatgcttttgaccagggctcagcttagtctgggatcaagggtcaatttgggctggtgatgggggctcagtctgtgaccagggtgaggggtcgacctataggtggcctcaggggttagtctgcggctggggtaaggacttggtgtatggctgggatgagggttcagtgtgtgactgggatcagaggccagcctgtagctgggattagggatgagtccatagctggagtagacacgcagactgtgtctgtcaagacttaatctgtagctcggatcagggctcagactgtagctgagattaaggatcagaccagggcaggggctggagttcaacctggtctggacagtctctgcccctgccccggccgcccatttttccccagctgtcctgggtcaagttgctgcagctgaactttgcttcctctttggatcagagcgttcttggccagcacccagcagctgattccccaggggagaggccccgttcccgccagccacattcccacgccggcctgggaggctgccagagagtggctgggtgtcgggggctgcctcccaggggacctgcctctcaccctgcccagctctgaggacagcacgagattcctgcagatggagctcctaacctgtgagttcccttccccagagcccagtgtccccgttcccgccttcctgcccagggcgaggggccggggagatggagggctttgcaggcctgcagaccaaggtgggagaggccgggcgcttcccccaggttctgtgactcaggaagccagccatgggtctgtatctccctgggcctcggtttccccaggaacagagtgggcaggggtgatggctggacgggagccatccaaggcccctctggcctgtctctcatcccagtgtgacaaatctgactggccaaggatgcacgggggccttggctgctcctgggggctgacaacagcctgggtccctatagacccattgaggcaggtgggtcccaggaggagccagtttgtccttagaaccagaggcccatcccaggagtctgcgggtgagacctccaggtgaggcatcacctccagcgggttcgtgcaggggtcgaggcctgtgtggccagaggggcccggctggctctgagagactggctggcggctggagcaggtctggggcaggtgcaccgtctgagggtgactccgcccagctcccagctccagggggctgaggagccccagcagttctgggtggacagctctgaggtcaaagcctggggctgggtgaggctgagagccaggggccacagggctccatccccagtcctcaggctcaggggcccttaggaattcctgactgcacgtcctgaaggcacagccaccacacagctgggcaagagtccctagtgtgcggcttcctcctgggagcctcccagcagctgacgtggccccgtcatcccactctccagagagtagcgctgaggctgagatgctgctgaccatcccaggccctgacaaggcgtggtgtgtgctgtgcgcacaagatcccacatgggtgctctgaccaggttccccaaattcaaagggagaacatggaggaccagggagggacagggccttggcccaggtctctaggtccaagttttgggagctgcctctctctgatgccccctgtcctctctggggaccgagcaggctgggacatgtgcagtgggggctgggcctcctgcagccccacgagatcctgca

SEQ ID NO: 17963 - DNA, 894 bp, Artificial sequence
  DNA replication origin
gagggcagctgagggagccaggcaggccagtgtggggctgggaggccaggtcgccggcttgccaagtgcctgctgtgtgtcagcacgtcccctccaccacctcaactcttcctagccagcaccaaaaggtggagagccaggctggacggggcagcaacggcaaagcagacagcaggtgcatggtggccgagctccaaccatgtccatccaaacccaacctggttggcccttgctggagacaaaccccaaccccgtccggcagatgcccacctgcagggtgggactgcgggggtggcaggggctcctgggttggtggtgtgccccggggtgccggagatgcctcggaccgggaagccagagccacgacgggtcggggcaggggtcggggcagggcggggcaggggtgggggcagggcgggggcaggggtgggggcagggcgggggcaggggtgggggcagggcgggggcacctgcactctcagcccttgcagctgccagcctggggtctggtgctgggaatcccatgctgggggagaagaagctgtttattgggagctgagcgatcctctaatctctgccttatcgccgcctgtttgcccagtgagagtgcaaacacaggggtggaggtcacagggctgtggggaggggcccacactatttgcctgacttctcccagtggtgttaaaaatagcacagagctctgggctcagaggggtctacggagttcccgcctggcccctggctcacgggcaccagctgccaggtggaggcctgaggtattgacactccccggctctgtgtttggcttctgatagcggcccaggagggcgtggctggaggggccctttctcaagaaaagcccagagaagtggtgtccagccccctgccctgccc

SEQ ID NO: 17964 - DNA, 933 bp, Artificial sequence
  DNA replication origin
ctgagcacccctccacaaaaataaaagtagtaaacaacatcatattttatgtctgtgctggcataaagacaaatatattcatattatgtattaaagcattttcttggccctaaaagttcagtttttttctcctgattttaaaagaaattaaaatatttctgtgaggccctgcaagcctcccaggtgctggtgttcgggcctaaagccggagtcggcccgcaggggatgccagagctcagagatggggaccgagagaggggttagaaaagcgtctcagagccatcgggccgggagagaagaggcaggaagaaaggggggtcgcagagacggttgtggaggccagctggtcccagcagccgtgcctgtggccacagcggccggaggtggcagcagctggacgagatcccgcaacatcctggaggctgcgggcggggcgcgtggaagttgggggctgcgggcggggcgcgtggaaggtgggggctggggctccggggaaagtactgctgctggggtcggctacggtggggcctgggtccagctttctggggactcagtgagcaggggtgctgaggcccaagctggctgccggggagatcaagtggctggcccgagccccaggcctcagtttccccacctgtacaagggagggttggataagagggtctccagagaggttcctaaaagccaaaggaagaaattgtggtgctggcggaaaggggagtgtcatctcggtcaaggggtcttcacccagtattccagaaaggcgatggggtgaggcagctccccccggccccacaatcactgtgtcttccagctagagctcagccctctctcccgggactcctcctggggtctgcctgcccagggacagacgccgggccagctgccagccggccctctgtccccctacctgtgggcgagcgcctccccctg

SEQ ID NO: 17965 - DNA, 1604 bp, Artificial sequence
  DNA replication origin
agtgtgtgcatgcacatggaagcatgtgtgtgtgtgtaaaccaagtttcttcaaggcatgcgtctaacagggcttctctgttcctccccatctagggcccctccccttctcagccccctcctcatctgagcaccccagggcattgagggctacagccctcccacacgcagcctccacttggcccggtgggtggcgccaggtgtctggggaatggtcgcaggccagcgtgggtgggaggagacgctttgctggaagacgctggaggccgattcaccccaaccagtccctctccagtctctcctctgctcgggggtctttgactccttcccccactcccagagcccctggctcagctccaggagctggtgggcagggggcactgcccagcctctgccttggacagctgaactcagaagagttgtgttttcatttccccttggtcatttgtgaagccctggcaggtgcaggctgggagtggctgtggccggcaggtgggggtgcaggggtgaggcagcgagtggtcctacagatatgcgggcagacatgggcacagcgggacccagcccagcctgggaggagtggggaaggggagacaggagtctggggtctagggggtgagagctgctgaggggcagcctggggctgggcaggacaggcccatgggagccaggttgggggtccagtgtgagattcccagcaccagaccccagtccaggatgggtcttgggcaccgcagtaaggagaccagtgggggctgtgaggaggagacggtgcctgagggagtggagctggggacagggtggtgtcgtcgcccccctcccctcccccctgcaacaggcagggctggggccttcactgtgacacgcctcggttgggcagctggggtgatggtgacccagctgtggggagcagcttagtttgagaggttatggggtgcagagaggaactgtgcaggctaagaagcatttgtgctgtgccagggtgggtggggtgaggtgtgcccaatgccccaggtcccccgcccaacaaatcagagtcgcagcatatggctggcagggcctttgtttgccaagaagggagaaggggctgggaagccctgaccgggcccaggctcaggggccttgggcagccaccaggcctgggtgtcctagctggatagccctcggctggcccagagtgatgggtcctgatgccaccaggaaaccaaagtgcagagtggtgggcacagggcccaggcgaggaccccagtctccagggaccccccagcaagacaggcacaggtgcagccgcctccaccctgcccagccctctcaagccttgttcagtggccccgtggctgttcccacgatccatcccggggccccactccccagctggacacaggacagaggcgggggaatcccggacacacaggttgctggggagaggagccgagggccccaggggcaaacccagggcagggagcctgtggagttcccgcttgctcacctgtgccatcagctgcagcttcttcctcgaggtgcacagggcggtgtccgaagccaggattctgagtggctctcccagtgttcacaggacaggcaggtccatgaggcagggttgct

SEQ ID NO: 17966 - DNA, 1374 bp, Artificial sequence
  DNA replication origin
ctcctgcctcagcctcccgagtagctggaattacaggtgcccaacaccacgcccgactaatttttgtatttttagtagagacagggtttcaccatattggccaggctggtctcaaactcctgacctggtgatccacccgcctcagcctcccaaagtgctgggattacaggcatgagccaccgagcccggactgaattgtacattttaaatgggtgaattgtatggtatataaatgatttcttaataaagctgttatttttattttattttcaaggtggagtctcactctgtctcccaggctggaatgcagtggcacgatctcagctcactgcaacctctgcctcctgggctcaagcaattctcctgcctcagtctccctagtagctgggattacaggcgcccgccaccacacccagctaatttttgtatttgtagtagagacagcatttcaccatgttggccaggctggtctcaaactcctgacctcaggtgatctgcccgcctcggcctcccacagtgctgggatgacaggcatgagccaccgtggccagccataaaggtgttattcaagaaaaagaagaaatgcctcagacctgaacgcttcccaccatcttggctgagcgtttgaccacatcggtggatgccccactgggttgcattctagtccgtgccgatggcctctgcgggggctccttccaatcccttgagacgtgggccatgttgtaggggatgctggcagttagtgggaagtgtgagcactgaggggcccccagtcctggagaggaagccttctgggctgcgggtctctctcctgccaggcatcccgggcaccatgcagcccctgccaccctgggctcagcctgccccgtgccctctgcagtccttcctcagccaagggcagctcctggagtttaggggatgggagtggactccttctggggtgggtggaacctctcctccacccagctcagcagaccggttgtgaggttgccgcgtaggcaccatgggcagtcgggggtaaggatggatacctctcggtagctgatgcggggctcacgctgggctggcactttaagacagatgccggaggagcagccaggggtgtttgtggggcacatgggccgggccaggccagcgcctctctgggacctcaagcaggagagtggtcggtccagcccgggagggagcctgtggctaggcctgtgcaggagtcgggggggactctcggtggggaccctcccggcagccgaaactgggggagggagagcagaacatctggccctgctgggttggggctgatgcttctgtttagccgtagcagcctccctggggttgatttcctagagctcctacacccccagtttgtccggggcc

SEQ ID NO: 17967 - DNA, 1868 bp, Artificial sequence
  DNA replication origin
caggctgtcacccaggagtccagtgccaggaggacagcctggggaggacgcagactctgccctcgccccttgcctgtaagcacagcagtcagttcaccgggaaggcccccagcgggccaagccttagcaactcgtgcactcggctacttagctattcctgccccgagctgtcccctggccggataggtctgatgacaggggctgctccaggttgggacataggacaagctggggtgggggacatggggctccccaagaagaggaaggaagggtgaggcagcctcctgtgccgagcatcccagccctgtccggcctccaggctcacctgggccggtcacttctccctctgggcctcagtttccccctctgtacacagaaagggctggatctagcccaccccatgcttgtgggtccttccaccaggaggccagggcagatccaggggcatgcaggtgggggaggagggggcaggccgcagggatgcaggcagagggcaagagggcacctcctgggatgggggcacaagcctactgggcccctatacggtggagtagctaagtagccgagtgcacgagttgctaaggcttggcccgctgggggccttcccggtgaactgactgctgtgcttacagccaggggcgagggcagagtctgggtcctccccaggctgtcctcctggcactggactcctgggtgacagcctgggggactgggcccggcctgctgccaacttgttcttcactgcaaccccctcctgacagctggagggacaggctggccagggcaggatgagcccctgggtgggagagccagggggccgagggaggcacagggcggctgagggtgcagccagtagggtaagggccagatcccagggtggcctagtgtggaggaggtggggaaatggggttctgcctatctgctccaacctcagggcaggggccacctctggaaagaggcccctcccgctcagaccagcggtgcctgggtgccaggagcgcccccttaaaccagctcagtgaccatgaagcaggtgcagaaacaggcccggagaagagtgaggtcctgcctggctgaggccctgagccctgaccacagcctggcgcccagagcagacccttcccctggccgtgggtagaggggagctggttcctgcttgagggggaggcgcatcgcgtgtgggtgaggtttccacctgccctccaaagtcccgtggggaatttccccagctgccccagcctcccttggctcaagttgcccagctgagtggggctggagaggtgggggcacactgaccgcccagggccagggaaatgggggtgtcccaggcatcaggccgacaggggctgaccccaaagcagggctcacaccccacggacagcggggttgggagaggccctgctctcctggggttccaggcgtgccctccaaagccacccagctcccttcggcaccgtgtcccctcccacccagcccacctttgccacagtggctcgctcggcctgaggctcccactgccgtgtgaacagggaagatgagggtcagacctggaggctgggacgccgggaatctgacagagcaccccctgtgatcacccacagtgtcccgcatccctccccacacccccggccgcagcctgctgccagcccagagcacccctgtgaagtggggctgagggcattgggcctgcttgcccatctccagggcaggggctcacagcctcactggcagctcttttaggggagagagcttggactccatgcttgtcccctcccgtcaccccctcaccatgggcctcagggacccacggaacaggctgttctcggaccgctcagcctgtcttgccaccccagtcccttcctgccggg

SEQ ID NO: 17968 - DNA, 1383 bp, Artificial sequence
  DNA replication origin
acctccgcctgcactaggcctacaggcccctgtcctgcacctaccccgaccccatcctgtcctgagctgattgtcctctcggatccgcagcccctggcctcagtaaaatggggttattgcctccagccctggactccctggcatggggatgggaggctgctgtgagtggagctggaggtctctccatgtaacccagggtgctgggcaaggggcctgcagatgggtccgagagggccaccagcttggtcctaccttggtgcatgggagctggaggaagggaggggcccaggtccctggagaggagtccccaaaatgaggccgccccaccctgcaatccagtggccactgctctggaccaggggccctggaagcccctggcacgtggtccaagggacgaccagagcagctgctgtcagggggcgttcctcatctgactggggagtcctaggcctcctggcgccctgagcccacgcagggcagctcttacctagcccccagcagtgaagtgttcagagtggggcctagggggcctctgggtgggagagccaccgccaccctccctgtcccctgcccctggcctcatctctggatctgcggtcacttaaccctttgacctgcctccccacctctcctgcctgagtctggaagaggcgatggagcagaaagggcagctccagggctgccccgactcagccctcgctgcccccatcctggctaggcaccatttggaaagtgggggttctcagacaggcttcttggtgtggacgtatgagacaaaaagtggggccttctaggacccactgtggttttgggggctttgggatggggcttcagccactctgcatgaggctggggagagggagaacaagggcgtctccagggtccaaggggggcccacagagtcacccatttgcccaccgcacccagcaagtcatccctaagcccgagccccacgtcccgcaccctggattcacactgctcatcctggctacagatgtggctttggggttcctctccctcggggccagttcccctccccgggcccccgttgggttgctcatccactgctagggagaagatgaggagacctcagccctcgggacaccgcagggcgtagcgcgaagcccctcacagcgggcccagccaagctgaactttgctgccaaccacaggggctgctctgcggagggagagaaaggccagagggtggggttcaggggaagggcgactgggggtgaagtgttggagtcagcagactggattgggatctacgctgggccacccactagcaggcgtttggccaaggggcctcagtggcctcctctgtgcagaaggggaggagactgggacccctcccctgtgacctcgctggggagcagattgc

SEQ ID NO: 17969 - DNA, 1668 bp, Artificial sequence
  DNA replication origin
ccagcccgggcggcgaccggaccccgaccccggcgcgccccgctcgctccgcactcaccgccggatccggggcgcgcacgcgccgccgccactgccgcccgagcccgcgccgtgggggccccgagccccgccccgccccgcccccggccccgccccacctggcggccccgccccgcccccattgcgcagacggggaaactgaggccccgcggcggacgagctgcccccgggcgggcagtgactctgctggaacccggggctgacgcaaacgcgcctctgagccgcggcccgccagcaccccctccgggaatcctggggcccgagtccccgcggcagggcgctcgctgcgcggtcgctggggacgcacgaccaagcccggccgccaggagccaggagaggccgcccagggcgcccacactgacggggctgcgggccctttgctagctttcaagccccccaggctgaaaaccaccccgggacgcccatctcagccgctggggggccgcgcggtaggcgcccggcgcaggttagcactgagctgggtcctgcagcctcgcaggcagtgggcatcatgaccgtccccaccgcaggcccagagacccagatctcctctgagaccacatggcagagcccaggcctgcctcctagccttagcgtgttaggttgggggcccctgcgccggcccccacctggccctctctcaggcatcaggcaccctcaccggggtcactgggtcactgctgagttcagcacagtcagggccatcgcagaacactcctcccagcgaatccacaggcccccagagagtctcctcacaccagaggtccctgggctggtcacctctcttctccaggcctccatttccaaatttataagatggggctaaacagccctgggatctagtgacggtgaggtcgtggccacacaacaattgttacagctgttactgcgggcgcggcacgtggggctcgggccagcccaattcagcagcccctcagaccccagccggagccagcgccctgtgtcataacccgcgtgggcgccggtgtgagaagtgttccctcggagcaaggggtttgctgggactcacctggcggaggagaatcagtcatcccccggacaggggcaggagctgctcctccgggtggtgggggccacctgtgcctccccggtcctgggggctgctggttggagaggagttgtgggttagtgcctatgcacagtcctggtcaccctgatgtctgggggctgggaaggggcccgggaccagctttcggtgctgctgtgggacctccgcctgcactaggcctacaggcccctgtcctgcacctaccccgaccccatcctgtcctgagctgattgtcctctcggatccgcagcccctggcctcagtaaaatggggttattgcctccagccctggactccctggcatggggatgggaggctgctgtgagtggagctggaggtctctccatgtaacccagggtgctgggcaaggggcctgcagatgggtccgagagggccaccagcttggtcctaccttggtgcatgggagctggaggaagggaggggcccaggtccctggagaggagtccccaaaatgaggccgccccaccctgcaatccagtggccactgctctggaccaggggccctggaagcccctggc

SEQ ID NO: 17970 - DNA, 1658 bp, Artificial sequence
  DNA replication origin
tggagcctccaccggtgggacagccccacggtggcgcccactctctcctccgctggccccctcttccagctagccagaccctcgccaggcacaaacagctggggccacagcctgggggcacagggggggtgacgctgtccagagctcttggtgcaggaatcgagtggatcctgctgggcatctgcccgaggctccgggaaggatggctccagctacgggtggccgtttctcctgtcctgcctggttccagggccctcctcacagcagggcaggggtgagtttgcaccccagtctatgcaaacggggtgttcgtgggcagagctgggatccagccccaccagggacctgccggcctcagcccttctggaatttgatttctcatctgagtgtggaaccggccccagcaggtgggccagcagctgcaagccagcaggaaccgtgcggagggtgcacacattctaagaccaccagaggggcggccttcattttagagggggtccttcccaggctgggatatgtgtgcaatcagcctccagggatcctgggacagtggctgtgccaggtgcacacctgggggtgaggagcagcccccgacagtgtcaccggaaccggaatccaaccccctcctggctgtgcagcaggagccaggggcccgggtgaggcttcctgagagcatgagagcccagaattaatggtctgtggcaatgccggggatggggattctgtcctatgcgcagccaggggtctggagacctggcgagcccctgccatgctgcagggtcccacccagggcctctcacgggtgcttcccaaaggctgggtgggttccttccgaggcactgcagggccctccgcagggaaaggccaggcttcgggtcggggcagaggctggggtaaggctgtcccttctctgggattcagtttcctcacacactagaatagggtctctgaggcccctcctcagctctgacagccagtcctataaatagtcacactgtcctcagtcgctgctggccagccccactgggtgtggagcacgatcccacacctgcttcccacgggcactgccaaggcatcacccggtcccagcggggagggtggctgggggtccttcctgggcctccagtcctctgtgcgctggagagaggagggcagggcagaggctgccaactaggcagaggctgccctgggcagctgaggggtggggacttagcttgggggcagggggggcatcacagcagtttttgggcaggagtttgtcgagggggcagagctggctggagattaactctggggatgggccctggatgaaggacactgttaggggctgggtctggtgcgacctcaaggcaagactcgaagtcgggggacattggggagtgggacccgggaaggaagaggtagggcagcggcccggcggcttgatgtgggcagggggatgccagggcgggcctgggggtaggcgaatctcccagacctcattgccccccacacatattggcacagctcccccccacaattcctgagagtcgcctggacaggaagcggtgctaagtggagactcaatttttgaaagtcatgttttcccgaggccagaggaagcccgtggtgctctccgagccggtgctgcaagccccatttccccggggggggccacg

SEQ ID NO: 17971 - DNA, 1500 bp, Artificial sequence
  DNA replication origin
aggcctggcaggggccagcccagggctgcggcggtaggcggtcctatagatggttctgtggggtgggtgggacagctcagaggggcatcctactcccccttagtcacctgctgggcatctagagtcccctctcagagtgcacagggtcaccccagcatgcccccaagggtcttctcctcaagggatggcactgaggggtcactgcacagccgtttccctgcctgggccttccggtgctggccgggactcaagccacagcaggaaggcccagccacactccgcatggagcagaggcagtggccaggcctgtgtgtgcccccacctatctggtctcctactgtgggggcatccaggcccagaggagagggtgtgcccggcctacggcgagtcacggcagagtgtgggccctgggcatcggagcccttcttaaacctccagaagtctgaattcccaggcccctcccccagcagggggtggagctcccacacccaggaaggaggactctgagacttaggggtgtgtgccccttgtgtgggcatacaggacatttcagggtctcatctgtgcccactgggggccgtcatgtggaggggggtgcccagtggagtgggaccaggggagtcaggcaccattctgtgtatatgggaacttgcagccagggatgccagggtagggaggggttagtcccccggaagtggaggggtgcagacaggatgggtgacccctctaaacatggggatgctcttagaggtgcggtcctttgagacgtgtcggggcaagagcaaggattaggacactggaggtgatcgtggaaccccttggctccggccgccctgggtcgcccatctcaggcagccctctcatggctctggcctcagtttcccatcttgggtcccaggattcacccccgcctcgcccctgacatgctgatgtgtggccgacttgggaggctggggctgggtgagctcggtgtggtggggcactcaccggtaggtgctgcaggcccggtgcccgtcgcaggtggtgaggaagggctggtacacacgctgcacgaacgactcggagacagggtccccgtgagcccggacagcacacaccctacggctgcgggggtggagagggggtcagcccaggagtcccagagcaggacccaagaatgatgggaacatgtggccggggcaggaccctcagcaggagcccccagggagtccccgacaggtgctgagggccgcctctaggaggtgctgagggctcccggtccccccaccccagcactcccaggctagggcttggctcacccgggccggtaggcgtgctctgtgccgcccactgccaacaccagaagccacatcagcagcacctcctgagagcccctcatggcctgtgcctccaggcggggtggccttctcctctgggtggcctggggcacaaagcatgacccctaagtctccccgcagatgcccccaggacgcgggtgcagtttgcacttgctccgcgagg

SEQ ID NO: 17972 - DNA, 874 bp, Artificial sequence
  DNA replication origin
ggcagcgggggcggcagaggcctgggcctgagtcttctggctctgcctctccctggggacaggagggagcctgggggtgtgggtggggagccggccggccgtgacccagcgcctggctctgcccgcaggagtggacagtgcaatgaaggaagaagtgcagaggctgcagtccagggtggacctgctggaggaggtgaggcattggtgggggggggggggggcaggcagtccagggtggacctgctggaggaggtgaggtgtggaggggcaggcagtccagggtgaacctgctggaggaggtgaggcatcgggggggtaggcaggcagtccagggtggacctgctggaggaggtgaggcgtcgggggggcaggcagtccagggtggacctgctggaggaggtgaggcgtcgggggggcaggcagtccagggtggacctgctggaggagatgaggcgtcggggggggaggcaggcagtccagggtggacctgctggaggaggtgagacgtcggcagggggcaggtcttcacaacagcagaggcccaggcccgggtacaggctccgtagtctcctgggacatggtcccgacccacggatggctgggggtggtctgaaaaggtcctggccctggggaggtggcttcctcgctgctgactgccgagggggccctggcctggatccatgctgggcagaagcagctggacactgaccaggaccccccagggccggaggaaccaagcttgacagccccccagacaatacacagagcctggacccagacgagacctccccacccccccatctttgtccccaccaggacaaagagctcttgccagtcttcccactggccagtggtccagctgtccccctagttc

SEQ ID NO: 17973 - DNA, 2435 bp, Artificial sequence
  DNA replication origin
gggcttccctccttcctgccccgcccgtcccgccccgctccggggctccggggagagcgcgcctgggccggcggcaggcacaggagggggtcccggagtcagggggtcccggagtcacggggtcaaggagccggcgtcacagtgcccagcaccccaccccccgccctggccccgggcgtctacaccggtttcggcctccgccgcgtccctgcagcccggcgtggggttccgggggtggagcagctttcggagagaaagggggccggtccgcgctgggagaggctcagccctgcttcctgagcggggaaaccgaggccggggcggcggggacttgccccagggctattgatcagggcgcacgacggcgtgggggcacccctcggcctccctccgaccccctcctgactgtccgcccggtgatgggcgcacctgtggggcgggttcccctttctctccctttcctcttcgcagggaggtgggggacccggaggggacctgcttccgtgctggggagcgcgcccctggcctacagctccgggggcccagcttccaagcgaagggaaggaagagttaggactagggttcggcggggctgaaattttcccctggacgccttccagaaggtgggagcttggttttgccaggctggggttgggggccagaggtcagactgggctgccaaagacggcgggggctgcctgctcctgggcggggtggctgctggagaaggctcttgcctgccccctctccctgttagccgtccccaggctgttgctacatttctccctgccctgtttggactgcccagccagtggcttttgcaatggcctggggtgggggcattgtggccccagaggcccccttccccgtggttccaggggcagtgggtgagggtttgctagctccctgcactcgctgtccttgccagccctgggagggcactgaggctgctggaacgggcctacagtcatggcttccaacggagccccagaagctccaggaatatgaaggaggaccctgggcctgatggtgagcatggagagtccgagaagggcctgctggctgctcagccagacgtgtgtgaccagtggtgatgtgggccaggtggcccaggccggggtcccggggagcgcacactccagggctggcccaggtggtgactggcgctgacgtccccagtggagcacccttcagcgaggaaggcagtttgcagaaacagggagttcctgggggctgggctctgggcacctgtgctggaatctgtgaaggcctcacctgtggttctggccctgggatcccctgtaggcaggggtctctgtgaggggcccccctcagcccctggggtgcttcagagtaggggcgagggtgcggctttcccagctgaggaggggccagtctgtgggttccttggggtgccccccaccccgaggaaatggcttgtgtggttctgatgcctgcagggcatcctgtgctgggcgtgtcctggggtgtggacaggggacggggtcctgttcttttggcagaaatgatggggcacctgacttaggagaccctggagcagaccccactactgagccaggccacaggccacgggcctcttcatcggcggcctcctcgtgtgagaaagcctggcttgttctgcaggggcctctgcctggacttcctagctgttttccagggaccaaatcacagttcacctgctgccctttctatggacctggcaggctgggttggctggcactggccctgctgccccactgggccctgtccccatctcagcttggagattctggctaacctgggtgtcctcgggacctggggcctctgatggtgcttggatgggaccctcctgccgccctcacctctccagggcagcacccaggctcaggcctgtggagtagtggcttccgggacactggctactaacagcaggtgctttgttcctgctttggtccctgaagagaagggagggccagagggcagggcagtctggaggagaggcctggggctccatggctaccttcccccacacctctgcacgtgctccccaggccccagggtccctgatgacttccaagactcccagcaatggctaagagtggggctgttgcgaacgtgcgttccctccgtgggggccgtcgggaggggtgagaaaggcagatgaagagcaggcgctttgtcactccagggaagggacccggggggctggaagggaaggaggggatactcggcctctgttcctgctgtacgccacgggtgcctccagcctcaggaacagggattcgcgtgtgctctgtgttacaaataaggacactgaggctgagataagcaacttgaaactggggcagggtccccaagccaggatggggtggaactggggttcgaacccactgacagtgactccagagtacctgcttttccctttccccttgttc

SEQ ID NO: 17974 - DNA, 1879 bp, Artificial sequence
  DNA replication origin
tcgctcccgctcccgctcccgcttctcccccgcgcgctcaggccccttattgcgagggcggcggggctgggcggggcggggcgcggcgtgggggaggagcgcgcggcagggaagggctaggtgcggcgccccgccccgacactgtccccaacaacgccccgacacggtcccctcaccaggccccgccccgccactgtccccaaccccgccccgacacggcccccccttcccgccctgggtcacccggcccggacctcccctccacgctccctccccacagccttctgccaggttaccgaggctctggcgctctgctcccaccctcccggtcccaggggacccccccatcatggcttgccggtggctcgggctctggcgctgccccccatggtctgggcctcctgccccgcccggtgccccctccccccgctgccggggcagccacaggctcccgcgcgcagaaccacagctccccaagggcgtaaaaccagcggggatgcgcccgtgccaggccggtggccacgcaaagggccgccggaaccgcccccgagtgaccagtggccacctggcagaaagcctggctcttagggtgttctcggtcccctgcggggagactcgtgggggcgcgcaggccaactggggcgtgtgtctgggcggggctgggttgccccaccctgggtgccagaagtagccttgtcaccagggacgctccgggggcaggcgaggtgggtgtcaggtggcggcgttcacatccgcttggcagcacggccagcgtggcagggcaaggtgcagctgggacaagggcagcagtcacctggcccggcccccacccggcgtcccacctcagggagcagatggagattgaaaagcagtttcctggggtccctcctcatagggactcttgggtttgctgcagttgcgggagtgctggccgccctgcgctctaacgggtcagcaggggagcacggcccctcttttttcagatgcagagttgagctgttaaaacatttccctgaacattgtaaccaccccccaaactgtactgagagaatgacaaatacagaaactgctcttcaaatgaatggggaactgcggtcctgaaggacgtggggtctcgctgcctgggctcagcagcccctgcccaggcggtcccagcttttcttgaaagtggagacacatccttttgccttaggcctgtaggcatcttacagcgaaacccaggagagcattttccagcccagtctccttccagatccatatgggcttcatctggaatcagcttggagggcctggcttgacctctttccacgcttggagccggaactgcacaccccgcagccgggaggtctgagagctgcactgctgtgcctctgagaggctgagaggtggctgctgacggctgcggggttttcatcttccagggcagatgaggtgggtgcaccctgcagacaggagtgccgctgccgggagctgggggatgcgggggtgtgggctggggtcccaggtggacttcctggaggagtggggcttcacagcaccttcagctggaggctctgtgcacccaggtcccgagcaggttgtaccctggctgtggaatccagtcctcacaaccatcaggcctgtccaggggctttacatgccagcccccttcttgtcctttacctcccagcccaccgacctttccagggtggccaccatcttcctgcacccctaggtgactgtgtgtgtgttggacacctctccctcctctcctccccccggaatggagcccgtggggcctcatctgttttgtgcaccatgtgcgaccagcactcaggccaatgtctggcacatagcaggtgctcagcacacactttccatagtagcaaaggcatcccca

SEQ ID NO: 17975 - DNA, 1301 bp, Artificial sequence
  DNA replication origin
tggcggggcacatgggcctgactaggcctctccccaaagacctgccccggagagacaccaggacaagagccagggaaggggagagcttctcggcagctggagacacggggacgtgtggccagggggcagccacggcacagctgggcctcgggctggacccttcaggggctccttccttccagggaggacatcaaagcctggcttgggggctggacggggaggccaggctatgccgggacctcagcctgcacagagtggctgaggtccaagccgggcatgcctggggctctcgggcagagcgtaccctggccgacgggttgtccggcctcctggtgggtgtgctgggcgcaatgccattcccaccacctgtaaataaagcagcctgtgaatctttcatgggtttgtgcttaaaaatagatgaggtgagccctctgggctggctgcccagacctctgcagcaggcggggcggtccacactctccctagggagtcagggagggcgggtgagggctccaaggggcgctggccagggcacgtgggaccttgggacatatggccccagatgtaggagccaacaggaggtcacgcctttggatgtcccatccggagctcttaggtcacaggctggggtgggagtgaggggcagagcacaccccacagggtccttctcctgccaggatgatgtctgggctgggagacagaggacagaggtggatggagaggacaggggcggggaggcatcaggagacagaagggaggagacggcccagggaggaggggcccacactgcagtagcccttccctgcccagagcagctgtgccctatgcacggcctctcgcacccagcacacctgtgtctaagtggagcctctgaggagcagggagcccgggcaagtcgggctccgtggcaggaagtaccagagcagacgcagagctccggcctctgacgcagccatggctggagctcacacaggaccacggaggcccagagggtgcctgggtcccagtccgagaggggtgtggtgtggggctgaagagcccagggtcagggtcaggcagcccgacccagcgaggagaccctgggtgaccttggatcagccctgcctctctaggcctcagtttccctttcgtgcagggtgcgtgtgatgattcagtgggaccgaggcttgggacggcccaggccagcccaagcaaggcagggatgaaggcccagcccccagcctcggcctcaccccatggctttttactcactgctgagggcggcgtccaatcaggcctagggcctccaagccccctcctct

SEQ ID NO: 17976 - DNA, 1109 bp, Artificial sequence
  DNA replication origin
tttcctccctctagaagctcctgagagaccagcaagggtgttgagataaggatggaggaaggaggagaagggagagggaagaggggaaaagagagggatgataggagggggaaggaggagggggagggggaaggaggagggggagggggaggaggagggggaggggggaggaggagggggaggggggaggaggagggggaaggaggaggaggagggggaaggaggggagggaggagggggaggggagggaggagggggaggggaaggaggccagggaggagggggaggggagggaggagggggaggggagggaggaggggaggggaaggagggcagggaggagggggaggggagggaggagggggaggggagggaggagggggaggggagggaggagggggaggaatcttgcaatctgaataaaaacatctttgggcctcatttgcgccccaggccccccaggctccgccaggctggggggtggaggtgcaggcagtggtggagagctgagtcctggactggcctaggagaccccagtcctggctgcacggcctcaaccacgtgacttggaggggcagctcctcctcttgacaccccagctgttcacccgcacagcctggagcccaccctgctgtcggggctgcggtgagaatctgctgagggcctgtgttgcagggtctggtgtcgcccagggaagttctgcaccaggtcgaatctccaggcctcctattgtgttttaatcacagtctacctgtctagacctagtgtgtcctacagggtgtgcggtggccaggccccagggggccccagggaccctcacctcccagcatctgtcacctcctgccctcccgtgggcttctgggcttggtctgtgcaacccacagcccttggtgggagtgttggtgtgtggcttcctgggcgcccggggcccctcggcggggctggttagaaccggtgctgtggcacagacagcagctggtgccaggtggccctggccggagacactcagggcacatggacgtgcaaagacagcaggcggccgaacacctgtcaccgtcccatgtcacgtaaggggagcagtgcacatcggcactggccgtgtgagcccg

SEQ ID NO: 17977 - DNA, 1296 bp, Artificial sequence
  DNA replication origin
ccctcctccctcccctccccctcctccctggcctccttcccctccccctcctccctcccctccccctcctccctcccctccttccccctcctcctcctccttccccctcctcctcccccctccccctcctcctcccccctccccctcctcctccccctccccctcctccttccccctccccctcctccttccccctcctatcatccctctcttttcccctcttccctctcccttctcctccttcctccatccttatctcaacacccttgctggtctctcaggagcttctagagggaggaaaagaaggtcacagctccactgagggaccctgatcaggccgaagtccagccaggctcagggggaggccaaggggactctggactgggagcgtcaggagccgcagggtcagcggcctgagcccaaggggcccttcgtagcagagctgagcaagccccagggtgtgtgtgtgtgcacgtgtgtgtgtgcgcgtgtgtgtgcctgtgcgtgtcagtgagctctccggaaggagtgtgtgtgcatgagtgggcgtgagggagctagccctggcgtgcgcctgcgtgtgagagcgtgtgcgtgcgtgcatgtacatgcctccacccctctgctgaggtatggaatcagcggtggtcagcacggggacagagacaggcaaggtggttcctaccagatggggcttgggggctagtggggagcccagcaggaacgggtgtctgcatgacctgttggatcaggagggcctccacgaaagggaggtcataggagctggtcccccagggtggattgctcacggggccatcaggcgggtggttggaattcctggcatagggaatagcattggctccaaggcaaggcaggaccagatgaattctgggaccaaaagaagacgggaccagaggaggatgggtagggggctagtgaggctggggtcccagggaagggcagtctgttcccccgaggttgtgcctggggagagagggaagcagccccccgaagggccgctgccccagagtccagtcagcgctgccaccagggagtcccacgagactggggtgggctgcgtctctgcctcagctacccccaggggtaccctgctctctggagcaggttatgatagaaagccacccgttcaaagtctctgacccagaaatgtcacctgcaggaatctgtccccagttaataattaaggaacgggacacagacatagccagttgtgcaaacagtgtgtttcagaaaaagagacagtttagacatcctaagtacccaccaagagacact

SEQ ID NO: 17978 - DNA, 1984 bp, Artificial sequence
  DNA replication origin
gggggtcgaaggcgggccgcgcgccaagccccgcccccgcgcgcctccgccgcgaccctcccccgcgcgcccccgccgcgccgccgtcggccgacagaaaggcgcgcgccctcgcctttaacgcgggcccgggggcgcgcggcccgcatggcgagggagcggcggccgctgcgggccgggccgggccggggctgaggccgagcgagccgcggggcccgcgcagccccggccggagcccaccatgcggcggctgcggcgcctggcgcacctggtgctcttctgccccttctccaagcgcctgcaggtaagcgcggtgcgcgcccgccgcccccggccgcctctgcctggggaggccgagctccagccccggagtgggccgagtacggagcggggccccgggttcggacacgaagggttcatgagcccggggtgggcagcggggagggggcgagtggctccggaaggacgggacgctgggggaggggcggtggcggcgacaggagggtccgggcgcggggatgctgcggcctggaggccctcgccccgacctgcaggcggtccctgccccccaggcccagaaaccacaccgaagtcctttcttcttttctccacttaaaaaatgaggtgtgttattctgcggtagaaaacttgggacgcacagaaacgccctggcaaggacatgacctccccgccccctgccccttcatcccatcagccagccgtagcgcggggaccctgccctgaccccgggatgaccttgaaccaccgtcccctccaggggcctggccgggtccgcaggggaggcccgggccgccttgggttccagctgccaggagccctttcaccttctgctttggggagatgcaggccaggcccatcaggctccaatcatccggggcccggcctcggatgggatgccctcccagaccctccaggaccccagccatctgccggaggcgccagtcctggtcagatttgcctgtatctccccggcccccgcagggtggtcctgggtcagcaggaggaaccctgcctgcgtcctgcctgagctcagggcctggctggcctcagctccccttctgggaagagcgtatggaacctggcaacccacagattgcagcgagaccctctgtgcccacttggggcttcaggttgtggtggtcccggctcagccttggggcagggtgagagctaaggggtctgaggaccaccccagtcgctgggaggtggggtgcacagtggtcccctcccccgaggaaaggcctcgaccagcagctgcagaagagatgctgatgcttggagctccgcccaggaatggcagcagaggggtgttggctgctcccagggtggctggctcggggccagagccctggtgggagcccagcctgcccctctagtggcgagggcctcagtttcctggccttgtgaactgcttttctgggttagtgctgtggggctcctggcccacggtctgagcctgctgggctgaggaccactgtgctgttcccatcccctgggtgaccttccctatcctccaagtggctacaccgggagctggtccccacctgcccctgcaaagccccagcccaggtcctggatggtggggccacctccacactcaagctttgcccgtccatctgtgccaggcccgggagccagggtgggccagggagcactgtgggggccttgcagagcagctgcttgggaccccaggatccacagcagggtcagggatggcagctggggaagatcaagacctaggggagagctgggcaaggtggctcctgcctgtaatgccaggccttaatgggagggtcacttgaagctgggagttcgaggctgcagtgagctgtgactggaccactgcactccagcctgggcaacacagcaagaccctgtctcaaaagaacaacaacaacgaaagagctgggggatgaaccagagctggccaggcggaaataggccctggcccaagcccagtcgg

SEQ ID NO: 17979 - DNA, 1866 bp, Artificial sequence
  DNA replication origin
cgtctctactaaaaatacaaaaattagctggtcgtggtggtgcatgcctgtagtcccagttactcgggaggctgacgcaggagaatcacttgaacccgggaggcagaggttgcagtgagccgagatcgcgccactgcactccagcctgggctacagagtaagactccctctcaaaaaaaaaaaaaaaatttcattcagcagaggaaagaatcggccaccctgtagtcccctggttttgacatttatttgtacctgcccataacactgaaaagtctgggcagcgcctgcccccacctccggcccctgcagcccctggtatgtgaccctggagaggcagagccaggagtgggtgtcgctgagctgggggtgattctagaagacgggggtgccagggggccaaggggatggcaggggaaggctggggtggatccggaggcccttcctgtgggaagtggggttgagagcaccctgagcctgggtgccccgagggcacctcctcacgcagccccttcccccacagggccggctcccaggcctcagggtccgctgcatcttcctggcctggctgggcgtctttgcaggcagctggctggtgtacgtgcactactcgtcctactcggagcgctgtcgcggccatgtctgccaggtggtcattgtaagtgttgcttgtgcgggctggggactgggccgtgccccctgctgcccaagatgctggggcaccaggccctggagacaccttcctccccagacccagggcccacgaggcacgtgggtttctaggtggaatctgcaaagctgcctcaggctgggtgtggaggacaggggtccaggggaggacgggggagacgtgcggggctgcctcaggctgggtgtggaggatgggggtccagaggaggatgggggagacgtgggggctgggggcagaaggcagggcagactccagaaatctttgggagggaggatgtttagcaggaagcctggggtgggcagctggcctcactgctccgggatagagacccccgtgtggtgtcctcactggatgggatagagacccccgtgtgctggcctcactggtccaggatagcgacccccgtgtgctggcctcactggcctgggatagagaccaccgtgtgctggcctcactggtccaggatagagaccactgtgtgctggcctcactggtccgggatagagacccccgtgtgctggcctcactggtccgggatagagacccccgtgtgctggccttagtggcctcgctagcccccctgggaccaggggtcccctgaggcaggtggcagggcaaggtcctccacagcctccacctcagggagatagggctaagtcccctggcgtatgtgagcatgtgtgtgtctgggagcaaacgtgtccacatgagtgcacaccaaggtgaccccctgcccctctccacaccctgtgactagctcagaggggaggtcatcccagctctgtcttcctggcaaaccctagactcgcccagaactgggcaggtcccccactgaattttgaccccaggctgcccgatgaccagggttccgatgcctccactccccttggggtcaggcctgggcatagaaggatctggcctgtagcagcggccactgtgggttgtcatagggtgattgggtgcagggagaccccaggttcggtgtctcctccgtcagatggggagagcacctctcctggcaactgggtggtggatgaagctagccgggtgggcctgggcaggcctgtgtcccacagagccatgtctgacgggggccacatgtggaaaggcccagatgtggcagtggaggactggggtgtggggtccggagctaggagagcttctgtgcccaggacttg

SEQ ID NO: 17980 - DNA, 954 bp, Artificial sequence
  DNA replication origin
ccagcgcacacaacgaggcagcagcagtgcagggccagtcccagcttccaccagggccctcgcgaggccaagaactagaccgtgagtccccactgagccctgctgcaggcggggaacaggctgggcggtgaggggaccgatgtgcggcaagggccctgaggaggccaagcacacgcccgcctcagcctctgaggaagcctctccacactctgctaggtgctggtaggtgcccaggaccatggaggcagctccatctccccacccctgggggaccctggagccccagccccagccccagcctggcagacagcagtgtggcccacaggctccttccccagcaccactgtgtgccaggagcagggcagcctcctgcggtcctggggctccgggcacaggggctggtctggggctccgggcgcaggggctgtgtgatctggggctccgagtgcagggggctgtgtggtctggggctccgggtgcagggggctgtgtgggctggggctccgggtgcaggggctggtctggggctctgggttcagggggctgtgtggtctggggttccaggcgcaggggctggtctggggctccgggtgcagggggctggtctggggttccgggtgcaggggctgtgtggtctggggctctgggtgcagggagctggctggtctggggacgggagtggactccggtggcaaagggcctgcctgcaaggtggagggttggacaagtgtgcagttttccttcattttccttttctgtcttgacgaagagccggcgttttcttgctgccgggacagacgctgccttcatgactcacgtggcggggtcctcggcctccagttggcccatctcacttctgtccccatccttggtgtgtggggggcggggaccctccctcctccccaaccctggagggcggggtgttccgcagctcccttccccagctccctccaa

SEQ ID NO: 17981 - DNA, 1739 bp, Artificial sequence
  DNA replication origin
agaaatgtctcacttactattccgggcagggagggcgccatgagtcagggggtgcatcctccctcctggcgtcacccgaggcaggaatgaagagtcaggcagagagcgcgcgtgtggcagctggtggtgtagatattagggactagtgtgaattctagttcaccggccaatgcctggatggtccagagctgggtcggctgggcggagagctgcctccaggttcctgcctctggccctggcgtggggtcgacactgggtgtggtgtgtgtctcatgtccaggcagtggcctttgctgtgccgtcctgttacaggagccaggatggtggggacgggaccggaccggagggttggcggggctgcccctgcagccgacagccccatcctgcagccaccaatggcatgacccagggccccggcactgcctgtgtgaggggctggcagctttccaactgcagcaagtggaggcccctgccagcttcgggcctgtgggcaggggctcagtggggcaggggtgtggctgccccgcccggcacgcctgcacctgtctcctcagtgtgaccagtaccgcaaggggatcatctcgggctccgtctgccaggacctgtgtgagctgcatatggtggagtggaggacctgcctctcggtggccccgggccagcaggtatagccactggcagggcgggtgggcctggggctgatactgcccgtgcagtgggagggggatgtctgcacggaggacctctgtggccctgtccaggtgtacagcgggctctggcgggacaaggatgtaaccatcaagtgtggcattgaggagaccctcgactccaaggcccggtcggatgcggccccccggcgggagctggtactgtttgacaagcccacccggggcacctccatcaaggaattccgggagatgaccctcagcttcctcaaggtcaggcagctctcctagggggcagggcaggagtccacaccacggtcatatgcccagcaggcggccctggcaccaacatgcccagcgcaaaggcacagatgggcccaagtggaccctgggcagacctcccatcccccagcccctgggcatgagccctgccagggaaggagcctctccagggctgggggcaagggttgggggcgccggtgggctggcagctgaggtcgaggggaggctcctgcagtcaagggccgtgtgtccagcagggcaggtgccccgaatggagaccagggcttgtggaaaggggccgcttcccagggcttcagccagtgcgtgccctctgccctgtgccgattctcatcctcagggaagctctgaggcttctctgcccaggtgcccacccccgagctccccaggtgcacccaaggctgccaggaggcgggaggtctgtctggcagcagccacacaggccagcagagtgagctgacacattgctggctgcgtcctccacccgtgtagctgtgggctgggacccctaacctggcagatgtgctggtctggccggcagaccaccccgccaggaggaccaggtaaaggccaggtcgtgctcccagacatcaaatcagctggcttttcctttcttttggtcccaaacgccaggcgaacctgggagacctgccttccctgccggcgctggttggccaggtcctgctcatggctgacttcaacaaggacaaccgggtgtccctggcggaagccaagtccgtgtgggccctgctgcagcgtaacgagttcctgctgctg

SEQ ID NO: 17982 - DNA, 1233 bp, Artificial sequence
  DNA replication origin
cccggcacccggcgggtcggaaacggcgcggccctggctgctggccccgtggggcggtcgcggtgcaggacacgggtcacggcgctgccgctgctctgcgtggcgaacccacacgcccgcccgccagccactgagcagcgcccacgtgcgggcgcggggagctgaacggccggggaccgctggggggcgctgcttgggcggggcggattgactcttgcgggccgccgtacgcgctataaaaggcgcggcgcttcccttctcgtcctctgcgtgcgccggaggctgccgtggcgggtgggccgcctgacttctcctcccggccagttctcgagcgcctcaccgggcctcgccctgcagcctcgctctcgctggcgctgcgcggcctaggggactgggctgctggcctccgggtgcggggtgggggcaggctccgacctggggcgtcctggccgcgcgagccgcgggatgggggcccgggccgcggaggaggcgccgctggtgtgtcccttggtggagagggcgctgccggccctgcgcggtttccagccaggaagcttcgggaagcctggtgagagctgagtgcgcgaattcggatcttagagaaaggcaccccgttcacccacgacccttccgctcctgccgctgcttccctgagtcgctcaggctgtgggaagatgtttgtcggcatctttgaaaaattgatttcttatgctgcgtcaggtggtttccttgtcactgtggctgctcagcgggaggctgttctggcgggaggaggactgctcggttgtctggtgggcattccgcctcgtggtcctggtcccttgatacctgcaggggatcagcagcccgcgtttcgtggccactgtgttgtaactccaacttcccctcccgcaaattaagcgtagagtaaggggagagagtaacatgggtcggatttttctagaacggcccttgtgacagtgagctttttggtggcagggagcttctttggtccgccttcctggagaccagatgcagcaaaacgcagtctttttcttttcgagacagagtctcagttgcccaggctggagtgcagtggcgcgatctcagctcactaccacctctgcctcctgggttcaagcgactttcctgcttcagcctccagagtagctgggattacaggcgccagccactaggccagctaactttttttttttttttttttagagagacgggtttcaccgtgttggccag

SEQ ID NO: 17983 - DNA, 1971 bp, Artificial sequence
  DNA replication origin
ccacgagcccgtgggtcccggtggtcccagccattggggcggctcccgtgactgtcgagcagcgcccaccccgggcagcatggggctcccgcgacgcgctccgtcccttccccaccaggggctctgccggtgtcggccatgggcgcgggtacacaccaggcgcctaatgagtgctgaggcgggcgagggtcccggcaggcgggattaccgcggccaggcctgactagcgccctgtctgcgctgtgtcctgggacctcggtcaccgcgcagggcgggacaccgaggcctcgcggccaagcgactcgccgcggtcgccgggctgcgaacggtggagccgccgggactcggaccaggacgcgagctccagagcaggggatgacaggcctgagccgcaggggccgggaggaaggccgcgctgctgtcctggggctgggcagcctccgcattgcacagcgcagaccgctctagccttaggcctggaggggacaccaggagatgaggcttctggctcagcctgctctctgcagccacaggcaaaggccaggaaggccggggtgcgggagctggcataggagctggctccagctcgggtactggcttagagggagcaggagctggtgataaattcaactcaaattttcattgcctttgcaaagccagaaaacaccccagggctcctaagaaaagccccagcgcaggaccccaggacactttgcaactgggctgcaactgcgcggtctgaggctcctccctgtgtggccccaccagcaggctgggttctagctctggtgttggggctggagctggcaccacagcaggctccacctccagagatggtgcaggctctgtcctagcactgacacggttgttggagacaagctggctctgccccggggaccgatgctctggagctgcctctagctgtgttgctgttgctagtctttgccctgggaaaagtgtcagagctggtcctagctctggatatggtgctagagctggttcttgattggatttcgctctagagctggcaggaactctggctctcgttctgaagctggtgcaggtctgagatggctgtagctctggagctgcctctaattctggttctggttgtggaatcagccatcgctttatatctggtgccagctctggctctggaggtggtgctgcagctggcccttcctctgaacctggcactggcttgaggtctacacctggaactggctgaaactctggaagtggttttggagccggtgcccgagcagtcaccggaggtggcaccagatttggtgatagagctgcctctgtttctggagtaggtggtagagctggtgcggcagctggagtgagatctggagttgtgctggctgtggccatagttcttgagctggtacaggaacccgcactggtgtgagccgcggtgctgaagctgggcctgtagctgatgctggccctggctctttttctgaacctgatgctgatatttggccctaaccatgcaaatggttttggaactggtcctggctagagggcggatgctggagctatagtggagccggcacagaagtgaccagagctgcccctgtctctgggtgtgctgctggagctgttgctggagctggctctgatcctggaactagcacccgagttgtagccggagctggctctaccttctgagctggtgcaggagttggctgtagctctgtagctagtgaaagctctagctgtggagagagggcaagagacatctcctccttcagagatactgagtccattgcacccgacccagcacttgctccatgctgcggggtagatctaccaagcacttactgaaaccagtatgcatagccccggagcagaccatgacctgctgagacccaggagaggacctgagccccagcacctgagagaggagctaccccatgacagtggggtacttagaaggtggagatgtcacatcccctgccccag

SEQ ID NO: 17984 - DNA, 1089 bp, Artificial sequence
  DNA replication origin
ggctcggtggctggcaggcgggaggaggggttccctggtctgcagcctgagcccccgccttggccccaggttgaaggggtgccagtcccaggaggtgatcctgaggaaagacgggaagaagccggtgtttgggaacgcctgtgcatacgcggcgggcccgagggaaggacaggagggaggtgtgcttgggctctgggccctggaggagctgcgtgatatgcctctgacccccctgtgccttgagcaggccccttgtccccgagagcacgtggcaggcaggcgtcaggctggctgtgttcccagagcccacacgtcatgtgctgggcggcctggcccgggaggggaggccccgggagggcactcagtccctctggacacctgcacctgggtgggggctctgaggcctcgggcaccaggggtcagggctgtgggcgggcacagccacgccatccgggaaccagcgggcatctctgggcatctctttcagtgaaaggggtgaaggccttccacgtgctgtccactgactacagctacggcttggtctacctccgcctggggcgtgcaacccaaaactacaagaacctgctgctcttccgtgagcaggcacagcggatggcagaggatggtggagggggtgcagagggaggcatagaggggcgctgggcacagggggccgggcaggaggtgaggcgggcagggagagtgggggttggggcggtggtcagggcaggggcaatggaagccgagaccacagcagtcaggtcctggaggtcgctgaagcaaggataggggacgtcaggaagaggctgcagagaaaggtgggccatccagggggagcggaggccaccaggatggtggcgggtgcaggtgcaacgttctgggtgagggacacagtggggatgaggaggcgtgggaggggtcccaggtaagggtctgcccgggatggaggggtgtggaagtgacccagtgtgggttaagggccacaaacccaattctagacaccaaccacttggggtacacggaaaggagtggccctcccggttggaacgggtagaggggaggtggggtcctggggtctcagtcgaggca

SEQ ID NO: 17985 - DNA, 1354 bp, Artificial sequence
  DNA replication origin
cagtatagtatggttgatccacacactccagaccctctcctggctgtgcagctggtctgatctgggctcagaggctgccactgctcagtgctcccctgggtaattttgcaggaggccaggagggttcctggcagttagtgccacccacacggagaaattcagagccatataaacgggtctccagggcctggagggactgcacatcctgggcctgcggcgcagtgtagacctgggaggatgggcggcctgctgctggctgcttttctggctttggtctcggtgcccagggcccaggccgtgtggttgggaagactggaccctgagcaggtacagtcctcctgggggtggggagagctggtcctcgggggccagcccctcctttaaggccacacagcttctgggccccccagggctagcccagaccagcatgagcagtggggaattagttgggccagcccttggggagtcccacaggcaggagcctcagggcaggaggggtggatgctggagggttggaggctggagggctggagaattggaggctggagactggaggttgcagggctggagggtgtagggttggagaactggaggctggagggctggaggctgtagggctggagaactggaggctggaggctgctgggctggaggctggagggctgtagaactggaggctggagggctggaggctggagggctgcagaactggaggctggagggctggagagctggagactagaggctgcagggctgcaggctggaggttggaaggctggagggctggagcctagaggctgtagggctggaaggctggaggctggagggttggaggtctggggggttggaagctggaggctggagggctggagaactgaaggctagaggctgcaaggctggaaggttggaggctggagggcgggagggttggagactggaggctggagggctggatggttggagggtggaggctggaggctgcagggctggaaggctggaggctggagggttggaggctggaggctggagggctggatggttggagggtggaggctgaggctggaggtttggaggctggaggctgaggctggagggttggaggctggaggctggaggctggagggctggcggccctaacgggagccgcctcaatgcagcttcttgggccctggtacgtgcttgcggtggcctcccgggaaaagggctttgccatggagaaggacatgaagaacgtcgtgggggtggtggtgaccctcactccagaaaacaacctgcggacgctgtcctctcagcacgggtgagtgggcgggtcctgccaggccttcccgcaggcaggactgtggctcagccacat

SEQ ID NO: 17986 - DNA, 1721 bp, Artificial sequence
  DNA replication origin
aggggtgagaaggcccagcccagggccgggaggcggagccacgggggctcctgacagggccagggactgggccaggggcccgggaacttcagcacaggccagggtcgggggtcaggctcacctccttcaggagctcggcacaccgccctgcaggataggccagcatgaggagctgcagagtcagcccacagggcccagcccagcctccaccccaaggcccctgggctcaccaggccgggccgccaggtagagaccagtgtctgctgtcagctcccgaaacttccagaaccccagccggtccttgtcctcaaggctccgagctgtggggcacaggggggctgggcgggcagtccctgggagagcagcagctgggcagagccccccagggccaagcttactaaagtacttgaggacgcgaaagttcctgccccgccacatcagggacacccgcaggatggcgtagccctcgtagtcggtgtccagcacgtggatctctctgtggccttcaagagccggccatggcgttgggggagacgtctgagggggacggacctcgaaggccagggtctgcagggtctaactccatcctgcccccacccagtcccagcacttgagtggttggagacactacagaagcttttgaaggatgatccagtgtgttggtgggagaatgggaaggtctggggcatgaaatgtgcagggaacagcatggggaacagtgcagggaaccctgcagggaacagcatggggaacggtgcaggaaacagcatggggaacagtgcagggaacagcatggggaacagtgcagggaacagtgcagggaatgcatggggaacggcacagagaaaagtgcagggaacagcatggggaatagtgcagggagcagtgcggggaacagtgcagggagcattgcagggaacagcatggggaacagtgcagggaacagtgcagggaatgcatggggaacggcacagagaaaagtgcagggaacagcatggggaatagtgcaggaaacagcatggggaacagtgcagggagcagtgcggggaacagtgcagggagcattgcagggaacagcatggggaacagtgcagggaacagcatggggaacagcgcagggaacagcatgtggaacagcgcagggaacagcatgaggaacagtgcagggaacagcatggggaacagcgcagggaacagcatggggaacagtgcagggaacagtgcagggaacgcatggggaatggcgcagagaaaagtgcagggaacagcatggggaatagtgcaggaaacagcatgtggaacagtgcagggagcagtgcagggaacaacatggggaacagcacagggaatagttcagggaacagcatggggaacagtgcagggaacagcacagagaacagtgcagggaacagcatggggaacagtgcagggaacagcatggggaacaataaggcctagctgtgtgcacagccgggttccacctgccatcacagggcaactgcacttaccaggaaaagcgaattttcccgtactgtctatttctgagcccacgatcttctctatctcacagcttcctgagctgaaaggcagcaaagtgcccatcggtaaaatgctagcctgtgtcccgcctgctgggctccttcccggagtggggctgtgtctttaggaagggcacaggcagcactgtggagtatcccaggcctggagcaggatgaggcggg

SEQ ID NO: 17987 - DNA, 1557 bp, Artificial sequence
  DNA replication origin
aggagaattgcttgaactggggagtcggaggttgcagtgagccgagatcgcgccactgcactccagcctgggcgacagagtgagactccatattaaaaaaaaaaaaaaaaaagaacctcagccccagccccagaactcaggcagcgaggccaggcagggaagggcggggcaccactctcaggaggccagagaggagcatgcaccgcgggaccctcccccaagccaacctcctccacatccaaagcacggcgggcccagctcccaccccacccggtcctggccaggccaggagtgtgtgcgaagggtcacagcaggagagggcatggggcagcaccagaaggggcgggcccggggatgaggaggcggagcctaaactcggcctaaaaggcggggggcggaggggtgagggcggggcctgtgaggaggcgcggggcggcaggcgggcggggcgggggtaggcagaacggggggcggggcctgtgggaagttggggaggggccagtgcggggaggtgggacaggcactcactgtagagctgcaccatggtgctgagggccccctccagctccttgtagatgtaaaggacggcgaaggagctgtagtctgtgtccacgatgcgcacgtccaggtagcccaaggctgcggagaggcaggcggccttttcaggctggagaagtggatgggcccgggcaccgaccccacccatgcctgcccctgctgctgggctgtgagcctgttccccgaagacagaggaggggcggggagggcgggcagggggctggagactgggatggacagcttgggcccgggtggaaagtcagccccacgtcacccccagagaagcggcatccagcacccctgaaggcagaggaggcaggacctacccgggactctgaagtgtccctcggagcccaccttcaggtactcggcatccacctggttacagccgtccgccctgggggtgcacagccggctcactcatggcacccagctacctcagctccccagcccagcccaggcagcccagcccaagtaactcaccccgggaactccatgtggacgtggaggccgccctcctctgtgggcctgatggccctggtggacatggacaggtggtccttcttgcccaggaagaccctgcagtcagatgccatggagaccacgtaccagaggcctgagaactgccgggggcttagtcacccgcaggccaggacagccagcagcagggccctccttgcccagggacccaggggacaactcagaagtcacacagcaaggggtctcggagtggccatgtcttgggtgtgagctgagcccaggtggacaggaactcatcttgggtaggtcacagtgcaactgtgagcctcagttcccagctgtgaagtgggtgcagtaatgatccattcacaggttggtttaggattaagcgcagagtgggtctatagcacgtgcctggccgggcacagagcaagcgccccaggaaaggcagttgtcacaattatcacgttgtctctggcaggggcccagctcccacccaccacaggacagcagaggccc

SEQ ID NO: 17988 - DNA, 792 bp, Artificial sequence
  DNA replication origin
gcgggggggcagtgcatggggggtgtcggggtgtcggggggggcagtgcatggggggtggcggggtggcgggggggcagtgcatggggggtgtcggggtgtcggggggggcagtgcatggggggtggcggggtggcgggggggaagtgcatgggggggtggcggggtggcggggggggcagtgcatggggtggtggcggggggcagtgcatggaggggtggcggggtggcgggggggcagtgcatgggggggtggcggggggcagtgcatggaggggtggcggggtggcgggggggcagtgcatggaggggtggcggggtggcggggggggcagtgcatgggggggtggcggggggggcagtgcatgggggggtggcagggtggcgggggggggccgtgcatgggggttggggtgggaggggactgagctctgagaaaggaccccagttcactatgtcaaaaacgaaaaaaaggcaaggcgcagtggctcacgcctgtaatcccggcactttgggaggccaaggagggcagatcacctgaggtcaggagtttgagaccagcctgaccaatatggtgaaatcctgtctctactaaaaatgcaaaaaaaattagacgggcatggtggctactgttatcccagctacatgggaggctgaggcaggagaatcgcttgaacccgggaggtggagattgcagtgagctgagattgcaccactgcactccagcctgagtgacagagtgagaccccgtcttaaaaaacaaaacaaggccaggcacggtggctcatgcctg

SEQ ID NO: 17989 - DNA, 1028 bp, Artificial sequence
  DNA replication origin
ataaaacgttgacgatctctttttccaatcctggctcagcgctgacacactttcaggagggacgctgaggggtagctccaacccaaagaaacgatgtacccagaggcaggcggggtgcgggcaggcggggtgcggggcaggcggggtgcgggcaggcggggtgcgggcaggcggggtgaggggcaggcggggtgcggggcaggcggggtgcgggcaggcggggtgcggggcaggcggggtgcggggcaggcggggtgcgggcaggcggggtgaggggcaggcggggtgcggggcaggcggggtgcgggcaggcggggtgcggggcaggcggggtgcgggcaggcggggtgcgggcaggcggggtgcggggcaggcggggtgcgggcaggcggggtgcgggcaggcggggtgcggggcaggcggggtgaggggcaggcggggtgcggggcaggcggggtgaggggcaggcggggtgcggggcaggcggggtgaggggcaggcggggtgcgggcaggcggggcccagagcgcagagcagagcagactgccccctggtggaagaatggagggacgccaccagcacgcggaggggagccatgcagatgaggctgcgtgagtgaggaggctgcccagggaaggggagggggctcggggccccctggtgttgtcgtgcagggcagaccccctcagcagggcaaagagagagaggaaggtttttcctcctcctctgagggcagaggtctcgggttaggaagtgctattaggggcagggtgcagtggcgggggcctgggacactcggggtgggggcgaggcctggcgtgggggagacagatgagtggcagccctggctaaccgaagccattgggaatttattggaagaatatctgagctcagaggattagcggaggctggagaacaagcaggtggggactggagcagctctcagggcaggagccaggagcccagcaagagctcaaggggaaggggtggcggggggagcagtgcatggaggggtagcggggtggcgg

SEQ ID NO: 17990 - DNA, 1296 bp, Artificial sequence
  DNA replication origin
gtttgagggtcacggagctggaggcctggggaggagccagtgttgatccagtttgagggtcggggagctggagaccctggaggagctggtgttgatccagttggagggtcacggagctggagactgaggaggagccagtgttgatccagtttgagggtcggggagctggagaccctggaggagccagtgttgatccagtttgagggtcggggagctggagaccctggaggagccggtgttgatccagtttgagagttggggagctggagaccctggaggagctggtgttgatccagtttgagggtcggggagctggagactctggaggacctggtgttgatccagtttgagggtcggggaactggagaccctggaggagctggtgttgatccagtttgagggtcggggagctggagactgaggaggagccggtgttgatccagtttgagggtcacggagctggagactgaggaggagccggtgttgatccagtttgagggttggggagctggaaaccctggaggagccggtgttgatccagtttgagggtcggggagctggagaccctggaggagctggtgttgatccagtttgagggttggggagctggagacctgggaggagctggtggtgttgttctagtttgaggttcacagagctggagacctggggaggagatggtgttgttctagtttgaggattgcagagctggaggcctggggaggagccagtgtttttctagtttgagggtcctggacctggagatttgaggaggagctggtgttgttctagtttgaggttagtggagctggagaatcggggtggtgccagtgttttctagtttgagggttatggagctggagaccaggggagaagctggtggtggtgttctagtttaagggtcatggagctggaggcctggggaggagccagtgttgttctagtttgagggtcgtggagctggagaactgaggaggagctggtgttgttctagtttgagagtcatggaactggagacttggagaggagctggtgttattctagtttgagggttgtggagctggagaccagagaaggagctggtgttgttctaattatagggtcatggaactggagaatcagggaggtgccagcgttgttctagtttgagggctgtggagctggagacctggggagaagctggtgttgttctagtttgagcgttgtggaactggagacccagggagaagctggtggtgttgttctagtttgaaggtggtggagctggagacctggggagaggctggtgctgctgtt

SEQ ID NO: 17991 - DNA, 1939 bp, Artificial sequence
  DNA replication origin
ctgaggtgggaggatcgcttgagtctgggaggttgaggctgcagtgagctgtgatcacacttgtgaatgagcacagagaaagtgcactagcgtctaggaggggcccagaagaaaccagttctgtgaagccccctctgcccaccatcctggcccacacctgcttctctctcccccggactggccaggacatcactagccgcttcctggcccagaggaacacggaggagaacctggagctgcagatggaggactgtgaggagtggcgggtgcagctgaaggccctggtgaagcagctggagctggaggaggccgtgctcaagttccgccagaagcctagctccatcaggtgccccgggcttccggggctgcgggccacccaccccagtctcacaaaggccccgggctgcagccaggctgggagctgggagtatacccactgccaacaagcctgtgtgtcccacagaggggccaggggactccacttgcacacacctgagcttctgagtccctgattctggcacagcacccaactcaggactgggctcctgggtggcccaccatggctctcgggcctgtgcccctcactgctgtgtccctattgccttctgcagcttcaagtccgttgagaagaaaatgacagacatgctaaaagaggaagaagagaggctccagctggcgcacagcaacatgaccaagggccaggagctgctgctgaccatccagatgggcatcgacaacctctatgtccggctgatgggcattaacttgcctgcgacccaggtaccgggagtgaggctgagctgccacacaccaggtccctgggcagggccagaggggagatgagaccctcctcccggcctacagagagaagtggtgctctccaacaccctcgatttgaacagcaagctggcgtactgcgaggggaagctcacgtacctggctgacagagtgcagatggtgtccaggaccgaggaggtagccccgggctgggaggaacctgcacagcccacgtcccctcaaagctgacaggctcccgttcagagtgtctgcacggctgaagggggctttgccctgcagggcgacacaaaggtgagggacaccctggagtcctcgactctgatggagaagtacaacaccaggatcagctttgagaaccgggaggaggatatgatcggtacaggccccggaactggggcccgggctgcaggcgggtggctggaacacaggtcggggtggcgccggctcccatcccaccgggacatcctggagggacagcggggctacagggtgcatcagttgtacctgcaggactttaattgatggaggtgacttagtgatgccatggggaggctaaagccactgaaataccttgttaatttctccgaaaggaggaggcatgccatgccagacgggcccggaggagaggcaccagggctggagcagggaggagcgcggtgaaggcctgggccggagcttccactgggggttctgcgggaaaggctaggcagggcagcgtgagccgctgcgaatgggctgggctgagtcctcccggcacgctggggctgtccctggggcaaggcacctggcccgggtcggtggagggcgggggcgagaggcgggtcgggcggctgcgcctagctgggctagccccgtgtgcgagccgccgcctccgcccgcagacaccttccagttccccgacatggaccacagctacgtcccttcgcgcgccgagatcaagaggcaggcgcagcggctaatcgaggggaagctcaaggcggccaagaaaaagaagaagtagccccgccgccccgctccctgctttgctacacaaataaacatttttccaggactgctgcggacgctggggcgaccggggtctcggagaggagcacgggacacgcaggatcgggggaggttctgcgtaaggaggcagcccggg

SEQ ID NO: 17992 - DNA, 1160 bp, Artificial sequence
  DNA replication origin
gaacatccccgccgggctgcagtccatgaaccaggcgttgcagaggcgcttcgccaagggggtgcagtacaacagtgagtgcggcgggccgggggggcgcgggagcgccgcgcgggtctccgaacccaggccccgggcgccgcgcggtggtgggtgtcggtctcacctgcttgccggttgtggggtgcgctgggcccgccgggcgctccgggagcgggggcgcgggccaggggacgcgaggagaggccaggccagggccgggtcctcgcggcccccgagccgcgggtcgtttcccagccgcactcgcctgccgcgtgtcgctcccgccgcgctgtgcagtggagcgggtcggcggcggcggggttggcccggctgcccggcccgggggtgattacataatgccaagcagggcccgccggcccggggcgccgcgcccccgacgctccacggtgcccagccccgggcaccactcacctgcaggaggtgcggggaacccagccggccttggcgctttcagcgggatttttctttgttgacttcctactgagtttgaagacagaatattagctacgccacacattctcgcctttttttttaaaagaagcgtttgtaagagacgtatctagaaaagctccagaaggcacgggctgacttgcgactgtaggagacatcccatttctcgtaggaaggaggagtcatttacggactcctgagtgcctgggacgctccattcctttgttataaattgtgtaaattgtcctcgacctcttatgagtttttccatcttgcgggctctttcccagtagtttttgaaagcttttatgtggttccctgttttgacattgcttccctcttagccatttccgtatgtttctatgaggttttaggacgctacgcctatccagttttttggtcactttaaggggagccttagagcctccgtgatatttccatggtaatgtagaattttaagaactaatgatcagaaagactcttgtgcaggtttaaaagcaagttcatgaattcgcgtgccgtgtgcacggagagaggccgtagttcctggggctggagctagtccaggaggacagtgaagatgtcgccttccttagtcccccggcctgtgagcaagaggaagctgcagaccactcgggccaccctca

SEQ ID NO: 17993 - DNA, 967 bp, Artificial sequence
  DNA replication origin
aggctgggccctcgttcccctccctctcccgcggagaacttggagaacagaggccgcctgcagcgccctccagcccggcggcccggcctgtggagagcacagcagccccaagcggagccgcaggcgctcagcgcagccaggagggagccaggccccagcgcggcgggaggcccgagacgggccgcggcgccctccctcctccggcccgaggcaggaacccgggcgcggcccacagctctgggctcagtcgggcggccgccgtcccccccagatgagcagcagcccgggctcgcagagactgcccgggccgcgcacgcatagcctcgctgggcccgcgagagaacggcggcgccatccacgtccgtcccgcggccccgaggtccacggcctgagcggcggccctgcctccccgccccggcaccgctcaggcggcccacgcgctgtgcttcccggtggtttccacatgcggtggtcccgtctccgggtctttcccgggagtggggcgttagcaacgcggagagcgcagagacggtcacagcgaccgcccgttttcccgcggccagaaccaacgcgctgacgtcccttggtccccgcatctcggctcctcaaccctacgggacagaacccacttccttcattttgtaaaaatggcacatgctctttgtaaggaacttaaacaaggcagacaagcacaagaaccaatgttaacaaagcctcccaatgccactgccggaaaccagccctcatgaacgcggggagctcattccaggcatctggccagtttggcttctgcagaacgtcggagagttggggtcacacagaataatttctctcactcagcgatacgcacttaaggctcatgcaggcctctccacggcttgagaacatcttttcaggactaaataatgttccaccatctggatgcacggagttgatccattcatctactgaaggacgtcttggccgc

SEQ ID NO: 17994 - DNA, 1291 bp, Artificial sequence
  DNA replication origin
ggggcggggaggcagggccgccgctcaggccgtggacctcggggccgcgggacggacgtggatggcgccgccgttctctcgcgggcccagcgaggctatgcgtgcgcggcccgggcagtctctgcgagcccgggctgctgctcatctgggggggacggcggccgcccgactgagcccagagctgtgggccgcgcccgggttcctgcctcgggccggaggagggagggcgccgcggcccgtctcgggcctcccgccgcgctggggcctggctccctcctggctgcgctgagcgcctgcggctccgcttggggctgctgtgctctccacaggccgggccgccgggctggagggcgctgcaggcggcctctgttctccaagttctccgcgggagagggaggggaacgagggcccagccttccgcggggtgggctcggccgggagaagcgcggagcctcctggctgcccccagccggtgcggccgccaccgtggccgtgagggcgcctgggtcccctctggaggttttgccgcagcgctggccggcgccgagatatgaccagaggcgttgaaagttggcgcgttgaggtacctaggatgggcgaggaaatgaacaagcttcaggggagaagaaatgactgtgggaacaggtgccttgaggtagagggaggggactgggccaggagagaggagccgggtggggcacagggacagcccagggtccctcagagcttcgaggccgggcgccctctgcgttgggagcttggggtccccctgacagaaaacctggggggggcgttgcgggagtgagaggaggctgcagacctgacacagatgggggagcgggcgggaggcccgagacctggggaagtgggaggagcctgcagacctgctccttggttgcctctgctccccaccaacccggctcccttccctggcttccctggctctcccctcctggaaacgtggaggacggccagggcttctctctcccccgtgcctgtggtgggttcaccaaggcctgtgtgagaagctctcggggtctgcccaggtccgagggcagctgtctcagtgctggctgctgcgtccgcacagcttctcggtcattctcgatcctgttcttccagcacctccgcaggctgggtgttcttagtccagtcgggtgccaggtccatccccatctccacccgttctgagccacctcccgcctttgctaagtccgtgctcccctcccagctgccctccctcccccatcacattttcaaaacaagctgggcagtggcctctccaacccag

SEQ ID NO: 17995 - DNA, 1161 bp, Artificial sequence
  DNA replication origin
cagaacagagacgcctcacctttgtctactacatcccagacttcaaccttcacgatgtcatccgtggctgaaacagggagaatcctaaaattagtgcccaacatgaagttcccaaggtggcacaaagcggtccagctggtgtggttgtctgtgccccgcagccaccggctcccaccaggacttccgagtgtccagaagcaggggatgtgtcctccccagacgaccacatggcggctccttcaggccttcgctcagacacagcttcagtgacaaactgaatgcacggtatctccctccgcagccccaatcctgggcacggcccctccctcccgggccccgatcctgggcacggcccctccctccagggccccgatcctgggcacggcccctccctccccggccccgatcctgggcacggcccctccctcccgggccccgatcctgggcacggcccctcctggcctcagcatactggaaggggaccctcctggctgggtcgatgtctgtgtttttgcccatggagtacgcttctgctgacaggtgcgaatgaatgggcccgcctgtgtcaccttctgaccctgtttcttcatccagtgactggcctctagttcactttgagggagcagaatctaagtaatcactgagggcggaggccggaccctcccttcggagccacctgagaggccccaggcctgcctcacaccgcaccatcgcagctgggcctgctggtgccaaccactcctcctgagctcccatgactgtgctctgttgtggggcgtgctggggactgggggagctgatggatggagcctcccgcccacccaaggattccaaggggaagggagaaccagaggggagaggcacgcccggggccctcacacagccaggcatctgcccccacaccaatcacatccacgtcgcctgagcagaggggcatgaacgctgccatcagcctcaccccaaaccaggaagagggtgcggtggcaggtagagcttctgtgcgccggccctgtgggctctgtgtcctgtcagcccagcaccaccctcccaggccctagagagcagcagatgcccagcaactccacggctgttcctgcacagcagtccaagtgtcagctgtcaccacgtggcagctcaaactcatctttgcctcccactagt

SEQ ID NO: 17996 - DNA, 1326 bp, Artificial sequence
  DNA replication origin
gctccatccatcagctcccccagtccccagcacgccccacaacagagcacagtcatgggagctcaggaggagtggttggcaccagcaggcccagctgcgatggtgcggtgtgaggcaggcctggggcctctcaggtggctccgaagggagggtccggcctccgccctcagtgattacttagattctgctccctcaaagtgaactagaggccagtcactggatgaagaaacagggtcagaaggtgacacaggcgggcccattcattcgcacctgtcagcagaagcgtactccatgggcaaaaacacagacatcgacccagccaggagggtccccttccagtatgctgaggccaggaggggccgtgcccaggatcggggcccgggagggaggggccgtgcccaggatcggggccggggagggaggggccgtgcccaggatcggggccctggagggaggggccgtgcccaggatcggggcccgggagggaggggccgtgcccaggattggggctgcggagggagataccgtgcattcagtttgtcactgaagctgtgtctgagcgaaggcctgaaggagccgccatgtggtcgtctggggaggacacatcccctgcttctggacactcggaagtcctggtgggagccggtggctgcggggcacagacaaccacaccagctggaccgctttgtgccaccttgggaacttcatgttgggcactaattttaggattctccctgtttcagccacggatgacatcgtgaaggttgaagtctgggatgtagtagacaaaggtgaggcgtctctgttctgtgtctgcttctctctgggactgtgtgctctgcgcagagaggcttcctttctttcccccggcgcccatgcatcacccaccatcctcgtggacggtgcccagggtcttgctgctctgctcccctccacatccagtggcgaccccgcagcgtggcgcagcccctcctgtggcactgcatgctttgctgctttagcatactccccgtctctgagtgaccgcgtgcacggtggcggcaggtgcagccggggggtgtgctttgagccccaaggcccagggtgctattttgggagccctcctcctgcactgcctggcggagtagcccagcaccaggcggccccctgcccatagctgaggacccagctcctgcgctcctgtccctgccagggatccccagccacacagacctgcactctggggaccgtgggagggcagcaccagcccccggggtgtcctcgacatcgttggtctcctcctcagccacaaggtcatgagttcctctaagtcctcagggtggagct

SEQ ID NO: 17997 - DNA, 982 bp, Artificial sequence
  DNA replication origin
caccagggttaagcgtaccgcctgtcacggggccgcacactcagcacgcatcagcagcccaggcctgagggcggcttgaagcacctgaccagccatgctctgggcctctgccaacctttgccaatgctgggaaccatgcctgccctcccagccttcagcaccaccaccaaggactgaccgcaggcaccctcaggagagccctcggtgggggtgtggcacacggatggcaggagaaccacacacggggctggcggccccaccccagggcacgagttcagctcgggcgcacacgctggcctcacctgggcgagcagtggtgctcctctccctccggcctctcctgtctaggcagcaggccagcctggtgggtgggaagtggcttttcccaagcgaagttgagtgtggacacagtgtggcctccacggcacctcccactgctgccacaggaacggcctggagggagctgcagccgcctgggctgccgtgcgaggagtgggcgggagtgacagcgagacttgagccagcctgagaagacgcggcaaaggcgcttacctgtgggcccggagaccctgttggcagcaccagcctgggcaggcgatgcctatggtagcaatgctctgtctggagcccctggtgcccagcaggaaggatggaaaacactggctcagacagcggcttcaagcaccacgcaggcccttcacagccacgagaggcaggagacaccagaaggccacctgcttaggaggccagaggtgcccctgggccggccttggtgaggggcccgtttaaatgactgcgtgtaaatgaaagaaaatgaagttagaaacaggatgttgcattttttactcccttatgttggctttcagtcgtggggaagttttgtcacttgaagcgctggttatttcttcacaagccatttggaaaaccacgcagctgggaaactggcagttccacgccaggcagactctggagacttgccgtc

SEQ ID NO: 17998 - DNA, 1029 bp, Artificial sequence
  DNA replication origin
caccagcctgggcaggcgatgcctatggtagcaatgctctgtctggagcccctggtgcccagcaggaaggatggaaaacactggctcagacagcggcttcaagcaccacgcaggcccttcacagccacgagaggcaggagacaccagaaggccacctgcttaggaggccagaggtgcccctgggccggccttggtgaggggcccgtttaaatgactgcgtgtaaatgaaagaaaatgaagttagaaacaggatgttgcattttttactcccttatgttggctttcagtcgtggggaagttttgtcacttgaagcgctggttatttcttcacaagccatttggaaaaccacgcagctgggaaactggcagttccacgccaggcagactctggagacttgccgtccgtgccaggagatgtctgcttaagacaaggctctccaaacagcccgcttcaccggcagccgcagaggcaccccagggtgtcctcggctgccccggtgggcagggagcctggaggaccagccacagggtcgacaccaaggggcacagaggacagtgcggaatgagggtggacacagatgaagccagaggtggttttgtagggatgcggacatggggtgctctgagggaaggcagggacaggcaggggcgttccagtgtggggtgcggtcaagtacctgccgtcagggagagggacgggcgggggctgcaggctgaggggtgcgaaggccctcgaggcacttccctctagctctgcatgcacgaggcatgcttctgctgggttggatgttggaaatgagaagcagccaccatcctcgggcctgggcgcacagcacctttccagggagggacagggcgtcgcagggctgaaactaagccaggtcctcacctgttctccgaggaccttcaattacattctccgggagcttccaaaagtgcccacccacgtgccagtgtgcgtgctgggaaactaccgggacatgggcgagcaccgagtcatcctgccggacgacgtgcgtgacttcatcg

SEQ ID NO: 17999 - DNA, 1413 bp, Artificial sequence
  DNA replication origin
tctgcggccgggactggctctgtgaacagtgatgccgggtcctcttcactcggcaccagaaccctcactgcacccaaccccaagccaggcccacccgggatgtgcccacgggactgggacaagcaggaagaagcgtggagcgctccgaaatccaggaccccacctgtgagggcctgggggtctgggaccagtttgggaggggcagctccagggcctacctggaggtggaggggctgcctcggtggcaggtgacgtcccaaacagcctagagatgatgctgcgccgtggggcgggggctgaggggcacgcaggtgggggcagggcctctgagggtggtacagggggcacagaggatggtggggcggcattgaggggcagctgtggggcgggctggggtgtgccggggctggagctccccgtggacacagcgcctgcaggcaccactggtgactgggagcccggggatgggctctgcccgttggccgccagtggggacgcatggccacggctgcgagcctccatcatctccaggaagctgaaaggcagaaggcgggtgagaagcctggctcccctgcctctccctgaggccctcaggtgacagggggctctctgctgctgctgctggggctgggaagagccactgtgttctgggccacccgccccacagaggccatcatccccatccacttccaagggcagcagtgccagccaggcacggtggctcatgcctgtaatcccagcactgtaggaggccaaggcaggcagatcacgaggtcaggaggtggagaccgtcctggctaacgcagtgaaaccccgtctctactaaaaatacaaaaaaaattagccgggtgtggtggcgggtgcctgtagccccagctacttgggaggctgaggcaggagaatggcgtgaacccgggaggcggagcttgcggtgagccgagatcacaccactgcgctccagcctgggcgacagagcgagactccatctcagaaaaagaaagagcagcagtgccaaagggtggggacagcaggcaccagcgtacatgtgtccagctcccctgaaagtcacttcggatctgttctgaggcacagctgttgggggctccatgcagaggtggccagatggcagcaactggaccttcccgtgagcgggggtttctgggaagaggagggggctggggcttggtggagcacgtgcggccatcgcagcatccagctgacccaactctcaggcccaggaaatgccaggattggttcaacagagaagcgcccatgcggggggctccattctggggctggcctggcagctggaagccacgggtccctctccaggcatcaaactgccttccctctcggtctcttgctgtgtctgagccaacagccagatccaaggtgacccacagggctctcctt

SEQ ID NO: 18000 - DNA, 3306 bp, Artificial sequence
  DNA replication origin
tgatctgcctgccttggcctcctacagtgctgggattacaggcatgagccaccgtgcctggctggcactgctgcccttggaagtggatggggatgatggcctctgtggggcgggtggcccagaacacagtggctcttcccagccccagcagcagcagcagagagccccctgtcacctgagggcctcagggagaggcaggggagccaggcttctcacccgccttctgcctttcagcttcctggagatgatggaggctcgcagccgtggccatgcgtccccactggcggccaacgggcagagcccatccccgggctcccagtcaccagtggtgcctgcaggcgctgtgtccacggggagctccagccccggcacaccccagcccgccccacagctgcccctcaatgccgccccaccatcctctgtgccccctgtaccaccctcagaggccctgcccccacctgcgtgcccctcagcccccgccccacggcgcagcatcatctctaggctgtttgggacgtcacctgccaccgaggcagcccctccacctccaggtaggccctggagctgcccctcccaaactggtcccagacccccaggccctcacaggtggggtcctggatttcggagcgctccacgcttcttcctgcttgtcccagtcccgtgggcacatcccgggtgggcctggcttggggttgggtgcagtgagggttctggtgccgagtgaagaggacccggcatcactgttcacagagccagtcccggccgcagagggcccagcaacggtccagagtgtggaggactttgttcctgacgaccgcctggaccgcagcttcctggaagacacaacccccgccagggacgagaagaaggtgggggccaaggctgcccagcaggacagcgacaggtgaggggtgggcctgggcctcctctcccattgccccccagcctccagggtgcccgagcagcaggtggggctggctttctaggggcgcagaaggggccccccgccggctggtcactgttggctgaggacagagcagctctgtggctggagcagacgagggaagggcttggacggggcttccagacatcagaaaggcctggccacctgctctgcccacaccctggagaggacaggggcaccttggggtcttctgtgggcagatgccacatggaagccattggagaggccactgcaggtcatatgggaggttcaggccaccagatgtggtctccacagggccaggatccaggtgctgcagagacaggggcggcttcctgcaggtcctagagctgggagctagagccgcctccccagccatctgccagcccctcccaccactctgtctgccaagctgccccaaattttgcctgcagcaaagccctgcatttggtcccaggacagccctggacaagctccacccacagtggcctcagcacctcagcctcacccattgctgtggggcagcggcttcctccagaaatacacaaaggacagaaagccccgtggccctgagctgggcccgcctcctccacgagcgcccacttgtgcggctccacatccttcacccactgagcggccgcagggcagcactgtgtccaaccttgtgcccccgaccccttcctgctcagaagccctgtgaccatgagggggcctctccacaacacagcacctggggtggggtggccccacggccagggtgtgctgggtaccagggcgcctagaaccaaggcccgtgagcccggccagccatccctaccccgtggcccttgaccgctttgccccctgctttgcagtgatggggaggccctgggcggcaacccgatggtggcagggttccaggacgatgtggacctcgaagaccagccacgtgggagtcccccgctgcctgcaggccccgtccccagtcaagacatcactctttcgagtgaggaggaagcagaagtggcagctcccacaaaaggccctgccccagctccccagcagtgctcagagccagagaccaagtggtaagggcaggtgtccccacgggtgcggcctggagacccgggtggggcagttcaggacgcctccagaggaccctgactgaccctctgcttgtccacaaaggtcctccataccagcttcgaagccacggagggggacagctcccacgaggaccgcagcacccccctggccaggcggtgtctctgttcgcacaggtccggagaagcgcagcagcaccaggccccctgctgagatggagccggggaagggtgagcaggcctcctcgtcggagagtgaccccgagggacccattgctgcacaaatgctgtccttcgtcatggatgaccccgactttgagagcgagggatcagacacacagcgcagggcggtaagacgagtcctcccggggcagaggtcagccaggtggccagggtccctcccacaggcctgatctgggtgggtgcagtgggaggaggcttctggaagaggcatctcatgtccccacacttgggccttgccggcctggtttgagatcccacaacccctgggggtgtgggagggatgatggcctgaccagttgctctccctgctccaggatgactttcccgtgcgagatgacccctccgatgtgactgacgaggatgagggccctgccgagccgcccccaccccccaagctccctctccccgccttcagactgaagaatgactcggacctcttcgggctggggctggaggaggccggacccaaggagagcagtgaggaaggtgggtgggggcaccagagtgcggtcagcctgctggagtttgggtagaacgtgggcctcctcccagctgctggccgctggccggggtcctctcctgagtccaggatgctgtgccatgctcctggcagccccctgcaggagctgatgtttgcagtgtggtcctgtccatcagcagggcctcctggagggctggggctcgctgctttgtgagtttctagagaagtcctgtcacccagcttggggtccccgttggcctgagtttgagccactgtctgtcctgtctgtgcaggtaaggagggcaaaaccccctctaaggagaagaagaagaagaagaaaaaaggcaaagaggtactggctactccccttcctggcaggccaggactgggtggcatgcggtcctgggaccagggctgtggcttcctgtgactccatggcgccccatccttgtgctcctcaggaagaagaaaaagctgccaagaagaagagcaaacacaagaagagcaaggacaaggaggagggcaaggaggagcggcgacggcggcagcagcggccc

SEQ ID NO: 18001 - DNA, 2405 bp, Artificial sequence
  DNA replication origin
ggctcgctgctttgtgagtttctagagaagtcctgtcacccagcttggggtccccgttggcctgagtttgagccactgtctgtcctgtctgtgcaggtaaggagggcaaaaccccctctaaggagaagaagaagaagaagaaaaaaggcaaagaggtactggctactccccttcctggcaggccaggactgggtggcatgcggtcctgggaccagggctgtggcttcctgtgactccatggcgccccatccttgtgctcctcaggaagaagaaaaagctgccaagaagaagagcaaacacaagaagagcaaggacaaggaggagggcaaggaggagcggcgacggcggcagcagcggcccccgcgcagcagggagaggacggctgccgatgagctggaggctttcctggggggcggggccccgggcggccgccaccctgggggtggcgactacgaggagctctaggccggcgtgggcagtggccgccctggggcggggggcgtgcctgtcactgcctggggaggcatttgcctctgtaccatcgcctttgccgctgccccgtggctgccgtgtgcgcttctgagctggaagaggccgggcattggtggtccccaggctgggccctgcaggtgctgggccttcaggcccagtgtgagcctgctctgcaagaagggaggggacagctggcttcagccaggctcggtggacaccctggccctctcggggcagagccgccagtgtttctcagggatgtgactgaggcccaggagggacctgtgagggtctgtttacagaggctgggcaggggccgcttggctgtggggtgtgcgctgccccggcacctgcttgccctccgcgctcatctggggccgcagcatgcctatggttccgcttccggccgggagccctgaacacgggtgtgcagactcaccctaaagggcggcccaggccccacgctagaaggctggcgagaccgaaggcagcatgtgaggcctctcctgggagtgggggttgtgtttcccacagtggcctcagctgcgcccccgctcaggtgagcccgaaggcaggagccgggaggcactcctcccaaacactccactcagaccataaagcactcctgtttcactctgcgtgtgtctgttcttctgcctgtacctctgctcccgctgccccgggcccaggctgccgtgggttggcaggaggctgcccagcagtggtgtgaggacgtcccaccaagtctggccacaccctgggtacattccagcccacctgtgccagggctcagcagctgcacgcagcacgcttggcgacctcagccccaggaggtggaagtccactctgcaaggctcccaggcagccgcctgcagccctgccccccgccttcaggctcctgccccctccagctgtcagcagcgcccagcctccacccccacagctactgttgccatgagaaccctgcagggcaggcaggaagagtgtgccagtgaaggggaggaggtggccaagctggaggctcctctgcctgggagccttgtggccccagggtgttgggcagtcactgcagtccctgagcaggtgctgtggcccacagcaagcttagcctggccccttagcccacagcccatgaggtcagggccgggttcaggggttcgcctggtgtggggatgggtcgacagtacgtgaacttgacaggatcacaccatggacggctatgttggggtttcagtgggccctgctttgaacagtgcagaatggggtaggtcctgcccttcagagccaagggcatcagctccccacccctctgccaagctagaacgttcccaggcccaatgccttggggaggggctggcagagtgggacgaggacattaccaggcaggtatggcaggtcacgtgcaggccttcccaggctggcagggaccggatgcaggagtggcctcacccagagaggatggcatcctggggacacaagaggctgcaggggccatctggccccaggtacccgccaagattttggcattggcagccttgaagcagatagggcctggggagaggccagtggggcacagagtagcccatctgctcctgcctcgcccgacaggagatgcgaattccaagatgcccctgaccaatctctgcagcccaggccagggttcgggcccctcctctcaggcaagtgtgttggggtgacactggcgggactggcaggctgctccgggccacaagactcctgcttagacactgaggtctgtgtcttgggggtgctgcagggaccctgtgctctgcacagccccaaattggagccagtgcagctcatgatccccagctccacggtgcagcccccactgggtgcggcccctttaagtacagccccttcagctgccatcaggggcagcactgagcagc

SEQ ID NO: 18002 - DNA, 1492 bp, Artificial sequence
  DNA replication origin
catggcgagcacttggacgcgggtcccggggtcgccaccttgatgtcctggtacacggtcgacaccagcaggtccggagggtccgtacgggtcatcttaaaagaggtccccaggctggcggctccagctcacactgccttgcggggcttttgccctggggggagacgcgggtcagggcggccccctccgcagcccaggccccgctactcccccacgctggcccggcttacctggggcgcagcgggcggagcagccctggctgcgggcctgggccgagaacgcgggcgcttcctccatgccggggtcagaagcacctgcgggaggaacccagctgtccaggcgcccgtcctgcccgtccccccgtcctctccctgcgatggggcgggcgggccagaaaggcttagccgtggttgtggttcccgcggcgggagctcccgcgtgaagctccagggcctcccctcccccgactagtgacggcggggtcggctcgggtggacccctttccgggtggggtaggggagtgggggcgtggtcctggggctgcgccctctggtgtccgcagttggaaggacgggccgcatttgggccttatttataggtgttgccccaggagacgtcagtgactgcgcccccgtcacagcgcccactgcagagcgacccctccgatcgcgcacagtggaaggcgagtccctgggcctcagccttagccggctctgcaccaagtgggtgacaccaaccaccccacctgctggccgggccgagcacagagccccgcccccagcactgcaaggacccacgcctaggtgccctcaacttcccgcgagccccaggccagaaaaatgcccccagagagcatacccgggccctaaatctccctttcctctgccgacaccttttctgaccccaagtatctttgggtggttgaaacaaggccccagctttgtgtaaacgcacaggacacccccctagggtttgcaaggcagtcccaagccatcgagccgcgagctcgtggcagcccctcctctgagctgcgcaccaggcctggaagctgcccgctgggggtgggcagggcggagggtgggggaagccccactgctttgcaggagagggccctccccatttcgctcagaaggttccatggaaacctgcatttcttaggcccccacgcggcaggctggcctgggttcagatgtgggctgccaacccctctgtgatcccagagccagctggggggtgcgtcagagagtggccacaggcctggcctctgcacacccaacacctggtctggggggtctaccccagagtgagctggggaaagcgggtacctggccaggccccttgcagggcagaacctcaggtggatgggcctctcggggtctggccgggtcccccctctgtgtcccaggtgtgcaggggcttcctgctggcagggctgtttttctgggtcagggccacgagtcccaggccttgtgcccatcccagcctcccccgc

SEQ ID NO: 18003 - DNA, 988 bp, Artificial sequence
  DNA replication origin
cctcgaggatccccagaagaagtcggtcctcgccctcggtgctccccgctgggaggcggggtgggcctgaggaccgccgagctctgccttcactcggaggggtcactactgcacagaccccacccgtagagatccggtccccgtcggtccgcggggctctcgctggagcctccccgactccggtttcccctcgtccagaagcccgacgtaaccaaagcccagtctgtcactttaaacacgccccgccccgcctcccgcggctgtgttgcctcctcgctggagaacaccctggtcgacctctgtgcgtccgtgtgcgcgagcgcgtcccgccgaggcggtgggcagggcggacggtgcgcagtgcgttcccgctggtcggagccagcacactaaccacgccacgcgccctgccgtcccttcgcctccagccgctgcagtctgggccctgcaggagctgggaaaaaccgcagggaggtcttcaggccgatatgcaagtctcccagccgaaggggcaggggacctgaacaggggaagcagagcacctgggcctggccagagctgacacctggctaggagaggaaggaccaagggacggggcgttcccaggtgggagcctggagggcaaagcgtggtgcgagcaggtgagggagagagctagttggtaagcgtggaagcccacccgagggggcttgacctgtcccgagaggtccccgcacacccgctctggccgcacgccgtactgcgggcgtggaggcgcaagcccggcggcccggcctccacctgtcccccaagtgcaccctggtccgcgcccagagctctctggagggtggggtatgcgggagaggggtggaggccaaacgcaagggccctcctggagtccccagccctacttcggagccaggggagggggcaccaagtgagagaaattgggcacccccgcctccgctcctgctttcgcacccggcacgcccatctcgtccccgcgcgt

SEQ ID NO: 18004 - DNA, 1088 bp, Artificial sequence
  DNA replication origin
ctcctggagtccccagccctacttcggagccaggggagggggcaccaagtgagagaaattgggcacccccgcctccgctcctgctttcgcacccggcacgcccatctcgtccccgcgcgtctgcaccggccaggcgtcccgcttgcccacccgccgccgcgccccgcgccccctaccccagggcctctgcattcggccccacccctgagggccggccgggaacgcccctggaccggaataatttccagggggcaagagctttcgaaccaagtaaaatagaacttgaatgtagcggctgccgttgcctccttgtaccggtagcggggttggggacggaagccttcggtcggtggagaggagaaagggagaggccttcgggcggtggacggggaagagagggagtccttcgggcggtggagggggtggagagcgaggccttcgggcggtggagagcggggaggggggaggccttcgggcggtgggagggggagagagggaggcctttgggcggtgggggccacggggagggtggtcttcggactacgtgcgggacaggaggtcagggctggcaagtccctcaggcctccctcgttgccccagcctcgcgggccgcctaactgccccgttccaagggtgccaccggaccccgctggagaggaacttctccgttggctggatttcatcaccacccattcccgattccacgtttcctttaagcggggctggcggagccgcaaggcggcaaggaactggattgcgattggtcagcacgtgcctcggtcggcggtacaattggctgaggcgctgggccttgggaagcattccccgacgggattggtcgtcgctctcgcagagcccgcctcccgcagtacaagcggcccccgggtcgggtgggaggaggggactccgggaggaggaacatggcggtggcggacctcgctctcattcctgatgtggacatcgactccgacggcgtcttcaagtatgtgctgatccgagtccactcggctccccgctccggggctccggctgcagagagcaaggagatcgtgcgcggctacaagtgggctgagtaccatggtgagggc

SEQ ID NO: 18005 - DNA, 1705 bp, Artificial sequence
  DNA replication origin
catcaccacccattcccgattccacgtttcctttaagcggggctggcggagccgcaaggcggcaaggaactggattgcgattggtcagcacgtgcctcggtcggcggtacaattggctgaggcgctgggccttgggaagcattccccgacgggattggtcgtcgctctcgcagagcccgcctcccgcagtacaagcggcccccgggtcgggtgggaggaggggactccgggaggaggaacatggcggtggcggacctcgctctcattcctgatgtggacatcgactccgacggcgtcttcaagtatgtgctgatccgagtccactcggctccccgctccggggctccggctgcagagagcaaggagatcgtgcgcggctacaagtgggctgagtaccatggtgagggcgggacctgcgggcatgccaggggcacgcctggcgaggcgggggcggggctggcgggacggagacggggctgacgaggcaggggcggggctggcggggcgggggcggggctgcgggccgtagcggactgcgctctgctccgagtcctgcccctgctaggtttgacccaggctgaggtcctgggcgggaagggcgtgacacggcctgacaccctccccagcagtctcccagttcccgcgccctccccggttccaccctccttcgctcattcatccctgtcccagcctcaaggggcttcgtctctcctggggaaggggctgttcagagctgggatttcagaccccttcggctgggagttcctcccgcggcctccaagggcggccagggcacgtcctgaggccgccctcccatcccagcggacatctacgacaaagtgtcgggcgacatgcagaagcaaggctgcgactgtgagtgtctgggcggcgggcgcatctcccaccagagtcaggacaagaagattcacgtgtacggctattccatggtgagccgcagccccgtcccgccctgccggaggccccagtaccagcttcgaggcccacctgagcctgctgccctgacccgtggccccagctgagcacgcaggcttcctggggttctcccagggtcggcggcagagccctccctccagggcccattgtgttcctgcattcccccatggagcacacgccagacctgaggggtgggacggacacccccagacatggccggctgtctcctctccctgccttgggaggccttgctgggctctagctgtcctccagcactttgggccctgggcccccagaggcagtcagtacctgggtggagctcagagtccccacctgtgctcttcacaaaaaccaccagcagatgagacccacgtgcgtccctctgggcgcctcaggccccaggatccaccatcaaggtttgcttgcctgtggaggtcgcctctccccaggggagcccccaagggcggtcgggatggtgggtttggcatccccaggcactgcctatccctttcccacactcgcttctggtgtggctggtggctggatgcccagagccgggtatcgggttgaagggtccaggtagtgccagcaggcgtcttctcttctccaggcctatggtcctgcccagcacgccatttcaactgagaaaatcaaagccaagtaccccgactacgaggtcacctgggctaacgacggctactgagcactcccagcccggggcctgctgcctccagcagccacttcagagccc

SEQ ID NO: 18006 - DNA, 1108 bp, Artificial sequence
  DNA replication origin
gagtcctcaaaggagcagtaattaggggcccagcaggggcccggccgcacggccacatcgtccagcgccatggtgccgtggtatccgtcccggaggccctcgaacagcagctgggggtggagggtgtcagctggccaggggccctgccctgtcctcccacccgggtgccaggcctcacctggtactgggcatgggagccaggctggtgggaaagggtggcccaggcctcgtgccagcggttgccctgggtgcctgaccgcgaccacaggtgtgtctcctccccttcccgtctcatggctaggcgcagagtccctgcagggaggggaccagtccataactgacctctctcctgtgccttgatgggtgtcagagcgggggactctgaacccccgggggcctccccacaggctctgccctgtttccaggtccactcaccaatctggggcccatggaggtggtaccagaagctgagacactccgtgggtgctgctggcacctggggcctggagagcaggtgggcactgtggccccaggccagggggtctgtggggtccaggagcacaaagtggcctgcagggggcatggggctgtgctgcagagatgccccactctcgtctgaaagccacccccggtctgagcgcccatcctaccttggcctgtggtgtggtcgtggtcagggccgcggctctccacccagcgccagtgtgtgtctgagaggtggcctgggtaccagctgcatgtgtcccgctcaaagttacaggagacctctgggggtggggccaggtggcgtcacacaccttctcccctccccctccagagccctgagaaggtggaagctccggggtccctggaggagtgtaaggggagcacccaggtgggagtgaggatgggcagcaggaacctctgtctctctcggtggtcactgtggggctacagtccctcagggtcacgttgtccaccccagctccctgctggtcagggccatccaagtccaccaaaccgacaaactccagcttcatggggtagggggatgaggaggatggttaagtcagggcccgctccagcggagctcccactctgggctgccctcctcacccggaagggccgg

SEQ ID NO: 18007 - DNA, 1129 bp, Artificial sequence
  DNA replication origin
cagtgccaaggagttccaggtgaggctggctgtgggcaaggagcctcctcctcctccacccagggcccacacaaactcctttccttctccatcagatcgtgtttgaagccactctgggcggccagccagccctggggcccattgccctggatgacgtggagtatctggctgggcagcattgccagcagcctgcccccagcccgggtgagccctgggctgcagtggaggcacggaggagggcccaaggggccagcctggctcggggtttgccaggcttaccagtgtgtggtcccaggagctgcgagcatgctgcacccagacaggacaagagagctgccaggcccaggccctgtgccctcctcactctgccctgctcacccctggggccgctgcctgggctgggctgtccctggggtgcagcctctggggcctgccctgcctggctgtggcctctgtgctccctgtgcccacacccagggcaaggtccatcctggaggaaccgccagccgggtcagggcagccactgactgctctcacttggtgagggaaagaatctcgcctggggccatgagccccaccaagtctgcagacagcagctgcctgtctgccaggccccatccttgtggtagcagaaccaataccctctgcctttgaaataggggtgaaccccaggagccagcagaggctgagggaccatgcagccccaggcttcctccttagccccagatgtgggggctgctttggagggctcacatgtccctatggcccacagggaacacagccgcacccgggtctgtgccagctgtggttggcagtgccctcctattgctcatgctcctggtgctgctgggacttgggggacggcgctggctgcagaagaaggggagctgccccttccagagcaacacagaggccacagcccctggctttgacaacatccttttcaatgcggtaggagcccctggggatgggtgggcaggagcctctgtgctcagctgtgacgctggagggcgggcagtggcgggacacaaccccccggggaggagcccccacctgtgcaaggcccatccttgccctccctgccctgcctctcccagccaccactgtcaaagctcctcctccttggccg

SEQ ID NO: 18008 - DNA, 1945 bp, Artificial sequence
  DNA replication origin
agatcgcgccacggcacccagcctgggcgatagagcaagactccatctcaaaaaataaaagttaaaaaaaaaaaagtgtcccaccccacgctgcgtttcgggccccacggccctggtcctcgagcgcaggtcccagccgcgcaggcggcaaaacaaaggggggcggccgcacggctagagcggagaccccgcgccccctccgcccgcgtggcccggccggggtgcggggcccggggaggcacgggggctgcgcgtcggggcgcagccgccgcccgcgtgtgctcggaggccgcggggcccgggctccggggtcctcccgacctgcagccccagcggctaccgcgcctcgccaggccaggccaggccccgacgtcgccttccctacgtcgccggcgcccggccacgacgtccctcagacgagccgaacgccgaatggccccgagcacgggaagtgcccgccccccgcgtgcagccagccaatgggacgccgaaagcggggaggtgccgaggggacgtagcgtcgccgcgccaggtctctagcagctgccgctgagccgccggacggacgctcgtcttcgcccgccatggccgagagcgactgggacacggtgacggtgctgcgcaagaagggccctacggccgcccaggccaaatccaagcaggtgctttgctgactgaggagcggccgggccgggcggggcggacgctgggccggggccacggaccgtggggcagggggctcggggaagggcaggcggggcctgggacagggcgcaggggacggggacaaggctggggtgccgggggcaggacggggttcgaagggcggggcgaatcgcaggggtaggaggaccgggccaggacaggggtgggaaggtggggggcggacccaggaggggatggacggacccaggaggcagggggcgggcgactggaggaggagaggagcagggaaccggacggggcaaggggcaggcgatagggccgggaccagtgccagggtggggcggggaggggataggggcagggactgttggtggggacaggtgtgaggacagaggcaggaggtggggacggggacggggacaaggctgggggccttgtgtgaggataggggacagagaaccagggtgggcactgggaacgggggcagggatggagatggggacagggcttggaagaacagggtagagtggggtacagggcttaggacaggggtggggactggggcaagcagcaggaaccagcgatgaaggtggggaattggggttgggatagggctgggggccattggacagcagttgagggcctggggcgggagactgggtgacggggcagaggttagtgacctgagtgggagctggggacagggggtaggctcctccctgagagttttctctctgcctgggacctgcttggttctactggtctccgctggtcagatactgcccagggagcctgcctgggtgcatcacaggctgtagagagtgcctgcttcaggggaccccatgagcaggtggaccctgttgcacaggtggaagatgggcgtgccctgaacagtacttgtggaaggagattaccaatgtggctgatggatccgagggtcagttgtgagtctgatgtaatagggaggacagtttagtcaccgcctctgcctcattcgtaccctcaggtggcctagggctgaagcctttgaggccagttgggccaggatgcgctggggctctggtgacagggattcattggtctgccctacccttactggttgcacagtcaaaaccaaattcactctccttttcttttaaaggaaacttaatggccacaagctaggagtcatgggaataattgcgtggcagcatctgtgagcagatcacacttaggatgctccacaagtcactcctctgaagtggtagaaatgttggccgggcgcggtggctcacgcctg

SEQ ID NO: 18009 - DNA, 1120 bp, Artificial sequence
  DNA replication origin
tcggccatggcgggcgaagacgagcgtccgtccggcggctcagcggcagctgctagagacctggcgcggcgacgctacgtcccctcggcacctccccgctttcggcgtcccattggctggctgcacgcggggggcgggcacttcccgtgctcggggccattcggcgttcggctcgtctgagggacgtcgtggccgggcgccggcgacgtagggaaggcgacgtcggggcctggcctggcctggcgaggcgcggtagccgctggggctgcaggtcgggaggaccccggagcccgggccccgcggcctccgagcacacgcgggcggcggctgcgccccgacgcgcagcccccgtgcctccccgggccccgcaccccggccgggccacgcgggcggagggggcgcggggtctccgctctagccgtgcggccgcccccctttgttttgccgcctgcgcggctgggacctgcgctcgaggaccagggccgtggggcccgaaacgcagcgtggggtgggacacttttttttttttaacttttattttttgagatggagtcttgctctatcgcccaggctgggtgccgtggcgcgatctcggctcactccgtctcccgggttcatgccattctcctgcctcagcctcccgagtacctgggactacaggcgccagccaccacgcccggctaatttatttattttattttattttatttttagtagagacgggccaggatggtctcgatctcctgatctcgtgatccgcaggtgggactctttaagaaaaagaacgcaagccgggcacggtggttcacgcctgtagtcccagaactttgggaggccgaggcgggcgtatcacctgaggtcgggagttcgagaccagcctgaccaacatggagaaaccccgtctctactaaaaatacaaaattagccggacgtggtggcgggcacctgtaatctcagctactcggggaggctgaggcagaagaatcagttgaacccgggaggcggaggttgcggtgagccgagatcgcgctattgcactccagcctgggcaacaagaatgaaactgcgtttcaaaaaaaaagaaaaagaatggaaaactgtgaaaacatcggttgcaaaa

SEQ ID NO: 18010 - DNA, 1222 bp, Artificial sequence
  DNA replication origin
ttcatgagatcaggtgttggttaagtttgtcatgttaggaggcctgaactgcagtgttaacaaggctgcctctttccaggccaactccaccttcatcacaatcttcctgggggctggtggcactggagtgacgataagcatttttggcacacaacaaagggggacttgagtggagatacatccagtcagagtttatgggatattttctttttctttctttcttttttttgtttttctgagacagcagagtcttgctctgtccctaggctggagtgcaatggtgcggtgtcgtcgactcactgcaacctccgcctcccggttcaagcaattctcctgcctcagcctcctgagtagctgggactacaggcacgcaccaccatgcccagctgatttttgtatttttaatagagacagggtttcaccgtgttggccaggatgatctcgatctctcaacctcgtgatccatccgcctcggccttccaaagtgctgggattacagaagtgagccactgcgcccggccacaagagattattttcattcagtggaagcacatccttgctggccggctgaggctgttgagtccttagccgaacggagcttggtgctggaagtcggcgggaaacagagaagcaaggtttgtatggacggagccatcagtgtgtccccaaggttcttccaatcatccggtgtgaaaaacggtaagcagaagactcaacttcccactgcctggttagaattacagttgtctcctccgcggagtgcatttgctaatgcagcatttccaatttaatacagcatttatgtatgttttctttttggatggagactgcatttatcaggttccttgtttgtggagcatctattcaaagcccggaagtcaatactatgattagggcctgcggtggctcaagcctgtaatcccaggctttgggaggccgaggcgggaggatcacgcgagctcaggagttccagaccgacgagccagggcggcacggagaccccatctctaccccacaaaatacaaaaattagccaggcgtgggggccgcgcctatagtcccatcgcttgagcgcaggacgtcgaggctgcagtgagctgagatctcaatgttgtgctccagcgtgggccacagagtgagaccctgtctataaaaataaaaatcctaaaaaagttgttcaatgataatgtataatgacctttctcattatacaaaacggctgg

SEQ ID NO: 18011 - DNA, 1040 bp, Artificial sequence
  DNA replication origin
gatccacctgcctcagcctcccaaagtgctgggattacaggcgtgagccgtgtccagccggtaatggaaattttaatccaccgcttttgtattgtaaagtttatttagcgtatttttttatttttgagacagggtcttgctctgttgcccaggctggagtgcagtggtgcacacactgcaaccagagctcactgcagccttgacctccccaggcttaggtgatcctctcacctcagcctccctagtagcttaggctacaggtgcataccaccattctgggctaatttttgtattgtttgtagagatggggttttgccatgttgcccaggctggtctcagattcccgggctcaagtgatcctcctgcctcagctgagtagctgggatgacagttgcgtgccaccatgcccggctaaatgttgtatttttagtagagacaggatttcaccatgttggtcaggctggtcttgaactcctgacctcatgatccgcccgccttggcctcccaaattgctgggatggcagcagcttttttttttttaacgggcatgttgtgcagatgtggttcaggagagtgagccagtggcccaggtcatccccaggtttctccgccagcagtgacgccccaccctggggagcaacttcccttaggcccagctagctgcagaatgggggtagttggagggaacctagaaggacctaagcgcagggccctggcaggtgagcacagcatagggaggtgccaggtggagaagtgtgcagggaagcagggaaggatggtggaaacatggcggcccaggggcagaggttgcagatggtcgcagttgccctggtcccgggaccaaggggcgagagctaaaaaagtgggaggccccactggggagggtggcggtagggctgggagaatgtggctgtggcagggtgggcggggaccttccagccacctggagcatcctgggtggagggttgggtggccttggccagatggtcacagttgctgggaccaagtgtgagcacagacctctagagtttgtgggtgtg

SEQ ID NO: 18012 - DNA, 1489 bp, Artificial sequence
  DNA replication origin
tttcttgaacccgggaggcagaggttgcagtgagccgagatcgcaccactgcactccagcctgggtgacagagcaagacaccgtctcaaaaaagaaaaaaaagagacagggtctcactctatagcgcagcctggagtgcagtggtgcaaccacagctcactgcaacctccacctcctgagcttcagtcatcttcctgcctcagccttccaagcagttgggactacaggtgtgcagcaccacacccagctaaattttttttcctttttttggtagagatggggttcccccatgctgcccatgctggtttcgaactcatgggctcaagcggtcctcctgcctcagcctcccaaagtgctgggattataggcatgaactgccacgtgaaccctttctcatcccgagctggctgctgcagactcaggacagctttgagcctcccaggtgcagccaggaggagacgccttcttacgtttgagagctcagttagttcctgggcttgagcaacctcactgagcctgcaggtgcggacttgggacgtttccatggctgcttgcagcaaactcaggggtgatgacgttgatggaatccgatggcttcctgagttccatctcaaggccttgctgtcccaggaatgtgggtttggggcggaggggaattccaactgcaaaccaagtaacatatatgaaatgtggcattggcgcctggggacagcgtggcctgtgtaaattatgcaacttcaaagcctgccctgttttgcagtgtattccatccttgaggagtcccgtggtctcagggtctgaatgcttggaggagacttacctccgtgaacgtttccttctctgcaaagcggggtgaaaggtctccatttcaccaaaggctggatggagagggggtggtgtgtccagtgctagcccgtgcaccgccagagagaacctgctgcagctcccgttctcctgggcagatgacagtgccgcctcccccatgcagcccacaggactcctagggcagcccctgttttggccgccaaggccactgttttcatttgagtgtctggaggccataggttgtgttttcacttgaggtcgggagttcaagaccagcctggccaacatggtgaaacctcgtctctatcaaaaatacaaacattagccgggcgtgatggcgggcgcctgtagtcccagctactcgggaggctgaggcaggagaatcgcttgaacccgggaggcggaggttgcagtgagtcgagatcgcgccactgaactccagcctgggcgacagagtgagcctccgtctcaaaaaaaaaaataaataaagtgcacaacccagtagattagcacaccggccatgtcgggcggccgtcaccactgtccggttgcagagcattacctcaccccaaaaggagaccccatagccttaataccttacttaagtgtgcagtattcttttagtcctgtttctcataaatgttacccaaattgaggcgccgct

SEQ ID NO: 18013 - DNA, 1329 bp, Artificial sequence
  DNA replication origin
ggtcgggtgcggggtcgggcgcgggcgcggggtcgggtgcggggtcgggcgcggggtcgggcgcaggcgcgggcacctctcagggagactccgggccggagcgggagcgggggcgggagaggccgcggggcgggggcggggccagcccgaggggatttctctgagccgctgggccggaaaccaagtccgagcgtggctggcgcgggaaagttcgggaacgcgcgcggccgtgctcggagcagcgccagggcacggtccggggttttgcgcggggtcgcggctcccagtaccgcctgaggcccgtgggcggcccacccggccctgccccgtcccgggtccgtcgctcccccgcaccctgtcgcccctccacgctcagctgtgggcccctcgtgtccccgaagccccgcaccctcagccggctgcgtgctcgggagggtcaggggcgcctccgacccctgagtttgccagcgccccccagccaggggtcggggaagaccagtgaggctgggggcggagccgactctgctgccttcctgcccagtggctggggagacccaggctgagcctgggtgaaaagtccctctggctgctgggagggtcgggggcagcaaggagccagtgcggggatgggctgcggtggaccgggccgggatcggggccggggcctggtcctggcagtagcaggggatgtttgtggaaggtagagccgagaaaaagaggagttgcaatgtctgcaagaatctggcgtgagcagctgaaggctggtgcttcctaggccaagatgaaggagtcacagcgcccatggcctctcgggaggcggccagatgggcagcctggggtcaggggaacggtcagggccagagctgggtattttggagttgtcattttgaggccccgagggctgagggtcagtgcagaagagcaccaagcctccactcggtgtagggccgacagggggtggggtgtctggcagccggtgaagacggggctcggaggaggagggagtctggtctgggtcaagtcaagggaaactaggactgagaacggaccctgctctgtggccacatgattttgaagggacggaattactgccctgtaactcagtctctctccctgttaatagccctagtttttaataagaggaactgaatgtattaatgggtggacacttgtaaggttcaagatctcctcttctaccacgcttgcttctgatacttttgtataaacagttgttaagagtttaggttgttatcaagcttctatttggtattattttgagcctgaaaaagatggggttacatataaaattgtaattttatttatttattt

SEQ ID NO: 18014 - DNA, 1068 bp, Artificial sequence
  DNA replication origin
ggtcgggctggtctcaaactcctgacctcgtgattctcctgccttggcctccgaaagtgctgggattacaggtgtgagccactgcgcctggcctttttttttttttttttgaaatggagtcttgcctcatcgcccaggctggagtgaagtggtatgatctcagctcactgcaacctctgcttgctgggttcaagcaattctcctgcttcagcctccacagtagctgggattacaggcacacaccacaatgtccggctaatttttgtatttttagtagagacagggtttcaccatgttggccaggatggtctcgatctcttgacctcgtgatctgcctgcttcggcctcccaaagtgctgggattacaggcgtgagccaccgcacctggctggtagtggccctttttcaggggtttacaggtaaactttccttccactttttgagatctggggacattacatgggagttggaggcaagtctcggaaggctgctgggccttgtcctgggcgcaggcttcttaggcccacctcagggttgccaaggggcaggtgtgcagatccatagggaccagcaccggggctcttccaagcagggcaaaggtgttaagggaacagaggagagcagggggattgggggcatcatgaggatggagggggacaaggccagatggggctaaacccagtggccgggtttccttctgagtgcccaggatgttcctagggagccctcagtgaggggtgccctattgtgggtatgaaggaggagcagagagcagggtcggggccagagaaggggctagtgctggcagcatggaggcagagccagtggaattggcctgtgattggacaaggaatgggctcagaaagcatcctggatagctgggcatggaggtgcactcacctgtagtcccagccactggagaaactggcgggaggatcgcttgagcccaggacttccaacctgtagtgtgcatgatcacacttgtgaatagacagcgtactccagctagggaaacatagtgagacccctgtttctaaagaaaaatgaaagcctcctgggtttggctga

SEQ ID NO: 18015 - DNA, 919 bp, Artificial sequence
  DNA replication origin
tgggagaccagagccacgcggggtcagagctcctgcagaggtgcgagagcctggagaagaagacggccacttttgagaacattgtctgcgtcctgaaccgggaggtggagagggtggccatgactgccgaggcctgcagccggcagcaccggctggaccaagacaagattgaagccctgagtagcaaggtttgtgcctgccgggtggccagccatgaggaggacagtgtaaagggggatagtgttcgtgccccagcaggttctagcaggtcctggagctttagagcccggacaatgtagaactccatctgcaaaccccagtccagtgtggtttaggggaggctctggcccccttcatttctgagtcctgtcatctaaggggcccaaaccctggaaggtcctagaggccaggccgtgggcaggagcctcttctctctgatgggagggcagagtcagccatggatggggatgtgcatggcctggtgtggcttctgagcacgcttgctggcccggagcttctgtgtggacttggagccaccacctcttggcgagggtggggttgggttcttgtgtgcagggagtggacatgagaaacatggagcccaggggtgcccaagagcactgtcctgctggagatcggtgggtgtgggaggcaggggctcgtgcccgcacccctcctgtaagagggaaggtggtcttggcacccggcaggtgcagcagctggagaggagcattggcctcaaggacctggcgatggctgacttggagcagaaggtcttggagatggaggcatccacctacgatggggtcttcatctggaagatctcagacttcgccaggaagcgccaggaagctgtggctggccgcatacccgccatcttctccccaggtgtggttctaggacccccacctcactgcag

SEQ ID NO: 18016 - DNA, 1386 bp, Artificial sequence
  DNA replication origin
aactcagtcactcccttcttgggctttgttgccatggctcagaacacgccctcgtgcagactttatttttaggctgagttggtgaacctgctgatagaatcttaggttctaggatcaaggccgagatgctgtaggcacctttcctgtttgaatttagcctggcactgctcgtgaaactcagcactgggggccatggcagtcctgtgctctggcgccctcgaggcggaaagagacccaagcgtcatctggaggggccgccacattgtgtggtgcctgctgccaaggccttcagcagggaccagaaacaaaactcacactctttcttctctgagttgagactggaaaaatgaaagattgttttaggggaaacttgagggaacagtctgggcagcctgcagggcatggccctgttcctccagggctgggaaagtcagcactgctttctggtggcgaccttccctctgcagctgctggctcagccgattgtatatgctgggagctctgcactaagcgttgggtgaagggtcagcattgtggaggccctgccacggaggtggtcttcttgggagctgcactcaggcaagaggacctgtttgtgtggaacatctgctttaagcaatgctggtgaacacagcttgtgtgcggcacgcgtgcaggctgaggacaggcagaatgggcctgggggcacggtggaggacgaggatggggaggatgggcctgggggcacggtggaggacgaggatggggaggatgggcctgggggcgtgtggaggacagggatggggaggatgggcctgggcacgtggtggaggacggggacggggaggatgggcctgggcatgtggtggaggactaggacggggggaggatgggcctgggggcatgtggaggacgaggatggggaggatgggtctgggggcacgtggtggaggacgaggatggggaggatgggcctgggggcacgaggtggagaggactaggacagggaggatgggcttgggggcacgcggtggaggacgaggatggggaggatgggcctgggggcacgcggtggaggacgaggacggaagggtggtcctggtgctgccacagtggggtccctgcgtgcagacctttgcacacagtgttctgtcatgtgacttggaaagcagcctctgccgggttctggctgtcactcacgtctgtgtcttgttgggtgggaaggaagtcgactcttcttgttttggggttcactctagccagtgcctcttctgaggcaggcttggggcccaacctaagccctgggccggtcagggctccctctgtggctctgccgaggtcccaaccactgcatttagtggatctcgccatgtggctctgctcatcttcttaagttttgggggttac

SEQ ID NO: 18017 - DNA, 1780 bp, Artificial sequence
  DNA replication origin
gtgctgggtgcactggagccaccgggaccccttgaggacatcgccaggctctgtggctttttcccgagcgggagaggtggagatgcttatagcagttacgccttaggaaggggacaaccaggccccgccacacgctcacacacaaacctgctcacgcagctgtgatgcttggcacggggtggccagtgcagatggagcccaaggccccctcggcctcctgggcaacttggggtacacaggatactgggggtgccgctcctcactcaaccccaggctaggggtacacctgacccagctggcctcggcccggggcaccttcggctggtcctgtggggccctggacggtggcccagtggtggcaggggctgctcctggctgtggttgtgcgcccggggcttgggagcggccggtcacgctgctgtgggcccgagtgtgttgcatgtccacgcaccacccgttcagggccctgaataaacagttggcaacagcacattgttgtccagtctctgtctgcagggagggagactgtgggcactgctggcacagtggagtggacctcatggtcactgctgacgggtgacgctgttattgctggcacagtggtcctactggagtgaatgttgcagtcactgctgacaggtgacatgtgcgtctgaggtcatgtgctggtgccagactttgtcacactgccctgtcctccatgacctccagggagatgcctggcacatgtgccggggctggcagcatgcagggcctgccgtctgggtccagggtcagtaggccacgtcactcccagtgccagggcagcccccccagtcagtcccgtccttgagggagttcctcagctgctgggtccagagtcggcaggctgcgtcgctcccagtgccagggcagcccccacagtcagtcccatccttaagggagttcctcggctgctgggtccagagttggcaggctgcgtcactcccagtgccagggcggccccccacagtcccgtccttgagggagtccctcggctgctgggtccagagtcggcaggccgtgtcgctcccagtgccagggcggtctccacagtcagttcaggccggcgaggatgggaccaggggcccagaagtgggagcagaggtggagctccagctggaccccacaggctttgttggaactgcaccgggagctcgggggcccggggcgatggtggtgacaaggaagatggcaggagtagagcctggcactcgggtcagctgcccattataggaagcacacagagcttgtggctccaaacatggcagcaagcaaccccgtacagagaaaggacgcagaggagacgagtgagtgtcgaggtgatggttcccctgagccacgtgggccgcaggtagagaccctggggctgagctcgagcaccgacgggatcagggacagcaccaccgagagaggctgcgccacccagagggacggagcctctgccctgccaactcctggtctccagctgggaagccctggggaccactgcagttcataataaaacccccaacgtgggcgagaacaaggaaaggaaggaagacacaccaaagacccccagacaagataagctgccctgagactaacaccctcagaagggagctgacagattctgtaaatgcaagcacaccacgggcaggctccaaagaattgagcaatttcctgaaaaggacttacctacgttcacattcaaggagactaacaaaaacattcctatgcaccataaaacaaaagtggggacagaaatcaagaggacttggac

SEQ ID NO: 18018 - DNA, 3591 bp, Artificial sequence
  DNA replication origin
cgggtccttggttgggcggcggtacccgggcgtcccctgcagacacgcagccccgtggaactcccggcgggacggttggggctggaggaacaggacgcccgctctcggcctcccttcccgggcctgggctgagggcagccgttggtgggtttcagggccgcctgggcagaatgtcacgatggacgagggcggcacgcccctgctccccgacagcctggtctaccagatcttcctgagcctgggcccggccgacgtgctggccgccgggctggtgtgccgccaatggcaggccgtgtcgcgggacgagttcctgtggagggagcagttctaccgctactaccaggtggcccgcgacgtgccccgacacccaggtcagtggcgtgtggggcccctacccacgttctgcagccagggccccgggcccctgcgcttgggggtcagcctggctgggggcccgccccgcggccccgcgtgtccatgctcacccccccacaccctgatagaggcctgtcaggacacagcgcaggcgcccctcagagcttggaggccagagggttcattgggtcacttggggggtggggggtacaggggtctctgtgagctacagggttgaatcccccagccgaggcctatgccatgactagtgggttccaggggcaccacggggcctgccaggactgctggggccacactcggctcatggccgtgactgcgaggaaggcccgggcccaggactgacaactgcccacccgcagcggccatgtcctggtacgaggagttccagcggctgtatgacacggtgccctgcgtggaggtgcagacgctgcgggaacacacagaccaggtcctgcacctcagcttctcccattccgggtaccagttcgcgtcctgctccaaggactgcactgtgaaggtgaggacggccaggtgtcctgcacaccccacccagctctgccgcagcacggaggtcccaggacccaggcgttccaaccaggtggtggtgggggggggggtgggtcaggccagaggtgacagcagcctccctgcatccagcggagggaccacagaggatcaggagcggtgcagggtggccctgagtgctgaggagagggtcccacacacagccgcctgcttcaggggcaggctcctccgctctataccaatgccccccgagtggatgacagtggctggaaggggtccctgctccctggtggcctctgagtagggctggcagagctggggcctcatggctgtgtagtagcaggcccccgccccgcgacctggccaggcgatcactacagccgcccctgccgaacagatctggagcaacgacctgaccatctcgctgctgcacagcgcggacatgcggccctacaactggagctacacccagttctcccagttcaacaaggacgactcgctactgctggcctcgggggtgttcctggggccgcacaactcctcatccggcgagattgctgtcatcagcctaggtgagcacgggcggcgggttgaccctgcccccgccccacgccgacagcctgtccagccccggcctccccacagactccttcgcgctgctgtcccgcgtgcggaacaagccctatgacgtgtttggctgttggctcaccgagaccagcctcatctcggggaacctgcaccgcatcggagatatcacctcctgctcggtgctgtggctcaacaatgccttccaggtgcgtgcggggctaggggcggggctgccctcctggggcctggcgcccggcgcccacctggcacgtgcccccgcccccaggatgtggagtcagagaacgtcaacgtggtgaagcggctgttcaagatccagaacctcaatgccagcaccgtccgcacggtgatggtggccgactgcagccgcttcgacagccctgacctgctgctggaagccggtgacccggccacgtccccctgccgcatctttgacctgggcagcgacaacgaggaggtggtggctggcccggcccccgcccacgccaaggagggcttgcggcactttctggaccgcgtgctggaggggcgggcgcagccacagctgtcggagcgcatgctagagaccaaggtggccgagctgctggcccagggccacaccaagccacccgagcgcagtgccacaggcgccaagagcaagtacctcatcttcaccactggctgcctcacctactccccacaccagatcggtacacccctgccgccatgctgcccgcctcggtcctaggagcttgggggaggccgggcaggggtcctgaggggcagacagcaagcaagtccacaggcaaagctgggatcgttcactcgcccctggggtcacaagcccagacctggggcctgtgggatgagcagtgaaaacaaacgcaggcagggccgctggccagcaagcaaccgacgggcctgattcaggtctggggcccccggagcaggcagtgcccacggacctctgtggtgctcacagccccagagacaccactgaggtaggaagctgccctggagtgatgtccttggggcattggacagggaccctcaccgtagccctccctgcaggcatcaagcagatcctgccacaccagatgaccacggcagggcccgtgctgggtgagggccggggctccgatgccttcttcgacgcgctggaccacgtcatagacatacacggacacatcatcggcatgggcctgtcgcccgacaacaggtgggcctcttgccagtgtcccaggcggggtgcccgcaggcggcccacacctagcacagtgcccctcgcccaggtacctgtacgtgaacagccgcgcctggcccaacggtgcggtggtggccgaccccatgcagccgccaccaatcgcggaggagattgacctgctggtgttcgacctcaagaccatgcgggaggtgaggcgggctctgcgtgcgcaccgcgcctacacgcccaacgacgagtgcttcttcatcttcctggacgtcagcagggacttcgtggccaggtgcagggcgcggcgtggtgcagggcgggtgtgggcagcagcgggcgggcggccggctcacccaggcgctgttctgcagcggggcggaggaccggcacggctacatctgggaccgccactacaacatctgtctggccaggctgcggcacgaggatgtggtcaactcagtggtcttcagtccccaggagcaggagctgctgctcacggccagcgacgacgccaccatcaaagcctggcgctccccacgcaccatgcgcgtcctccaggcacctcgcccacggcctcgcaccttcttctcctggcttgccagccagaggcgctgaggtgtgctgggtgcactggagccaccgggaccccttgaggacatcgccaggctctgtggctttttcccgagcgggagaggtggagatgcttatagcagttacgccttaggaaggggacaaccaggccccgccacacgctcacacacaaacctgctcacgcagctgtgatgcttggcacggggtggccagtgcagatggagcccaaggccccctcggcctcctgggcaacttggggtacacaggatactgggggtgcc

SEQ ID NO: 18019 - DNA, 3041 bp, Artificial sequence
  DNA replication origin
ggacgggcttccgccgagaggaagctcggggcggccaggcagtggcctccgccctgcggccctggagcagctctgcccggcgggctcggggcggacggcggggacgagcgcacgggcggcctcggggctcctgcactcgcccaaggcgggcggggacgacaaggcgggacccccgagggccgcaggcgcactcaccacggccgcctccgcccgctgcgccgcccccgccctgcgcgacccggacccgcttccgctgccgcagccgctcggaccgccgcccccgcccaacggggagcccgccaggcccgacgccacgagccccgaggcatcgatggccgaggaaggcagagcgcgcgggtagcccgcatccgcccctcgtgcgcctgcgccttgggctccggcggcctggccggcttttctttgtgcgcctgcgcgcactcgggcgcattgggaacagcgccccttgtggccagcgggcggcggtcgtgggcggggttgcaggcgaggctcaacgaacgctggttcgggacccgcctccggcgctccctgttgccgggccctgagcaagtggcttcatgaaccccgtgacgttggccatggagataagaccactgggtgatggtttaaggaagataacgtgtaaagggctaaggactgtcggtggaaatcaggggtgcaggagaaatggataaacagccagaggtcaactcggactttgtacataggacatggtgccagggccctgccaggaagtgcagatcgaagctaggctcacgaggaggctggaggtggggggtggggaggcaacggatggacatggacttcctgggctgggctctgtgacagcagagtagactctgtcctgggacttggtggtgctacccttggcctcccacagtcctgccaccctgctgccgccaccatgctgccccctgggactgcgaccctcttgactctgctcctggcagctggctcgctgggccagaagcctcagaggccacgccggcccgcatcccccatcagcaccatccagcccaaggccaattttgatgctcagcaggtagaagttggggggggtagagggaggcaggtagaagttgtgggaggggtagagggagacaggtagaagttgttgcgggggagagggaagcaggtgaagttgtggggggtgtagagggaagcaggtgaggggccctcccacagtgccctcgagttctcccatggtctgcccccagtttgcagggacctggctccttgtggctgtgggctccgcttgccgtttcctgcaggagcagggccaccgggccgaggccaccacactgcatgtggctccccagggcacagccatggctgtcagtaccttccgaaagctgtgagtcccagagcagccctgcaccctaaccccaaccctcctctcagcccccggacttcagccctgctctggcccctgaccccaccccggctgtggcctggactaggattcctggttggggtctcccagcctgtggtgcctcctccccgcccccccagggatgggatctgctggcaggtgcgccagctctatggagacacaggggtcctcggccgcttcctgcttcaaggtgaggcaggggctgcagggcatgtgggtgggggatgacgcagccactgtggctctctgacatggctactgtggctctgccccagcccgagacgcccgaggggctgtgcacgtggttgtcgctgagaccgactaccagagtttcgctgtcctgtacctggagcgggcggggcagctgtcagtgaagctctacggtatgtgggggccagcctctgtgaccaggcaggcgctcaagctctgcacactcactgggccaccccgaggggctgggtgagcccatggggacacacttcctttctcccatcctgatcctcctgctaagcaggggcccagggagtagtgacagacaggcctggtgtgggagcagggagagggccccgagggggcaggggacacacagaccccgtttccagagccctccacgccgcctggtgccaggaccccaggaaccctgtctgccctgcagcccgctcgctccctgtgagcgactcggtcctgagtgggtttgagcagcgggtccaggaggcccacctgactgaggaccagatcttctacttccccaagtacggtgagtgtccccagcaggtccccagctcagccacccccactctctgggctgatgtccagcctgacccctgccttgggcccccaggcttctgcgaggctgcagaccagttccacgtcctggacggtgagtgcacagcggggcaagcatggcggcgtggtgaggggggccactgccaccggctgagtctcgtctctgctgcagaagtgaggaggtgaggccggcacacagctccagtgctgagaagtcagtgccccgagagacgaccccaccagtggggtgcccgctgcctgtcctccgtgaaaccagcctcagatcagggccctgccacccagggcaggggatcttctgccggctgccccagaggacagtgggtggagtggtacctacttattaaatgtctcagacccctctctgactcttctgtccactctggaccggcgccagtaccaccaaggccctctctgcccccaccccgcctctttaaaagcccggcgctccctgttggctggagtccacgcagtgggcactgggccgatttcagcggctcttgggatttgggaggggagatcctctctggcatatgcccatcttgtgccctgctgggacctgggggcgtccagcctcactccaaggctgctcttgcctgggccattgtcctgcagcccccgggctgctcttccgcccccgtgggaggccagctgtctcccgtcactgcccattttggcctcttccgagccgagctggcaccagctggcccgtgttggtggcagcagttggtgctgtccacccacagccactgcactctctgcacacctcatccactcccacgtcccccgtgaaaccaggaagcagaagagaatgtgggggtgggcc

SEQ ID NO: 18020 - DNA, 1375 bp, Artificial sequence
  DNA replication origin
ggccgatttcagcggctcttgggatttgggaggggagatcctctctggcatatgcccatcttgtgccctgctgggacctgggggcgtccagcctcactccaaggctgctcttgcctgggccattgtcctgcagcccccgggctgctcttccgcccccgtgggaggccagctgtctcccgtcactgcccattttggcctcttccgagccgagctggcaccagctggcccgtgttggtggcagcagttggtgctgtccacccacagccactgcactctctgcacacctcatccactcccacgtcccccgtgaaaccaggaagcagaagagaatgtgggggtgggccagctctgccctcggggcagcccctgggctagggccggagaatcaggaacccggcatggcttgaccatgctgggcctggacctggccgctaagctgctcctctcaggccctgcctgcggccactggcatttgtttgataagcatttctgaaggcccactgtgtgctgggccctgggaccaccaggtgggctggtccctccccctaggaacttacaagtccagggatcagccaccaatcggccacagtgggcagggatgggaggagaaggcaccttggagttggtcccaaagcacacggcctgggtgggggcagggaggagccagcagctgcttcaggggggtccccatcccacgggcggggctccccctgccgtgcccacctgttcactaagctgctagaccccaggagggcaggcaagtcaggtggtgggaaggggaggcaggggccctgactgccgggacctgggaaggagaagggcccaggaggtcgtacccttgcatcgccttcccccactccagctccatgtcccagagacccatgagatagcagggcgcagcagaagggctcagggttcagagctggcaacgccgggaagactctaggcctgagccccaggaaagcctcctccatgcctggccccacatcccccaaacagaaagtgagggtctcatctgggggcaggaggagtcgggtagctggccacggtcacaagcttcagggagggctgaatgtccgaggggtggcgccagagacccacccgatgaccttgggtgctgtggttggtggcagagtggcccagcctgaccctccacgcctctgactgcagggctgggtgggttcccgcactgagtgaagtgcgtggccacttggctgtgtgctctgggaccagaggatgtgcagcgcaaggattacaaggcatttcattttcacagaagcattgaatgagctctagttaaatttcaaacactacataaaatcacgatagctctgtgtgaatcattgttctttaaaatagtttgcataatttggct

SEQ ID NO: 18021 - DNA, 1026 bp, Artificial sequence
  DNA replication origin
agagaggacctgatgggaggggtcaatgggagaggccccagggaccggtccccacggtgggctgggggtccagggtgctgagtggaagcggcggtttccctcccgcctctcaaggacgccttgcagaaggcgcggctgctcctccccgtggcacgcaagctcccgggcaccgcctcccgcctcggcctcccaaagcgctgggctcactggcgtgtgctgccgcgcccggcccgcccaccccaggcggtatggaaggccgaggtcagagccaggactcccccgggagccccgcaggtgcctcaaggcccgcgtcctgcacggcccgttccagcgccgccggcccagccaggcaaaggcacctgcagggccctgattgggcggcggaggtcacgtgcccaccctccaccaatcacgttagacgggaggagcagcacctgcgtctgccccgcggtggggggaggaggcgcgccgaacccattgtcgtgtccgggaggctcctgcaggggacgtggggggcacagaggttaacggcagcagccagtggctacctggaggcacacacagaccccccagggcggcaggagtgggtctgggggagggagcatggggcctgaggcgctgcttggagccgagggaccctcctctgtgtcgaggactcggcccacccgacctctgctgctcagtctctgtgggtctcgggctggccagggaaggcccggttttcctcccgcagggccctgcatgggcggggtccgtagcggggactgtcctgtacatgggctgtgtgctgtgatcccaaatctccccagtgccctgcgataagacgggctccgggaggggtgcctgctgcgctgagagcgggaccctggggctgcggacaggcgctcctaggctggctggggccagggggatggtggagagtcgaaggcgccttggggagttcaggggaatgaacagattatttccaacttttccttccctgggccagcctcctgaaacgctagcgttgtgctggtgagacaaggc

SEQ ID NO: 18022 - DNA, 1182 bp, Artificial sequence
  DNA replication origin
tttggatgatggatgggtggatagacggttagatggatagatggatggttggatattgggtggatggatggatgggtagatggatggatggttggatgatgggtagatggtggatggttggatattgggtgggtgggtggatggctggttggatgatgggtggatggatggatagatggttggatgatgggtagatggtggatggttggatattgggtgggtgggtggatggatggttggatgatgggtgggtggatggatggttggatattgggtggatggatggttggatgatgggtgggtggatggatggttggatattgggtggatggatggttggatgatgggtgggtggatggatggttggatgatgggtgggtgggtggatggatggatgatgggtgggtggatggatggatggttggatgatgggtgggtgggtggatggttggataatgggtgggtgggtggatggatggttggagatgggtgggtggatggatggttggatgatgggtgggtggatggatggttggatgatgggtcggtggatggatggttggatgatgggtgggtggatggatggttggatggtgggtgggtggatggatggttggatgatgggtgggtgggtggatggttggatgatgggtgggtgggtggatggatggttggatgatgggtgggtggatggatggttggatgacgggtgggtggatggatggttggatgatgggtgggtgggtggatggatggttggatgatgggtaggtgggtggatggatggatgaagggtgggtggatggatagttggatggatgatgcttttttgctctttttttcttgtgccctagatggggaggctgaggttaaaagcagcaagtttggttgtgtctggattgggagatattctatactgtgtggttgtgaggacacaagcctgggtgtcagaaatcctggaccacagcctggcatatattggatttaaccctaggaaggttgagagtgaaggtggctgtcttttggcagaaagggcttgttgggtgttctttcctgaacgcgtcaaggaggtgtccctcaaccctggggtgggggtcagacacaaggtcccccagagcaatggcctcactctctactctcttagtcctttccctcatccctcctcctactgggccacggtgt

SEQ ID NO: 18023 - DNA, 1143 bp, Artificial sequence
  DNA replication origin
ggaggctcctgggtatccaccccagcaccccagaccaggaaagtgaggcacaggtggtagaagacctgccagagccgcccagcacctgggcccacactgctttcccaggatcaggctgcagagcccctgggcggagtgggaagcacagggtccccttagcgttgttctgtctttgtgggtcctgggcctgctcccgtgcagaccttcatctgagggcgtgtagtgtgtggtggggaggtggacacagctgtgccctgacctcaagagtggcctgacctgggtgcggggctgggtctgtgtccaaaaacagacacaaaaggccacacattatgtgattccatttatgaagttctagaacaggccaagctcctctccactattagaaatcaggtctgtggctgctgcgtccggggtggggacactgtggggtggggtggaatgttctgtggccaggggtgagggtgctacctgcagctgggtggcgggggggtagaatgttctgtggccaggggtgagggtgctgcctgcagctgggaggggtagaatgttctgtggccaggggtgagggtgctgcctgcagctgggggcgggggttgaatgttctatggccagggtgagggtacagcctgcagctgcggggtgggtagaatgttctgtggccgggggcgagggtgctgcctgcagttggtgggggtagaatgttctgtggccgggggcgagggtgctgcctgcagtgggtgggggtagaatgttctgtggtcaggggtgagggtgctgcctgcagctgggggggtgtggaatgttggaatgttctgtgttggggatcggagcgctgcctgcagctggcaggaggtggagggggtctggaatgttccacgtcaggatcaggttttgctcacgtgggtgttcatcgaggtgtgcgactcaggtgcccgtattgctgtgagacggctcccacggtgggacatggtgatgccacgctggatgcccccacgtgcacctcttgccgtgtgtgggtgaaactcctcccgctgagtgctgggctcccgggtctgggtctgggggtgcagcacacgttcatgttcgcattctcagaacacccactgaccctctcccaccaggcagagcccaccctccctgcct

SEQ ID NO: 18024 - DNA, 764 bp, Artificial sequence
  DNA replication origin
gtccagtctcagccacaggcacgccaggtcctctgctgccttgccgcaagctcgggggtttcagtgagaccctctcccactcccacggcctcgagtggaccaggtagccctggtgttgctccctgggtgctcttgaccccccaaggcggctacaggaaggagaaaggcctatcttgaaaggactggaaaacagtgcgtcagtattttaaaaattaagctacaccatcataggacctggctattgccttcctgggtatttacccaaaagagatatagcacacacccacgcacgatgcgtgtgcccacggcggctttatctgtaatggccccaaactggaaacacccccaggtccacccacaggtgaaggagaacaaatcgtgatgtatctgtgcaacgcgacactgcccagcagtgaacgaaggagctactgatgctctcaacaacctgcaagccccaaaataaccgcgtggggcagagggcggagggcggagggcggagggcggagggcgtcaggcagcgagaaaggtggtgcacgtggactggacgcgaagccccagaaagccaggctcatctccagcgacggaaacacagcagtggcctgggggcaggggaggtggtggaaagaggagggagggagggactccaggggggctcagggaatctttagggcgaccaacacagctgccccctgattgcaatgatagtttcgtgggtgtgtgcgtcaaaccatatcgcagaggccgggcgcggtggctcacgcctg

SEQ ID NO: 18025 - DNA, 1108 bp, Artificial sequence
  DNA replication origin
atttaggggctgggcgggagctccccaggagggcagggtctgggcaggggccaagcctgggagggcctcgcctaaggacccctgggtcactgtagcaccaggctgggcaccgctccccacagagaccagaagccggaagtaccattcagcgcaggggctggctccggcagggcacaggtggagacccgatcccagaggctgctccccacctctgtgcccacccccggtcagggctgggcctggatcttcagggactcctgcctcccatcgggggaacgtggggtggcacacagggagcctgggcccacgcccctgagatgggggctcctgcctctcactctggggttcctttgaggcaacccagggggatggggccacagatctgagaagagccagcggtgaggaaagggcgctcctagcaggggcaagggctgccaggtgctgtggagctgggcagggacccttggtcacaggcctccgcagcctctgtcaccccacggtcccagccctccagcctagggcagtttctgctgggcgccatggagggtggcctatgtttgaggatgaatctggctctgttcaccagagagcgtgggacgggccaggagagcacccagctgggagggaggcagccactgggggttagatgaggacaaatgtccgagctcagctcctcctgggcctggaacctgggctgctccccgaggccctgcccacccatcacccagtgctcaaggacagtcggatccggcttctcctggcacagactgtttatttctgatggggtcgtgggggcaggtgtggctgagcctcccacgtggagggggcaccagcgaggctgggatgggcggtgagggtggggctgccaagggccgggccaggctccagcgtcctcaggacagagggtggccggcccaggcagagaatcacggaggggctagagtgagaggagggagaagcagagacctgcaggagagagaggggtggagggggtgccagggccaggaggaaggagggcctcgtggatcccagagtggcccgggacccccaggacccctggcagtcacactcgtggctcaccacgggctcttctgtgaggcaggagtgc

SEQ ID NO: 18026 - DNA, 2118 bp, Artificial sequence
  DNA replication origin
ctggtgacttcccactgggggccaggacccacatctcacagcccctaccatcattccctttccgagccctgccaccccagaaggggacacaagccccacttccaccctgagagtttggtcctgaaacgcccagcaagtgaagtgttgatgagaagctcaggccaaggtagagaaacttgatctggcccgcagggtcccgagggccaggtttgctgggcatggcttcccccatggccagctgttggggctctgatagtgacccctgggtgcccatttcagcctggggcacctttgggcttgagcacaggccctatcccttgccagaggccccaacttcccccagcaatccccccaccccaagtctgccccccgccgagtctgggcctccccaccccgagtctggtccagactcgggagcaccccgtggggctgtcctgttaccccagcgctgcacccagctccttgggcccctccagctcgttggccctggctggggccctgtcacaggccgtcacaggcaggcacatgtggtgggccctctctggattctgttgggactgagcttccctggcaggcgtggtgggtgagcgctgccgctggtctgaaggtgagcccgggtggggagctgggaaatgtacatgagagcaggagtgagtcggatggggtggggtggtgagcttctacggggctgctggcgaccactgggggccggagcccgtcttcttcctggattctgtggcccatcccttgctgggggcgcacgagccctgggagtgggctggtgtggactgcttccttgttccccttccccagtgcccgggggtcaaggagcccagactgggggaggcgcatgcctatgtagcagcaggggctagtgggcagcactggtgtcagggctggtgggggtggccgggtagcatcccaggcagaggccaaggtgagggagtgagtcccagggagccgggaggcacctgagaggcagggagaaggagggcagcggtgcaggggggccaaggcagtcctgagaacccactcctccacctggacctcctatcaacccctgcctgaagcagcagcgtgctgctagctcagatgccatctgtgccatgggctgagagggagagtctgttggaacagataggggtggggtgcctaaacccgggaccccgcgtggcccgcaagcctggctcagctacagagctgggggctgccgtcaggacaggggaggggcaggaagagagttgcggctgggatatcaccacaagactggcctcctgcccgctgccagctgagtcctggctgtcattccactctggtggggctggtggctcgctgactggcctggctggaggtcccaacccaggctaggctggtccaggacaagagcgcctcccggtggtgagcaagctctggggtgtggtggcgggtggcccggggcagggagacccaggacacgtggctctgggtctgaatggcttccgtctgggcaggcctgggtcacctgccagggagggactctgaagtctgatggggccgggtcctcccatagccagaggggttcccagggatctcgggtgtccagccctcaaacccagtgcctggaacagggaccaagcccctcctcttccccattttctagtgggctgcagaaagcccagcaggtcccatgtcccttctcctccctgaccagtcgttaccgagaccatatggtcgttggcgcctggagagctggaagagctaacaggatcatgcttcggttcaggacggactcctcagtccctgtggtcaagatggccagcaggtggtcagagacactccccagacacggctgagtgaggaccagtgagtgggagctgcccacgagccctgattcatgggtgcacctgggcccacccgagggctggagattcatctctcaccacatccaggaagggctgggcagttgccagctcctggcacgccagatttctcccctcctcccccggctaggactgtgcaaggtggacaggggcaggagggaccttcgcagagcctcttgcagcttgggcagggacaaggaccaccctgcacactctctgtgcccttccctttgctctgagcttggctgccaggcaggac

SEQ ID NO: 18027 - DNA, 986 bp, Artificial sequence
  DNA replication origin
cccagtctgggctccttgacccccgggcactggggaaggggaacaaggaagcagtccacaccagcccactcccagggctcgtgcgcccccagcaagggatgggccacagaatccaggaagaagacgggctccggcccccagtggtcgccagcagccccgtagaagctcaccaccccaccccatccgactcactcctgctctcatgtacatttcccagctccccacccgggctcaccttcagaccagcggcagcgctcacccaccacgcctgccagggaagctcagtcccaacagaatccagagagggcccaccacatgtgcctgcctgtgacggcctgtgacagggccccagccagggccaacgagctggaggggcccaaggagctgggtgcagcgctggggtaacaggacagccccacggggtgctcccgagtctggaccagactcggggtggggaggcccagactcggcggggggcagacttggggtggggggattgctgggggaagttggggcctctggcaagggatagggcctgtgctcaagcccaaaggtgccccaggctgaaatgggcacccaggggtcactatcagagccccaacagctggccatgggggaagccatgcccagcaaacctggccctcgggaccctgcgggccagatcaagtttctctaccttggcctgagcttctcatcaacacttcacttgctgggcgtttcaggaccaaactctcagggtggaagtggggcttgtgtccccttctggggtggcagggctcggaaagggaatgatggtaggggctgtgagatgtgggtcctggcccccagtgggaagtcaccagaggcctcggaggcgggcatggctgaggaacacagcccctgccctatcagggccgctgggttggtgggccctgccagcaggaggagggtgggcaaggtccctgccagctctgtctctgggaccagtgggcaggggcctctgcctc

SEQ ID NO: 18028 - DNA, 1205 bp, Artificial sequence
  DNA replication origin
ccgtgcgcggtgggggttgggagggacgcgcaccgcacagacagccggcgacgcgcgctctcgcccgggagctgctcggggaagcgccggagcgcgggtccccgcgccgcgcgcccctccctggcgtcgaggagaaccccagcggtccgcagagctgagccgaagacccgccccgatccccgccaggaatgcgacgtcctctgccgcccgctgtatgggccaggcgctcagccagggcacagaatcgggaccgggggcggaggggccgaagctggctggtgggcggcgtgcgagggtgagggactgtcctcgggaggggcgtggccagacgggggtgctgggtgtcaggggcgtggccagcttctggggctgaggcgtgaggggcggggccatctccgggggagggggaagtggggcgtggtcatctcctggggcggggcgtgaggggcggggccacctcccggggcggggcgggggcctgatgggcgtggtcagctcctggggcggggacgtgaggggcggggtcagctcctaggggggcatggggcgtgaggggcgcggtcagttccctggttgtggacatgaagggcggggccagctcttggggcggggtcgtgaggggcgtggtcagctcctggggcggggatgtgaggggcggggtcatctcctggggcggggatgtgaggggcgtggtcagctcctggggcggagatgtgaggggcggggtcatctcctggggcggggattgaggggcgggggtcagttcctggggcggggcgtgaggggcgtggctgctcgggggattgggcgtgggggcggggccgggttggagaccggaggagtagacggcagaggcgcccccgcaggtaggcgcaggtgggtccggagggtcctggccgacgcgggtgggggtcgctcgccgcagttcctggggcgctggttcagcgcgggcctcgcctccaactcgagctggctccgggagaagaaggcggcgttgtccatgtgcaagtctgtggtggcccctgccacggatggtggcctcaacctgacctccaccttcctcaggtgggacagcgggcaggtgggtttctgggacggagaggtccagggacaccctcgggcctaacccctgaccctgaggtcacccacctacaggaaaaaccagtgtgagacccgaaccatgctgctgcagcccgcggggtccc

SEQ ID NO: 18029 - DNA, 805 bp, Artificial sequence
  DNA replication origin
gggcgtgggggcggggccgggttggagaccggaggagtagacggcagaggcgcccccgcaggtaggcgcaggtgggtccggagggtcctggccgacgcgggtgggggtcgctcgccgcagttcctggggcgctggttcagcgcgggcctcgcctccaactcgagctggctccgggagaagaaggcggcgttgtccatgtgcaagtctgtggtggcccctgccacggatggtggcctcaacctgacctccaccttcctcaggtgggacagcgggcaggtgggtttctgggacggagaggtccagggacaccctcgggcctaacccctgaccctgaggtcacccacctacaggaaaaaccagtgtgagacccgaaccatgctgctgcagcccgcggggtccctcggctcctacagctaccggagtccccgtgagtggggcctccaccggccccctgggcccagcctgggggcgacacttgccgggacgactctgggccagccccctgccgcggagatccatggggtgggaggtgatggctgccccaccagcgtcagaggcaaaggccaggcctgggcgtgactacccatgcacaagtgttagggacagagagacccttcctccagggggttggatcctctctggagcccaccattgtcttgtcaggccccttccctgccctctggagttttccccacataagcagccccccaaggcccctccatatgcctcctcccaattctcctccccaggacccaggggtttcctcactcccacctggggaatggctcccacggggaaacctctt

SEQ ID NO: 18030 - DNA, 872 bp, Artificial sequence
  DNA replication origin
acagtacgtgccccgtggacgccgcccacacgcaggcctgaccagagggggctccccaagacccagggcagggcacacagcatcccccccgctgaggccagctccgtctccaccctgtcccaggccgaacccagacccccagggctgagttaaaggagaaattcaccgccttctgcaaggcccagggcttcacagaggataccattgtcttcctgccccaaaccggtgaggggtcctaatctgatggggagaggatcaaggtcagattagaggcaggcaggcagtctcctgactgggggaggcagaggggaggaggtggccccgccctgctcgaggcctgggccagggacagagggggtgagtgttcaagtcagaacctccctcccgcagccccttcatgaggagccccctccatgggggacatggagaccaggcgcccactctgtgccaggccccagcagctcccaggatgtggggcttcagcctggtggggggcatagggtagagggtgcccatgggggatacaggggaaccaaccatactgggctcaggcacagcctcctaggggtggacagcctgctcttggcagaggtggagaaagaccctctctttgtttccagtgcccagggagaggtgggaggtgatgggggatctgtgcagtttgggggctcagtcaagacgagctctgcgttacgggaggaacaggaagcccagtgggaaaattggcctaagtctggggttctgacgacagcccctggcttctttcttggcagataagtgcatgacggaacaataggtgagccactccattcattcattcattcattcattcattcattcattcaacacacatccacccaacccactctgcg

SEQ ID NO: 18031 - DNA, 2455 bp, Artificial sequence
  DNA replication origin
cagggaaggctgggaggccgcccctgtgccctgggcctgagcccaccacattctgccccgacacagctgcttcctggccacggcaggggctgctgtacacatctcgaccccgatgcagaactgagggaggggggcctcagtacatgagcaactggcccccaccagcccagcaccggcctgtctgcagctggcacccagggggtacggctggatgggtggggctgtggcaaggtcacaggtctttgtggggtgggtgggggacagtgaggcacaggcaaccaacttgtccctattttgggccctggggattgttgggggatgcaactgaaaaggtaggatggaggctgcagtcttccccagccaacccctactccagtcagacggagcgggtgaggtgggggtttcccctgcccctagccctgctgagcctggatcaaagagggtgtggacagggacccggggtgcagcaccaaagccgggaggactcattggagatgaggaggaaacagggctgggcacacctggctggcatcaaagttggcctggatggggacctgggcctggcctggggatgcccagagcagggcaaggagggaactgatcagcagagcccgaagcatcatgcagcaagatggcatctcctccggacacgggagcagggcagagctgaggtggctcctctgtaggctttacgcccctgaggtgccctggggcggctggcctgggactgcacccactgtgacaggcttctgatcaagttgcaccctgcagcgctctggcctggctccctccacccaaccccagccatccgttgcctttcctccggggtggggccggatgcctggcagctgagggtagttctgacgggcctctgggctagggggcctgcagctcacccatcctgcctcttcggccttctgcagcccctctgggatgttggaatcccccctaccttgagctcaggcacagccctaagcccccttctccgggaaggccacccagaagctcaccctcacctccgagcctcaaaatgcttggtgcctctgcagggtctgcctcgggggggcctggtgggcaggtcacagtgagtcctgcacattgtgtacctgagaatggctgcctgggtgggaatctggaagggagcagggttgggcagggcactggccgggcatggtgtggccgtggtgccagggctctggtgagtggacaaggctgtgatctggaggcccaggtcagagggcagggggcgcacagggagccagaagggatatggggtagcctgtccccagcccactctgtcagtctgtcctgatgcggggtggagacactctggcatgtttcaaacaaatgtttctttttgtcccctgaaacccttatctctgcccaatctcagtgcgttaatcccacacctcaagatacccaacaggtccaaagctcctctggggcctcgagcctcaggcctttactgctgagggggtgacagggtggcgttgggggtgcagggcacctgcctaagggattagctgagtcactgacccccagctcagcaccggcctggtggcagtggcagctgagggggtatggctcgacgtgtggggctgtggggcaggggcacacgactgtgtggggtgggtgggagacagtgagggacaccccctcctagctgtcctgactcaagaccccactgggagcaaacactagagggcctgttcctttgttgacgtcaggctgagattttagagggggaggtccgggtggccagggccaggcccaggacgggtgatgacagcgcagacagccaggagccagctctactgacttgcttccggagtttattgtgcaggatgaagcctgagtgggcagggttgctttggcggggagccggggcaggggctcggggaaggaacagagcagagacatccagagcgtgggggtcacctggctggccgggatcccagcttcagccctggggagtcctgaggggtgtgaccgaaaggctaggatggaggactgcagtctaccccagcccacctccactccagtcgatggagcaggtgcgggctacggggacttttctctgcccccagccccactgagccccgctgagagagcaagatccatccctggggcttggatccccgctgccccagggtctacagactccacccttcccagccccagggtccacagactccagctccagcctaggcctccctcctgggggtggtgggtgaatccgccctgagcctgctctccgagctgtcccacggcatccatgtagcgtccttggccctccccttccatcccctgttccctcccatcctgtctcccccaccctggtttcctcctagcccaggagccagacacccttgctgccaggtggtccctgtggtatagccccttggccttgtctgcctggggcctcgcacctgcaccccccaaccatgagccttca

SEQ ID NO: 18032 - DNA, 933 bp, Artificial sequence
  DNA replication origin
tcatgtactgaggcccccctccctcagttctgcatcggggtcgagatgtgtacagcagcccctgccgtggccaggaagcagctgtgtcggggcagaatgtggtgggctcaggcccagggcacaggggcggcctcccagccttccctgcacttgccctgcagttccagggcacctggtacatggtcggggtggtgtcagatgaccaggacttcctggactccaaggacaccatgaagatggctgtggtcttagtgacccccttggggaatggtgacctggccctcaagtttggataccccacgtaagtgaccacacgagcccatcagactcagcctcagaggatggccagcatgaggccacatgaaggtccagagggaccatggtgtccccagcacattgaggtcagaccacgggtcctcgacggctctgtgcggcagagccccagatggcagccacacggagtccagagggacccaggccctggaggaagcactgcctgaggcctggtgttgagaaaagtgtctgcatgtctgtgtctgtgtgtgtatcactgtatgtggctgtgtctctgtgtatgtgtgtctatttctgcatgtgtgtgtgtctgtgtgtgcgtgtgtatgcatgtgtgtctttgtagatgtgtacctctgagtgtgtatgtgtgtatcactgtatgcgtctgtgtgtctgtgtgtctgtgtatctgtgtctggctgtgtgtgtctatctctgtgtgtgtcttgtgtgcgtgtctatgtgtgtgtctgtcagtgtgtctgtgtctgtgtctatctccgtgtgtgtgcatgtgtgtatgtgtgtgtcttctgtgtgtctgtgtctggaagggggacctggaggccctgcattctaggctgtgtgcctgtgaacaggtacttaatacccaccccacccccagcaggagtgtcc

SEQ ID NO: 18033 - DNA, 935 bp, Artificial sequence
  DNA replication origin
tctggcagctagctccctgttataccctcctgggtttagacttttctgcactcccctccccttgggctggactttattaatgacttgcttctggcaactagaataggacaaaattgctcttgaattgctgggtgtgacatgaggcagccctaaggggatgaccatggccagcaagggaaccgggaagctgacgccccagctgagccttcccatgagaccacatcatcggccggcagcttgaccacagcctcctgaaactttgtgtcaaaggcccagagtcctgcctggctgacactgggagataatgcatgcctgctggttaagcagctgcatttggggtaacctgtcactctgcagtaagtgaccaccaatacacttatttaccctgcttattgtccatcaccccaggaggtccatgagggcagggatttctgtctgttttacctgccagtgtatccgtctcttcagcgcttacacaatggctggcacatacagacactgaataaacattgtgaatgaatgaatggggggtggtggctgttggaggtttaagcaggggtggatgggaagtggcacgtctgacttatgtgtgtgaagtccgtattctgtgctgtgaggagagaggacgggggctgcagaggagaggggtggaccatgggctcggactggaggtggagggaggaggagacaaagaacaatcaaggatggccctggcatttgggaagagtggaaaggggagattcatccccaagatgactggggtggggcagatttggagaggactggggggcctcttctttgtcatgtgaactctgagatgctggctgtagcaggccccagatatcaggccctaatccctgggacctgtgaatgctattgtctatggaagatgctgggcactgcattccagcctgggcaacagagtgagatcctgt

SEQ ID NO: 18034 - DNA, 1435 bp, Artificial sequence
  DNA replication origin
cctgcttaaacctccaacagccaccaccccccattcattcattcacaatgtttattcagtgtctgtatgtgccagccattgtgtaagcgctgaagagacggatacactggcaggtaaaacagacagaaatccctgccctcatggacctcctggggtgatggacaataagcagggtaaataagtgtattggtggtcacttactgcagagtgacaggttaccccaaatgcagctgcttaaccagcaggcatgcattatctcccagtgtcagccaggcaggactctgggcctttgacacaaagtttcaggaggctgtggtcaagctgccggccgatgatgtggtctcatgggaaggctcagctggggcgtcagcttcccggttcccttgctggccatggtcatccccttagggctgcctcatgtcacacccagcaattcaagagcaattttgtcctattctagttgccagaagcaagtcattaataaagtccagcccaaggggaggggagtgcagaaaagtctaaacccaggagggtataacagggagctagctgccagaataaagcaagccaaagtgtactttctacagtgagaagtgtgaaaaatagggaaatgacaggagagagggatgtgagagctgggcagcatgctgcaatgtcagaacaacaccagggaaggtctcactaaagtgacttttgagtaaagacctgaaggaagcatgtgagtctggggaaaggatgtgccaggcagaaacagcagcatgtgcagaggcccagggggcaggagccaggactgggagtgaactgggaagcaggaggaggtgaggcaggcttgctgtgggagcactccgatatggaagcgtagcttacagacccactggccctccccacagcaccatgctgccaacctggccttcttgccgagccttgaacagaaccattatttatgtggccaggcctccgcctgggatctccctgtccctggtgggagccatcctcttcctcctgccctcatagcacccgctgcagtttctcctggcgcttggccctgcctgagagtgtggtgtctctcctattggatcctagaagctccagggagtcagagaccttgtctgttgatcgatatccaggcctaggacaacaggcacgtaggaggagctggaggaataccatgcgcgggacagagagcgcagaagccttcttccctggagatcgctctgtactgtgacttctttttttgtttgtttgagacagagtctcgctctgttgcccaggctggaatgcagtggcgcgatctcggctcactgcaacctccacctccctggttcaagcaattcccctgcctcacaggcgtgcgccaccacacctggctaatttttttgtatttttagtagagacggggtttcaccatgttggccagactggtctcgaactcctg

SEQ ID NO: 18035 - DNA, 934 bp, Artificial sequence
  DNA replication origin
cggcccggcctgtgcctttagccccgccccgaatccccccaccctcataaccccgcccctaaccccgcctccacacacagaccccgcccccaaccagactccgccccgcgcaagctccctaagcccgcgactggcctgcacccggctccggaagtcgttcttccgcgcaggagccctgagcccgcacagccccgcccctcccggcgcccaagccccgccccgccgggttcccgctcgcccggcgccatggatccgctgtcgccgccgctctgcacgctgccgccgggccccgagccgccccgcttcgtgtgctactgcgaaggggaggaaagcggggagggggaccgcggcggcttcaacctctagtgagtgggggtccgcggggaggtaggggtgcagggagctccgcgggcggccccgcctgacaggccttctcccccagcgtgaccgacgccgcggagctttggagcacctgcttcacgccggacagcctggcggccctcgtgggtaactgggcgggtctgggagccgccacacccctccttgcagtgcagatcgtctatggggcgacagacatctgggattccccagaaggctctgacaccctctgcccgccctgtagctgtagtcctcccattggctagggctctggggtcgggcaggtttcgggtgcccccagtgggcctcgggttccaggcagctcgtgacaagcccctgtgctctctagaaagcccgttttggcctgagtgcggctgaggacatcaccccccggttcaggtgagacccaagcagggaggaaggacgggtggggaggaggagggtctgccacagctctccgcacctctcctctcccagggcagcctgtgagcagcaagctgtggctctgactctgcaggaggacagagcatccctgacgctttcaggggggccctcg

SEQ ID NO: 18036 - DNA, 1553 bp, Artificial sequence
  DNA replication origin
atgcaggagaaagagttcaaatacacgtgtccgcacagcgccgagatcctggcggcctaccggcccgccgtgcacccccgctagcgccccaccccgcgtctgtcgcccaataaaggcatctttgtcgggagtgagggtgtcctgacatctgaagggccagaggtctcgggatcacttcccatccccaaaccccagggtgggacgctcagcccgatagcccagaaccacaggggcaggagcgccgggggtcgggccggtcccatcctccacgctaagaaggcgcagactccaggcctcctgcaaccggtggcctcagggatctccaggaccggactgggctcccaaaccagtcaggccggggtggggcggggtgccccaggtggatgggggctggcacattcctcaatcctgtcccggggcaggcgctcccctccccgcagggcacttccagtgtctcagggtctacacgggacttctgtctgcatcctcccacggggctccgtgccctacctgggtgcggcctgggagggtgggaacaaagttctaagccttggggagccctggccctgcctggctgggcccctctcagctcctgggctggcagggctggaatagctggacggtctgagagtgctcacctccctccggcccagcaaggaagtctccagggagctgagaggctgcagcatctgttcacatcctgtggccctacacccagaacacaggcccaggggtgttccctgatcccttcccaggccagtgccaggagtcagagccccaccagagcctccaaccaagggagctgtttatttgacagggaaggaatttgaggagccgtgttagtcctggcccaggacaggcaggtggaggtggtggcggggggtctctgatgggggcctcaaagactgcctctcccctcataggcggactccccgcggggccacgcttgtgctgcaccttcaggtctcatcgaagtccacgccaccagctggtttcttactgggagggaagaggggtgtcactatggcactatggtgtggagaaaggggtggggtccaggattggaccctgggcgcaggaagggggctgtgggagggtacctcttgaacccggggttgatgagcgactctcctggacaccgcctcctgactccaggtccagggccacctctctggggatctgggtctgggggaaaacaggacaggggcagctcctgaacctggcagcatcccaaccacaaccttctccgaatagataggcattctctctggagcgtgagtcttgtttggggggaaactgagttccaggttaaagagcacagccctacttgagtcacaggcggacatgccttacctggtaagaagagctgaggccctgcaggccgggggctcttcctcgggctgacagctgtctcttctgcagctggggaggaaagcccatgggaaccccactcagtgccaggagtgggggcaagagcaggggaccccagtgaaggtatgaggtgcccacccccaatcctacctgccagtcgccgctccaggctccacacgcgt

SEQ ID NO: 18037 - DNA, 1878 bp, Artificial sequence
  DNA replication origin
gacgcggggtggggcgctagcgggggtgcacggcgggccggtaggccgccaggatctcggcgctgtgcggacacgtgtatttgaactctttctcctgcatcgcgctgtccaggtagcggcgtacgccgcgcagctccgcggggatgggcgcctggcggaagtgcgcgcacaccgtctgcgggcaggatcgcggggcgcggtcaggacctgccgtcccccaggcgcgccgcggtcaccctcccgcccgcccaccttccgtgctcacgtcgacgatgtgcagcttgggcaggaggctgcagtcggccagcgtgagcctgtcgccgtccaggaagcggcggcgggactcgcgcagctgcggctcccccgccagctcgtgctccaggggcgcgcgcaggtagctgtccagcctggcgagggcgcgcagcagctgctggtacagggctagggggcaggcggcgcggtgaggaccaggcccagggcgccctcccgcctgggcacccgaccccctgaccccgcttcaccttcgtcctgcgcgggcaccgggttcttgatgaacgcggagaacttgtggaaaacgtcgttgccggcggtgttggactccctgtaacgaggcgccaggctggggaagctgcgggatgagggggtgggactccattagactgggggcagccccgtcccggccccacagtacccccacagcgccttcctgggctctgtcttgcgcgcgtcctccctgggcccccctcttttcccctcccaccctgccggggctctcactcgggcggccccagcgtctcctccagaaagtcctcgatctgcagcgtgtctgtcttggcgtcgctgtcatagagcaggatgggcagctgcgagccgggggcgaagtccttcagcacgtccggggacctgcgggcagcagcggggtgggaggaggccggcccaccagtgtgcgaggccaggcgggggtccacaggatggggcctcacctgcgcgtgtccaccgtggtgagggtgaaaggtacgcccttgaggagcaggaccatgaagagccgctggcaggaggggcagtgacccacgctctccccgtcctcactcgcctgggtgggtggagcgggggtggggggtcagggctggaagcagacccaggcatcctgccgccaggctgggcgggacccgcctcccactgccagtgggattggagggacgccagggctccagcttggtcggcgcgacttccaagtgcccagtgagggcccttgacttggtccccagaacgtggggaggggggcagagctgctgggagccttgaggcctggggcaggcttggcccctggaatcttgtcagagcctggacagaggccaggcccctgggctcagtccccaaaagctggttgcaggggtggggtgggcctcacaagctgttttctgagtgattcacacatgagactgggcactgtggccaacagcacatcagtcccccaccccagtccccgacctgagagctgatggggctgcctggcccagcaccccccatcctggaacaccgaccgtaagctccactgttggcagcctgcttggtacctccccaccaaggagctctcctccagaagactgggctgggcccaggagccaaggctgggagcaggaccagggccactgacccctctctgggtgactcgctgggtcccactttactcagcctctgtagggctgcctgagtccccctagccacccacaggaaggggctcagacattactgggaggcccaccccacagcctgccacagaaagcaaagcccagaaaagcgcttcctcccagacaccctccccgcagctgagtccgccctgcaccttgacaaacagctggagcttggtctccgcca

SEQ ID NO: 18038 - DNA, 1306 bp, Artificial sequence
  DNA replication origin
taagctccactgttggcagcctgcttggtacctccccaccaaggagctctcctccagaagactgggctgggcccaggagccaaggctgggagcaggaccagggccactgacccctctctgggtgactcgctgggtcccactttactcagcctctgtagggctgcctgagtccccctagccacccacaggaaggggctcagacattactgggaggcccaccccacagcctgccacagaaagcaaagcccagaaaagcgcttcctcccagacaccctccccgcagctgagtccgccctgcaccttgacaaacagctggagcttggtctccgccatggtgggagctgccgcggtcaggcgcgggtggggacctggggagctctttaagtctccctgtgcgccccgccctccctggccgaggggcccgccccgtggagccacctaggcgggcagatgaagctgcccagcgcgcagaaccagctgcctgagcaacgccagcccggccccggggtgtctgagcctgagggtgtgacctcagggtggcggaatggtgtggggggctgccctggacttgagtctggtgtgcacggagatccgcccacccggtactgagtgtgctgggagccagcgtggtgggtggagaccagggggcagggcatagggagagcctacaggccagaagggtgcagggggtgtcacctgggaagggggcggctctgggtcaggaccacctccaccgtgaacccagctcagaccctgccctatggctctcccttccgcaaataccccttgtcagggctcccagcccagaaagccagtgggtgtgggtgagcaggagaaatggcctgcccagcctggcttcagttccccatctgcagcaccagggcatcgggagggtgataagcccacctgggggagccgccccttcccagctacggagcagtcaggcagggccctccccgctcagggcagggctcaaattccagacctgcccgcaacagggcggggaggccagcctggctttggtgtttggccggcagtgcaggtctccaccccacctcccatccctcccactggcgctcagcgcaggtttcttacccccaaccccttaacctttaaaaagaagcagcaggagaggggttagaagccacagcctgcgtggctggaagaaagaggccaggggagggtggtggtccacaggtgtgagcctgcgctgagcctcctggcgtgattggaacccacagttcagtctggccctttggggtcgccaactgtgccttcctcccacctggccctgacgctttagggt

SEQ ID NO: 18039 - DNA, 1025 bp, Artificial sequence
  DNA replication origin
agccacgccatttacctaatctcaggccctccctgcagtgggcatgcatggagtcaccttttccgtccttctccctggacacaactggagtctcccatagacagggtggtggccgtgccacggagccacgccacgccacgccacgccacgcagtggggcagccagcactcacttgcccttcacagggaaaccggccgggtgtggcagctcgcgcctgtagttccagcactgtgggagaccaaggcaggtgggtcacttgagcccatgaggtggagaccagcctgggcaacatggcaggaccctgtttctagtaaataaatgaattgattaaaccataaaaaaaaaaggaagccaccgggctgattcccaggtggcgagggcacaggggggtgttggatggccactgccgctccacagtccacagcccacgcccacagaacgcagtggggccgctgcagcggtgaaccgagtcttgttggtttgtttcttgagacgggcgtgaggtgaatggtcttcctgtgtcttgttttctttttccttctgagccaccggttcacggcctctgtccgtgccgtcatttttcctgtgggtttgtgagggtgcgtctgtcggtgttaaagacacaggatgccggggcagcagagggggctgggggcctggggcttctctgtggttggccatttgcctgccagggatgtgggaaaccagcaagcggagctataaccacagtgtccagaaagagctgaaatactagggcttggaatcgaggtggaggccggatggagggaaattgaggttcaggacaccaaaggatggggcagccacatggtatttccaaggctctgtgtccaggagccccgactggcgtggtatccagagaagcatcaggctgggctgactggggcagcactggagtgtgttccaccggggacggatgaggggcccgtaccaaggccctggggagaaggtgagcaggagagcagtgccacctcagctgccctgtccaggctggtgaggcaccacac

SEQ ID NO: 18040 - DNA, 985 bp, Artificial sequence
  DNA replication origin
cgttagaggggcccaagctgaggtcccgaggctgctgctctgggactgactgactggtgggttagaactctctccctccccaacacccctccctgtaggccccttccaaggggctctttttttttttttttttttttttttttgagacagggtttcactctgtcacccaggctggagtgcaatggcgcagtcatagctcactgcagcctccacctcctgggctccagtgatcctcctgcctccgcctgcacagggccacaccccagtgacatttgagcagctctgttctgaagggagacacacacctgtttggggggccggagggctgggggcattggggtattggtgcaaacttgtgcagagatttatctgctctgtgcatggagagagcctagaagcagtgagacctcgggagcggtgagacctcgggggcggcgagacatcgggggcggcgtgacctcgggggcggcgagacctcgggggcggcgggacctcgggggcggcgggacctcgggggcagcgagacctcgggagcagtgtgcagaccagagctcagattctggtcccaaagcccatcttccctaaaaggaaccagggttctgctagggactgaatgtgtcctccccaaaatttgtgtgttgaaaccctggcccctaggccaggcacatggctcacgcctgtaatcccagcactttgggaggccgaggtgagtggatcacctgaggttgggagttccagaccagccagaccaaaatggggaaaccctgtctctactaaaaatgcaaaattagccgggcgtggtggcacatgcctgtaatcccagctactcgggaggctaaggcaggagaatcgcttgaacctgggaggcaaagtttccggtgagccgagatcactccattgcactccagcctgggtgacaaagcgagactctgtctcaaaaaaaaaaaaaaaaacaaaacaaaaccctgtctcctgcaaggtgatg

SEQ ID NO: 18041 - DNA, 1324 bp, Artificial sequence
  DNA replication origin
cgtggtggcacatgcctgtaatcccagctactcgggaggctaaggcaggagaatcgcttgaacctgggaggcaaagtttccggtgagccgagatcactccattgcactccagcctgggtgacaaagcgagactctgtctcaaaaaaaaaaaaaaaaacaaaacaaaaccctgtctcctgcaaggtgatggtgttaagaagtggggttggctgggcgcggtggctcaagcctgtaatcccagcaccttgggaggccgaggcaggcggatcacaaggtcaggagatcgagaccatcctggctaacatggtgaaaccccatctctactaaaaatacaaaaaattagccgggcgtggtgtcaggcgcctgtagtcccagctactcaggaggctgaggcaggagaatggcatgaacccaggaggcggagcttgcagtgagccaagattgcgccactgcactccagcctggtgacagatcgagactcaaaaaaaaaaaaaaaaaaaagaagcggggtcttttggaggtgggtaggtcatgaaggtgacaccctcgagatgaccagaatcagcgccctcataaaagggaccccggagagctccctcgctcctcctgccaggtgaggagtcaagggaagtccacaacccagaagagccctcgccagaacccagccatgctggcgtcccgacctcggacttcgagcctccagagctgtgaggcatgaatgccacccgtccagggtcctttgcacagcagtcctggtcggactgagacaggctccttggagagaggctgattccaggtgtggggcagggaaggcagggacgcactcaaaacacatcaggagctggttacgaagacacagaagccgtgctggaggggcgcctgctggaggggcaccgctggctggacctcaggccatctgagcataagacaacagtggattgtgcgttatgaatggttaacgtgataaatgttacatagattttaccaccatcaaaaaattttaaaagagccagatgcagtggctcacccctgtaatcccaacactctgggaggctgaagtgggagaatcccttgagctcaggagttgaagaccagcctgggcaatatagcaagaccctatctatacaaaaataaaaataaaaattagtcgtgtgtggtggcacatgcctgtaaggaggctgaggcaggaggatcacttgagcccaggagttggaggctgcagtgagctatgattgcaccaccacactccagcctgggtgacagagcaagaccctgtctcaaaataagtaattaaaagatgacagtaatgcatgttaacacatta

SEQ ID NO: 18042 - DNA, 1014 bp, Artificial sequence
  DNA replication origin
catagcgcacagatgtttgttttaaataaataaacaaaatgtctgcgggtctgcgtgtgtgggttgggaagggtggggaggatgggcgcatcaggtgggttagcgctccagaaggccctgcccctcaggcacaggtgctggcagggggtggctgggtcggtctggaggagggaaactgaggcagggtggttcaccatggttcactgtccccctcatcccaccctcaggggttgctcccggcccccttccccttagccttcatcttcccgtccacctgccctctctaagcctccttcaccccttgctgcccacgtggggcctgcagcagcctgggctaggctgtctccgtgtcatggaagggacagcgagggcttccaggaagaggcgacctccaggaggagaccgaagtctgtgaagattccttaagggaagggcatcccagccagagggcagggcacaggccaaggccccagggaggcaggacctggaagctttgaggctcatcagcggtggagcctggcacactgtgggcaggagatgggggaggggcatgaatggcccccagagctcacgccccgtgatctgggccaagttcagactcttgccttaggccgtttcaaggctcctcaggagggtagagggtggactcactgagggctggtgccacatgggggacaacaggggaggggcccatgggcttgagggcactgggtgggctgggccaacacatccacttgggttcctatgaggcactcactgtgaccacctgagaggcagtgggatgaccatgctggagtccctgagaggctgggtcactggggtgaagctgtcctgggccctgggggcggttcactctggaagaaccgagaggaacagtggctcactggaggggctggtgtgggtttggtggtcggccaagggaaatgcgtgggggagccgccagaaggcaggaggccgcagcagcctccgtcctgcaactgtaggggctgaatcatggcagaaagaggtcgagaa

SEQ ID NO: 18043 - DNA, 933 bp, Artificial sequence
  DNA replication origin
cagggccagaggagcctcttctcaaagcaaaataaatacgggactgacccagctccgcccacagcccgctctcggcatcagccttcatcgtaagagagaaaagctggttccgaggccgggcaggagaaaggccagcagtgcctggtccagccggcgtcgccttgggcggtgagcagtgccaggcaggggcgaggggccgggcagaccccgaggctttaaggcaaagcagggcaagggtgtacgcagcccgggccgggtcagcctttggcacaattaggggcggcaaccgcagtgaccacagggcatggccgagtacaggggctggaggaccagaagccccttggtcctgaacctccactccaggccctggcaggcactgggggacttctgtccccattgttgagtccctggcccagctctgggtggtcagtggagcgtgtcctccctggcccagctctgggtggtcagcagagcgtgtccgtgttgaaggacagctgggcctgtgcacaggggaggtcaggcttatggggcatcctgtgccaccccctgctggggctgaggacacttgtgctggcccgccccggccctcctgcaggctgggcctggacgcagggtctccccacgagctccctctgtgtctgggctctcccgggcctccgtctgccgagtctgggggccactgagtctacatcggtcccctgttccccggctctggtcccctctgccccacccttgctctgtgcccctcaaagactctagcaagtctggaccatgcagttacgtctctccaggcctatctgcaagtgtccctcgcccactctgcccccttgacctctggacagcaagcatcctggggccagttctcccccgaccccacccgcggctggagccaccaggcagcctgggtccagtgggcagagccctggacagcca

SEQ ID NO: 18044 - DNA, 1144 bp, Artificial sequence
  DNA replication origin
gcagcagctgagcctgccacccatccccaggacgagcccaccacaggcatggaccccaaggcccggcgcttcctctggaacctcatccttgacctcatcaagacagggcgttcagtggtgctgacatcacacaggtgagggcgcccccaccccctctttgtgcccccaccccacagcaccccttccggtgccagcctgtgcatgtcccacagcatggaggagtgcgaggcgctgtgcacgcggctggccatcatggtgaacggtcgcctgcggtgcctgggcagcatccagcacctgaagaaccggtgagccggggcagggccaggggtgggctggggcgggcccggggggggcggccaggcagcggggccaggagtgggggtggctgcagggctgtgagggctgtggggccaggggggctgggggcactggggctggggggactggggcagtggggccaggggaggagcctggagggctgtgggggctgtggggttggggggctgtgggaggctatggggcttcctggggtgcctgtgggggctgtagggctgggaggctggggggctggggctctggctgggcggcgcagggctccgggccaccggcctgtcccaccaggtttggagatggctacatgatcacggtgcggaccaagagcagccagagtgtgaaggacgtggtgcggttcttcaaccgcaacttcccggaagccatgctcaaggtgcgccgtcccgggcagggttgtggagggggcgctacggggtgggggggcgctgccaggcctctgacctccccccctgcaggagcggcaccacacaaaggtgcagtaccagctcaagtcggagcacatctcgctggcccaggtgttcagcaagatggagcaggtgtctggcgtgctgggcatcgaggactactcggtcagccagaccacactggacaatgtgagcgccccaagggcactgcgcaccacacctgcccctcccctcacccgccctgcccctcctcaccccagaccagccccctccccacacgcctgcgccacccaccaggtgttcgtgaactttgccaagaagcagagtgacaacctggagcagcaggagacggagccgccatccgcactgcagtcccctctcggctgctt

SEQ ID NO: 18045 - DNA, 1864 bp, Artificial sequence
  DNA replication origin
aggctgtgcccctcaccccggccacccctgtgcccctgaccccggccaccccgcaggacctgaaggttgtcaacagttacctgaaaagctgcttcctcattttccccaactacaacctgggccacgggctcatggagatggcctacaacgagtacatcaacgagtactacgccaagattggtgagggggcccgtggggcggggaaggcggtgggggccccgcaaggcccagagcacaggccctgagctgtctccccgcaggccagtttgacaagatgaagtccccgttcgagtgggacattgtcacccgcggactggtggccatggcggttgagggcgtcgtgggcttcctcctgaccatcatgtgccagtacaacttcctgcggcggccacagtgagtggggggcggggtggggcgggggcggggcgggagcagggatgggttcgggggtggggcagggtaggggcgggggtgggggcagggatggggcaggagggggtgaggcaggggacagcagaggggcctgcccacccttcttacatgccacagccagaggatgcgaggctggtggcagggaggggcagtgggggtggcgagctgctggacactgtccaccctgtcccccaaggcgcatgcctgtgtctaccaagcctgtggaggatgatgtggacgtggccagtgagcggcagcgagtgctccggggagacgccgacaatgacatggtcaagattgagaacctgaccaaggtgggctctgggcatgtagggtggggcctgggtggggtaggccagggccaggggggtggggccccagcagtggaggtggagcctgggtgggcagggccctgagctctgggggtggggcctgcatggggtggggctgtggggcacgtggccccctgggctctggaggtggggcagggtctgggtggggtggggccagaggggcagggtgggggcaggatgccccgctgagtgggcaggctcctggccaggtctacaagtcccggaagattggccgtatcctggccgttgaccgcctgtgcctgggtgtgcgtcctggcgagtgcttcgggctcctgggcgtcaacggtgcgggcaagaccagcaccttcaagatgctgaccggcgacgagagcacgacggggggcgaggccttcgtcaatggacacaggtggggcgggagccctgggtgggcggggccgccgcgtcctcacgcgctgacagctgccgtgtccccagcgtgctgaaggagctgctccaggtgcagcagagcctcggctactgcccgcagtgtgacgcgctgttcgacgagctcacggcccgggagcacctgcagctgtacacgcggctgcgtgggatctcctggaaggacgaggcccgggtgaggatctgtggggcggggcagggagtcagcacgctgggtggccctgcctccactgacacctgcgttccctggccaggtggtgaagtgggctctggagaagctggagctgaccaagtacgcagacaagccggctggcacctacagcggcggcaacaagcggaagctctccacggccatcgccctcattgggtacccagccttcatcttcctggtaagtcctgggtgggtggggggtggctgcctggcctttgacttcctggtgagcacgggcaggggcagcgttcaggctggggtgtgtgggcctggcagcagctgagcctgccacccatccccaggacgagcccaccacaggcatggaccccaaggcccggcgcttcctctggaacctcatccttgacctcatcaagacagggcgttcagtggtgctgacatcacacaggtgagggcgcccccaccccctctttgtgcccccacccca

SEQ ID NO: 18046 - DNA, 2327 bp, Artificial sequence
  DNA replication origin
tcagggccctgcccacccaggctccacctccactgctggggccccacccccctggccctggcctaccccacccaggccccaccctacatgcccagagcccaccttggtcaggttctcaatcttgaccatgtcattgtcggcgtctccccggagcactcgctgccgctcactggccacgtccacatcatcctccacaggcttggtagacacaggcatgcgccttgggggacagggtggacagtgtccagcagctcgccacccccactgcccctccctgccaccagcctcgcatcctctggctgtggcatgtaagaagggtgggcaggcccctctgctgtcccctgcctcaccccctcctgccccatccctgcccccacccccgcccctaccctgccccacccccgaacccatccctgctcccgccccgcccccgccccaccccgccccccactcactgtggccgccgcaggaagttgtactggcacatgatggtcaggaggaagcccacgacgccctcaaccgccatggccaccagtccgcgggtgacaatgtcccactcgaacggggacttcatcttgtcaaactggcctgcggggagacagctcagggcctgtgctctgggccttgcggggcccccaccgccttccccgccccacgggccccctcaccaatcttggcgtagtactcgttgatgtactcgttgtaggccatctccatgagcccgtggcccaggttgtagttggggaaaatgaggaagcagcttttcaggtaactgttgacaaccttcaggtcctgcggggtggccggggtcaggggcacaggggtggccggggtgaggggcacagcctccgcagggtccgccacccccaccatgtcgtcaccgccccaccttgtcgtgctcgaagagctgtagcaggaaggtggccacggtggcggtgatgccgatgaagagattgatgacaatgaggaacacgtaggcggagctggggacctcgaaccagaaggaggccgggtacatgatgggcgtgatggaccacctgcgggcaggtggcgggcagtggtcaccaggcagccccggtcccacctgaggccgctcccccctccgcttccgcttacccatagagcaggaagagggagaggacggcagggaagttggtgggcgacgtgtaggccggcaggtcgaacacaaacaggatgatgacacagcaggtagcggggaccaggtagttgagctgcaggggtgggggcggctggtgagagacccggggcagggcggggatgggggatgagaagggccggggcaccccatggccacgccgggcgcaccatgtcccacacgtagttcgccagccagtagatgatggggttgcagccgctgacaaactgcaggtgcttggccttggtggacttctcggccacgaggaagacaacgaagctggccggcacgaaggacatggccacgatgatgaagatggcgatgacgacatccgtgccctgcagcctggggcaaggaagccctcagtcctcacggccggggctgcagtgcccacctgccccacctcatcccccactggccacacttacaggtaatccagggagaggctggcgctggtcttattcatggggtggttggtgacggtgatgcctgcacacggcggggcgggggcggcagcttcaggccccagctcctccccgccccggccccagctcctccccgccccgccccgccctgcctatgtcagctcaccgtaagccgccgggttgcccttgctcttgggcaggttggcacgcaggatggcgttgttgaggctgttgaggtaggtgggcatgctgtgatagcccttgttgttgtagaaaacctgcagaaggaagaggacacagaaaggccccaggacctcagacctgggtccctgcagacctcgggcggcgctacacacagcggggcccaggcccgcagcctcgctcacctgggcagccctgcgcaccgcgatcttccgcaccatgggtggggccctggtgccaaatgaggctgggatggacttcaggacgtttccaaaggtgatggccccatacctgggcaggcaggtgggaggggcggtgaggctaggcaggcagtgaggctagaggggcaggagttgagactaggtggctggtggccggccaccctcacccacagcctccccacccagctcaccggtgcagtcggaagcggtcggaggtgaagagcaggtactcagagacattgtggccggtgatgtcggtcaggatgtcgcctgtgaccacccgcatctggggcgggtgcccgcccacactgctggggcaggaga

SEQ ID NO: 18047 - DNA, 1603 bp, Artificial sequence
  DNA replication origin
tgtggcctcctgcctgctggtctcagacacaagcacggagctctcctacatcctgcccagcgaggccgccaagaagggggctttcgagcgcctcttccaggtgtgagggcgcacgggtcggggggcagttgcaggtggtggaggtgggcgcactcctgcctgggcgtccctgccgcagcctccccctccaccgcccctgcagcacctggagcgcagcctggatgcactgcacctcagcagcttcgggctgatggacacgaccctggaggaagtgttcctcaaggtgtcggaggaggatcagtcgctggagaacagtgaggccggtgaggggcctggaccacttgctcagcccaccccacccacaaggccccagctcgggcctgcgctgtcactcctgcctggtgtctgggggcgccaccctggtcctgggtggaagccaggggacgccccggggttagcctgcggtcctaggtgggtggtcctggtggccagaggtcccggacaggtgtatgagcctgggaactggggtcaagaccggggatgggggtcctgggcaggcctaggggccagtagccctgagtgtcccctcggcccttccactgcggcagatgtgaaggagtccaggaaggatgtgctccctggggcggagggcccggcgtctggggagggtcacgctggcaatctggcccggtgctcggagctgacccagtcgcaggcatcgctgcagtcggcgtcatctgtgggctctgcccgtggcgacgagggagctggctacaccgacgtctatggcgactaccgccccctctttgataacccacaggacccagacaatgtcagcctgcaaggtgggggtggcagggtgaggctgggacagcaagggagggggagcagggttgcgggggagcggcatgagggcagccagtagggagagggtagcgtgcaaccacctgctcagcctctacctctctgcacagaggtggaggcagaggccctgtcgagggtcggccagggcagccgcaagctggacggcgggtggctgaaggtgcgccagttccacgggctgctggtcaaacgcttccactgcgcccgccgcaactccaaggcactcttctcccagatcttgctgccagccttcttcgtctgcgtggccatgaccgtggccctgtccgtcccggagattggtaggccaccggctggacaggggtgctgggcttgcctccccccaccgcccgctgggagccctgatgatgcccactcctgagcttcctgactctgggcctcaccccacacctgaggctgggcacgcaccggggttcatccgggagtcctgtctcctcgggtcccagaccccaggcgtggatcccttggggttgggggaaggggaccgaggcttgggggccgctggccagagggcagaacctgctcaggcctccctgctcgccctgccaggtgatctgcccccgctggtcctgtcaccttcccagtaccacaactacacccagccccgtggcaatttcatcccctacgccaacgaggagcgccgcgagtaccggtgaggcctccagcgggggcagccttggtgggtggggcgagtgaaggggcg

SEQ ID NO: 18048 - DNA, 2543 bp, Artificial sequence
  DNA replication origin
gggcaggcgggcggctggggtgccgggccaccccacgtgctgacaccactgccttctcagtccctcatgtccacgacggcctttggtctgggctctaagtacttcgcgctgtatgaggtggccggcgtgggcatccagtggcacaccttcagccagtccccggtggagggggacgacttcaacttgctcctggctgtcaccatgctgatggtggacgccgtggtctatggcatcctcacgtggtacattgaggctgtgcacccaggtactggccagcccttggagggcaggggagaggcaggggtccccagccagggttggggaccagcagtctgtgtccactcctggatgcagcacgggtggctccctgggtgggcacgtggcccacgtggtggatggtcaccccaggccctaggtcagcctcccctcccctccccgacccccaggcatgtacgggctgccccggccctggtacttcccactgcagaagtcctactggctgggcagtgggcggacagaagcctgggagtggagctggccgtgggcacgcaccccccgcctcagtgtcatggaggaggaccaggcctgtgccatggagagccggcgctttggtgaggctggcatcagaatggtggctggggtgggcgctgggttcagagtcctgggtggccttggcgccgcccccaccctgctgatccacagccctggtgcagaggagacccgtggcatggaggaggagcccacccacctgcctctggttgtctgcgtggacaaactcaccaaggtctacaaggacgacaagaagctggccctgaacaagctgagcctgaacctctacgagaaccaggtggtctccttcttgggccacaacggggcgggcaagaccaccaccatgtgagtgtcggaggggcagggcggtgggcatctgctgaccagagcaggagtcctagtcagggcagggtggggcccctgcagagggcgtggggtcatgaccccgcccacctacccaggtccatcctgaccggcctgttccctccaacgtcgggttccgccaccatctacgggcacgacatccgcacggagatggatgagatccgcaagaacctgggcatgtgcccgcagcacaatgtgctctttgaccggctcacggtggaggaacacctctggttctactcacggctcaagagcatggctcaggaggagatccgcagagagatggacaagtgggtgggctgggcggggggcggggcaggtgggcggaggccctggggctctgcatagcagcagccccatgccccacctccctgtcccaggatgatcgaggacctggagctctccaacaaacggcactcactggtgcagacattgtcgggtggcatgaagcgcaagctgtccgtggccatcgccttcgtgggcggctctcgcgccatcatcctggacgagcccacggcgggcgtggacccctacgcgcgccgcgccatctgggacctcatcctgaagtacaagccaggtgagtggggtgccgtgtgggcaggggtgcgggcggcgcctcccctgccccctgaccctgggtctggccttgtcctaggccgcaccatccttctgtccacccaccacatggatgaggctgacctgcttggggaccgcattgccatcatctcccatgggaagctcaagtgctgcggctccccgctcttcctcaagggcacctatggcgacgggtaccgcctcacgctggtcaagcggcccgccgagccggggggcccccaaggtctgtgttgaagctgcctgagctggcttcgggccaccttctccccgggacccccacctgagaatccacaatggagaggctgggccctcaccgtcacccgctgggcccaggatgcctgctggggcctggcccgccctctgcaacgcccgtatcttggagaggctgggtcctcagcgtcaccccctgggcccaggatacctgctggggcctggttcttcctctccaatgcccatatcttgacccagttgggttcccattgggggtccctcctcccagcccctgagtgaattccttcctgctcccacgtcccccacagagccagggctggcatccagccccccaggtcgggccccgctgagcagctgctccgagctccaggtgtcccagttcatccgcaagcatgtggcctcctgcctgctggtctcagacacaagcacggagctctcctacatcctgcccagcgaggccgccaagaagggggctttcgagcgcctcttccaggtgtgagggcgcacgggtcggggggcagttgcaggtggtggaggtgggcgcactcctgcctgggcgtccctgccgcagcctccccctccaccgcccctgcagcacctggagcgcagcctggatgcactgcacctcagcagcttcgggctgatggacacgaccctggaggaagtgttcctcaaggtgtcggaggaggatcagtcgctggagaacagtgaggccggtgaggggcctggaccacttgctcagcccaccccacccacaaggcccc

SEQ ID NO: 18049 - DNA, 1072 bp, Artificial sequence
  DNA replication origin
gtacagcacagacaccaggaagctgggtgggcaggggccacgcgcaccgtcatccacccgcacgcccggcctcctgggcaggcccgtgccagggtccagggggctctgagaggatgtggggtgagcttgctgggcaagtgcctgccccaggtccctcctaccatggcccgcgctcaccagaacatgatggtggccaccgcgtagactgccaggaagagccagatgatgaccacgtggctgtgcataagcacctggccgtacttcaggatggcggtgagtgctgtcacggagatggacagctgcacaaagccggtgatgaaccaggccacccagtgcaccgcgttgttcaggcccatggtcttcatcacctgcgggtgggccaggggcttggggcaggccccggggaggacgccgcccctccctgccagcccgcgcctccagggagagtcccggcccgcgcacctccttgagccggtgctccttctccgccacgatgtgctggatggtcatggccacggagtagacccaggagatcaccatgcacagcggcatcatgtgctcaatgacaaacaggaagctgcggggaggccgcgctcaggcgccactcagccccagccccagccccagccccgggcgcccagcactcactcatcgcgtgtgtagcaggggtaggggaacatctgcacgtagctgcctggctccaccacatcgtgccccacaaaagtgtcgatgatggcgcgctccatcatgtctgtgggtgggggcagccatcaggtgccgggcaggccctctcgtcctcacacctgtcctcccccatgaatcctccagccggtcttccgggcctgctcctcaccctggatccagacgaagccgtagaggaagtagaagcggccgccagtattgggcccaggccgccagtaggcgcggcggatctcgttggttttctcggtgaagctggagttctggcggatcttgtagtgcacgtgaggcgggagcgagccgtccttccgggtctggaagatcacacctggggccgggaggttggggcggggccaagatgcaggggcgggac

SEQ ID NO: 18050 - DNA, 958 bp, Artificial sequence
  DNA replication origin
gaagccgtagaggaagtagaagcggccgccagtattgggcccaggccgccagtaggcgcggcggatctcgttggttttctcggtgaagctggagttctggcggatcttgtagtgcacgtgaggcgggagcgagccgtccttccgggtctggaagatcacacctggggccgggaggttggggcggggccaagatgcaggggcgggaccaaggcgtggtgggggggaaagcaaggcacgggggcggggccaaggtgtgggggcggggacaggagggtccagggaaaggtgggacagggctggggtgggggccccaggggaaaggtgggcagaagtggggaggtgcagggagggggcgggttgtgggttggggccgtttggaaggggcaggggtggggaggggaagtggcgggtgaggggggaaggccagggcgcggccaaggagtgggagggcacagggggacgggtggggctgggctggggaggaagaggtctgtggggggctggggcggggcggggagggcagctcactggcaaaaacagtgacgttgtcctggtaggcctggttgagggtgtagttgacaatgctctcctcgtcggggaagcccttgaagatgtccacgctcacctagcgggaggggcatcgctggagcccgccgtgggcatgtgcgaggcagggggtgtcgtgggttggctcggaggccccaccgctcaccttggacatgaactggatccagccgcaggccgcgttgtcaatggtatccagctgctgcaggagggccatgccactgggcagcgagaagttgtcctgtctcagggccggcggcagctcatccagtgacaggttcagtgcctcggggtgcagccgcagctctgctacatacttggggtggaggggcggctcagagggggacctgcgcctgccgagccgggcagagaggggctccccacaccacccaca

SEQ ID NO: 18051 - DNA, 1706 bp, Artificial sequence
  DNA replication origin
cctgggctcccgttacccaggctgcagactccctcccagcacccctagcttgtgtctccctgctgctgtctccctgctccactcctgacctatcacccacctgcagtccatctcaccccgcactgcccacgtgcctgtttcccctcagctgggcctggatgcccccaacggctcggactcctcgccacaggcgccacccccacggaggctgcaggcgcttctgggggacctgctggatgcccagaaggttctgcaggatgtggatgtcctgtcggccctggccctgctactgccccagggtgcctgcactggccggacccccggacccccagccagtggtgcgggtggggcggccaatggcactggggcaggggcagtcatgggccccaacgccaccgctgaggagggcgcaccctctgctgcagcactggccaccccggacacgctgcagggccagtgctcagccttcgtacagctctgggccggcctgcagcccatcttgtgtggcaacaaccggtaggtgggcggcaggggaatgggggtgaggaggacagccaggggcagggcgtgagccctgaatctaggctctggctctggaggtctcatttggcgccctgccctgtgccccgaagtcctgccccatcccgatgcccctcccactctcgcggccctgccccctaacggcctggcccggccccctgtcccctaccccagcaccattgaacccgaggcgctgcggcggggcaacatgagctccctgggcttcacgagcaaggagcagcggaacctgggcctcctcgtgcacctcatgaccagcaaccccaaaatcctgtacgcgcctgcgggctctgaggtcgaccgcgtcatcctcaaggtgcacgggtctgggacgctccatgtttgacaggcagagtgggagggggtctctgcaggcctgggacccctgggcagagggtgtcggcagaattgacacgggaggggtacggggtgcagcttcggatgggacacaggctctgcaggtgggggaccagggggtcgcttttcctttcgggagctccaggggctgctgtgggaaggcactggagagtctgctctggcagggtcctccggctgggggtggccggtccagggcagtgctggtggaggaggggtgtgtccagagaccttccagagtgtctcgtgggcgggcagctgggcagtttgggttctgggtgaggggtcctgtctggaacaagcagaggccagggctggacattggcctgggaggggagggcctgtggacgaggccaatcctgggtgtagagggggtccctaggatgagggtgggacagatgagggtggagcattgggtgcttaagggacacatggagacaggtccagcaaaggagctggtgggcacagctgggcagttgggggtccggaggccgtgctgccctgggagtggagggcaaagcaggtttcacctgagcgccgcagaaaggagtggagagcccgggcgtgggactcacgcttgaaatcccagcactttgggaagccatggtgggaggatcgcttgagctcaggagtttgagacaagcccgagcaacatagcggaagcccgtctctaccaaaaatacaaaattagccaggcgtggtggtgggcacctgtaatcccagctacttggagggctgaggcgggaggatcccttgagcctgggaggtggagg

SEQ ID NO: 18052 - DNA, 833 bp, Artificial sequence
  DNA replication origin
caggccgttagggggcagggccgcgagagtgggaggggcatcgggatggggcaggacttcggggcacagggcagggcgccaaatgagacctccagagccagagcctagattcagggctcacgccctgcccctggctgtcctcctcacccccattcccctgccgcccacctaccggttgttgccacacaagatgggctgcaggccggcccagagctgtacgaaggctgagcactggccctgcagcgtgtccggggtggccagtgctgcagcagagggtgcgccctcctcagcggtggcgttggggcccatgactgcccctgccccagtgccattggccgccccacccgcaccactggctgggggtccgggggtccggccagtgcaggcaccctggggcagtagcagggccagggccgacaggacatccacatcctgcagaaccttctgggcatccagcaggtcccccagaagcgcctgcagcctccgtgggggtggcgcctgtggcgaggagtccgagccgttgggggcatccaggcccagctgaggggaaacaggcacgtgggcagtgcggggtgagatggactgcaggtgggtgataggtcaggagtggagcagggagacagcagcagggagacacaagctaggggtgctgggagggagtctgcagcctgggtaacgggagcccaggacaggagctgggatggtgagcaggagtggggcaccagccatggtgccattggatacccacccacaggcagcatcccacgcacagcctgggcccaggagccctgagctctccaagcggtcccagcccctccttcaactcaggcagc

SEQ ID NO: 18053 - DNA, 1350 bp, Artificial sequence
  DNA replication origin
tgggtgataggtcaggagtggagcagggagacagcagcagggagacacaagctaggggtgctgggagggagtctgcagcctgggtaacgggagcccaggacaggagctgggatggtgagcaggagtggggcaccagccatggtgccattggatacccacccacaggcagcatcccacgcacagcctgggcccaggagccctgagctctccaagcggtcccagcccctccttcaactcaggcagcaagcagcgcagcgggcagtgggcaggcagggcctcacctgctgggagaccttggccacgtccagctggttccggagctcagcagacagcccagagaagcgcctggcacgcgcagcagcctgcccactgcagacagcatcccggtagccctgcagggctcccttctgactctcaggcacagtgaggatccggcccagctcccccgagcccggcgtgcaggtgagctgctccaggagggcaggagccagcagcagctcctgggatgggcacaggggtccgtggagccacggcaaggactttgtccccaaccactagggcctcaggcctcaccctgccccacccactggctggctctggggctgcctgggtcccacgacatgcctctacccctcatgcctgccatagacccctgggaccctccccctctcccaggaggagctccaagtcaccaaaggggccctttcctcacccacggagcagaagcacccccagaggcaggcagcactccaggcccatcccacacatggatgccctcacctccatccggaacaggggattgccccctaggcggctccagggctcctgacccttgtggaggccagactgtgaatccagggcagatgagggaccaaagagcaggtggtagacctaggaggtgtgggggaatggctcagatggggtgtggggggcgtggctcagatggtgggggcgtggctccgatggacgtgtgggggcgtggcttagatggtgggggcgtggctcagagagtgggggcgtggctcagatggtgggggcgtggctccgatgtaggtgtgggggcgtggctcagatggtgggggcatggctcagagagtgggggcgtggctcagatggtgggggcaaggttcagacggtctgggcgtgactcaggctgagcatcctgaggatggctcagcaaccagggggcgtggctggggcagaagggagtggccagggctgggagctgtccctgccttacctcgggcgggtccacacgggcggccaagagtgcttgggccgtgctattgggcagcgacaagttttgcgtcaggaaacgccagagctcctgcgggtttctggccaccgagt

SEQ ID NO: 18054 - DNA, 1008 bp, Artificial sequence
  DNA replication origin
aggaagacactggacaggcaggaaggcgaggctgagaggccgctgcaccttggcaaggtgcccccacatgcgctcggagccgagcccaacaccacagctctgccactgcagcctgtgcgtggctgggaactcagtgcaggtggaggggcccagagtggatgtgggcttcagcccagtgacagcagagctttgcccgcagccctgccccccaacttccctgcacagggcacacctgtggatctgtccaggtggctccccgaggtgcccgggcccgcactgagggcctccagatgctggcgtagggcctcgagctctgagcccaggctgggccgcgctgggtcaaacaggttgccttcctccaccacgcggtccaggcgctcaagcagctgcgtgaccctgcaccatggcggatgtcactcactggatgggctggggaggggtgggtgctccgaggggcgggtgggcactcacgtggagttggcgtactgcaggaagccgaactcgtctcgctggccgtccgggcacagcgattgcatgacaggcaggatgccggcagacgtcaggggcgccgctgtgtagaaggctggcagacccacgggagagggcagggtcgggggtgaaaggggagagagagagagaggaatccagaaggggagggagacagaggccgagaggagaaatttagagaaagtcaggaaggagaagcagcgttagggagaaggcggcacagagccctggccccagctgggctacaggccaagcgttctggggcgaatgactccagcaggtcagaggtcaaagagccactcaccaccccttctgccataactcccagagcattcctttcctttcagccagtgcaggcccacatgccctggcactctccccccgaaaacgtttcaggtgtggcactgcctacagagcccaggggaggacaaaggaccccctctgggcagtgacctctgacctctggccagctggttagcagagtgagtgcaagagcctgaa

SEQ ID NO: 18055 - DNA, 2307 bp, Artificial sequence
  DNA replication origin
gcgcggatcgggtcccggacgcccgagcgccccgcccccgcgcgggcgatgcccagcggcgcggcgggctgcggggcccggcggggcgcgcagaggagcgggccgcggcgctgaggcggcggagcgtggccccgccatgggcttcctgcaccagctgcagctgctgctctggaagaacgtgacgctcaaacgccggagcccggtgagcccaccccacgcgcccgccctcagcccgaggccgcgcgcaccgcggccagaggcgcgctccccgcgcgcacgtgcggacggccgggcgcgcgcagaccccggcgggcgctgggggcggcgcgggcccgagccccctccccgccgggccctgccctcgcctgccggcgctgcggcctccggggaggtggctcggtcgtgtccagtccggtcccgcgtccgctgacatcgcggtgctcggctgagtcacggcacccgcgccctctgcagcgcgctcgctggggccgctgtgggcggggggcaagcggcgctcaggactctggctcgagggaggccctggttcccaggacagaaggcaggcctggggggctccattcagctgcgaggctccatggtccttgggcccagcctccctggggtcccggaggagaccctgtcccttccctccgtccacccctcccctgcccttgggccgcggcctgccatagaggttggtcccaggcatctctccgcctcccctcctggcacatccgtgacccttgctcatgctctcgccactgggaatgtccttgtgccagccttggccagcctgaatctctgcacccatttgtcctttggggtcagttctccccgagcctgatccactctgttgcctcctggtccccccacctgctctgggggctgggtctactgtttggagctgtgaaccccggctttcccagcactgcctgggcagccagtggacctgagggtgcaggacacatggctgtcagggacagaagtccttcgtggagcgaggggcttggggatatgggtgtcctgccatacccccagctggccagcttggctccagcctgggaagggaagggacacctcccaggccacaggcctggaccagcttaggtttctgaaggcccttgggattgtccaggccagggctcagagcaggtgggggcctaaggcagacatcctcttgcccagccagggcccgggcgggaccccttgggctgcaccagtccgtgcctgtttatctttcaacatgcactgcaggaaacccaggctgcagtcagctggggtggccatcatcaccatggctggcagaattcccctgggcacctggccttggcggggagcctgggttaggtacatgccctggccaggcacctggagctggctgagtggggtcccatggatcaggcctgcagcccctggcattgagtcactggggacagcagagcagggccaagggaacagggatgtggcatgtggcatgcattagtattagtccccgggggtggttgtcaggaaggtccccactgggcttgggagcagaggctggaatggtggcccctgttccagtggggacaatgctcagggaagggagtgtggcctatgagggcagctggcaagcaggtgggaggtgtgcactgtcctgaccgcaagagtgactcccagctgctggtttgggctgccccccaggacctttttgggtccccaccctacagggctcccagaggcccactgggccacagtggaggtccttagcccatggctggagcaggtggggaactgtttcccccagggaggctgagtccttgccaggcttgtgatgtggggctggggctggctggacactgggcacactcctgctgggtccccactttcctgggaaggatcttggacatcagagctggactcttggggccaagcttggatgacagaggtttgccctgtgtgccatgcgccctgctggggcaggggtgcaccctgggcagagctccaccctgggcagagctcagggtctggagggtgggtgccaaggacctctgtgctgctagcaggctcctccaagctctttgcctcagtttccctgtctgtgagtgtggcctatctcctcttagttagctggacttgggtctacccttgggctacaggctgctcttggtgcagggacagggtcactgtcatgaagtcactgggatggcagatggcagcgccaccctcgggtctcacctgttctccccccgacacagtaggcgggagctacagggaggggtcatgcccagagaaggcatctaggcctccaggcgatgtgaaggcact

SEQ ID NO: 18056 - DNA, 2881 bp, Artificial sequence
  DNA replication origin
gtcagcccctcggggtaccccggcaccccagcccacgatcaccatccttgtctggcactggcccttcactgaccagcccccagagctgcccagcgacacctgcacccgctacggcatcgcccgctgccacctgagtgccaaccgaagcctgctggccagcgccgacgccgtggtcttccaccaccgcgagctgcagacccggcggtcccacctgcccctggcccagcggccgcgagggcagccctgggtgtgggcctccatggagtctcctagccacacccacggcctcagccacctccgaggcatcttcaactgggtgctgagctaccggcgcgactcggacatctttgtgccctatggccgcctggagccccactgggggccctcgccaccgctgccagccaagagcagggtggccgcctgggtggtcagcaacttccaggagcggcagctgcgtgccaggctgtaccggcagctggcgcctcatctgcgggtggatgtctttggccgtgccaatggacggccactgtgcgccagctgcctggtgcccaccgtggcccagtaccgcttctacctgtcctttgagaactctcagcaccgcgactacattacggagaaattctggcgcaacgcactggtggctggcactgtgccagtggtgctggggcccccacgggccacctatgaggccttcgtgccggctgacgccttcgtgcatgtggatgactttggctcagcccgagagctggcggctttcctcactggcatgaatgagagccgataccaacgcttctttgcctggcgtgacaggctccgcgtgcgactgttcaccgactggcgggaacgtttctgtgccatctgtgaccgctacccacacctaccccgcagccaagtctatgaggaccttgagggttggtttcaggcctgagatccgctggccgggggaggtgggtgtgggtggaagggctgggtgtcgaaatcaaaccaccaggcatccggcccttaccggcaagcagcgggctaacgggaggctgggcacagaggtcaggaagcaggggtggggggtgcaggtgggcactggagcatgcagaggaggtgagagtgggagggaggtaacgggtgcctgctgcggcagacgggaggggaaaggctgccgaggaccctccccaccctgaacaaatcttgggtgggtgaaggcctggctggaagagggtgaaaggcagggcccttggggctggggggcaccccagcctgaagtttgtgggggccaaacctgggaccccgagcttcctcggtagcagaggccctgtggtccccgagacacaggcacgggtccctgccacgtccatagttctgaggtccctgtgtgtaggctggggcggggcccaggagaccacggggagcaaaccagcttgttctgggctcagggagggagggcggtggacaataaacatctgagcagtgcctcgtgggtctggccagtgtctcatgggtcacctccgtgcagggccacagagcctgcatctgccctcccctgacatgtcgcccccacggccatggggctgcttgttccccacggggggtcctgtcgcctgacttctgggcctttgctcaccctccgcctgagagccctccctgtgccgggctgcccactggctaccccagttcctacagcctccgccagacggccccttatcagagagccttctgtgtcccccaaaaggccaaggcgatgagcccaggagttcgagaccagcctgggcagtgtagtgaaatctcatctctaccaaaaatacaagaattagcagggcgtggtggctcacgcttgtggtctcagctacttgggatactgaggtgagaggatggcttgagcccaggaggttgaagcttcagtgagccgtgatcacaccacagcactccagcctgggcaacagaatgagaccctgtctcaaaacaaaaaccaaaacaggccaaggttggggaagagtagggaacggacgtcagaggcctggccaggctgaaatcgcccatctcccaggcccgcaggctggagggtgtctggggtgacagggtctgacctgtgccttgtagctccctctggtggccagtgctggggaggcactggggatgcggctgcagccagggagcccctgtagtggacggtggagagtggggcgaggaggagagaggccaacccacgggtggtgctgaccagggccccaacaggctaagcccccggggctggggcacagggcttgtccctaccccaggtaggggtgggcaggttgagggcaggaagcccccctcacccatggctgtggcttgtgggaaagacctgctggtagcttcctgccctgacccagccctgtggactgagcagagaaaagcaagtgccttgaggctgcgggctggggtgggaagctgatccctcactcactagcccagggtcaccttcctgctgcaaaggagctgggaggagtggggagctgtggcctcggaggtcttcattcacttgaggatgcgccttctatgtgcgccctgacactggacaccacacagcgctactccaccccattcacaggggggaaactgagtctgggaagcgccgtcagagccacccatggggtcagcctgtcctctgtcgctctctacaggccacgcggaggaactgccccacctcccggggcgccccagcaggtgccaagccacagccgcagaaccgcctgatcccgaactccctgtgcagagaccagactcgcccgaatatggggagaaaaacgagccgcgtgcagcaggggccgcctcggtcccctgcctgctccgctcacggcgagcgttcctggggcctcgagtttccccccttccgctggctgctcggaat

SEQ ID NO: 18057 - DNA, 1615 bp, Artificial sequence
  DNA replication origin
actgtggctgagagtggggtgttggttggctggggctcagggtgaccccgcagggccatcccagcctggctggcacccaacgtgggctggtgtagaagaaggaacctggcctccaggctccaggccctggcttagagggagcggggagtctggacttcaggctggatcccttcctcttcctggagcgggtgctggcccccaacccgcttgcgtcagggacaaaaggactccttccctttccagcctggaaagcccctctgctgcaggctggaggaagggaccctgggcccagcctatagtcagcggtgtctatgggcatggatctggacggggaaaaggacaaagcagcctccatccacagttcattccgggaccaggcccttgcaggcacgcgctgggctcctgtgggaagacactaagggccccaggacagacctcctctccgggcatctgggttcctagatggcagaggtggcagagtggggtgggatggcccaattgggagctttagcttccggcaaagagctgagcacagtacatcttcaatgtgtaagattctcctgggagaccagggcccagctggtggtgagctgggggaagtgggtgatactgccgtgggaggagccacctggccctctggggaagtgcactcgctgtctgcagcgcccaggcctgggtagctgggtgggggctggggggccatctgtgctcagggtgcctgcacctgggccttctctgccctgggccaagcctgcccgagcctctctgtcctctgcctgcccagctggacatctctgggcctctctggagaccagtggggtgggctgtgggggcgtcatattgccctggcttggcatccctcttgtggctgtacccctcccagcagccccaggactagcaagtccccgagatgggggtggggacagtggttgatgccaaaggttgtgggggcaggggcggggcaggagcaggaaggtcccctgagttccctcaccttgggcagagataaaaggagcacagttccaggcggggctgagctagggcgtagctgtgatttcaggggcacctctggcggctgccgtgatttgagaatctcgggtctcttggctgactgatcctgggagactgtggatgaataatgctggtgagtgtctggccctcggggaggcccaagctggggacagctaggcaacctgggaggggaggacgggggtggcgctgagtggggcatgtcggtgtccctgagcccatgggaggggaggacgggggtggcgctgagtggggcatgtgggtgtccctgagcccatgggaggggaggacggggttggcgctgagtggggcgtgtggatgtccctgagcccaagtgacagagcctcccctccctcgtgctgctgcagggcacggccccacccggaggctgcgaggcttgggggtcctggccggggtggctctgctcgctgccctctggctcctgtggctgctggggtcagcccctcggggtaccccggcaccccagcccacgatcaccatccttgtctggcactggcccttcactgaccagcccccagagctgcccagcgacacctgcacccgctacggcatcgcccgctgccac

SEQ ID NO: 18058 - DNA, 1879 bp, Artificial sequence
  DNA replication origin
gctccacgggatgggaaggtcctcctaatgagcgaacagaaaggcctcctccctctgggggtgcaagagcagaccccaggccccccactcaggggtccgtctaccagggccccaaatgggagatgaggcggtggaagattaacccaagctggcaacacaggcagaagccgcaggtctgaaatggactttaattggcttttgtctctagaattacccacccgttcctgcgctctacggttctccatgccccctccagtttgggggtctaaaccgaacaggagaggtgcaggggaccaggaggtgtcctggcacaaaggttcgggggtctccctggcaaggggtcccagggcctggagcccgaggcccagccaaaagcacacagcatcaaaacatgtttttagtgggaagctccaggccctgcccctccccgggggcctcgaggtcggggagcaggtgggcgtctgtctgcctccaggtcatggcagtgcaggcggtgagctgggggccggcaggggcgcggacagtgcggcgtggtcgaacagagggttgcgcacctccatttccccggtctgcgaatgtgggtgtcaggctgggcagtgggtgggctggggggatacttgctgggagggaaccccaggagatggttcgcccctccctgcaccctgaggcactcaccggggccaggcccgggcactcgtacaccgtgaagtctccgtcctcattctcctcatccgaggaggccgtgtccagctccttgggtggctctttatgcctgggtggggggggatcgctgggtcctccccatgccctcgaggtgccagtggcccagtctggaagtgggcactcagcccacctcagccctggggtggcaggggagcacagcccagggtgaagttggccaggggaggtgagggtgcagggcggcgggggaggtgaaggttagcgtgcaggtgagggtggcagggcctggggtaaagttggccaggggaggtggaaatggaggtggaggtggggatggggggtgggtgggtgggggtggcagtgccggggcggccactcaccgctccaggcacagcatctgttgccgttggtgctggtagtggtacatctccgcgctctgtgccagccgctggtccccaggctgtgggaaggaggaggcgagggtcagttggcggccagagttgggcgggagcctcagggctgaagggggccacacaccgagatccggggagctgcaggtgagccaggggccttcgcagtggcgtagtcggccttctgagtcaggcggatctcacgctgcagcctgtggggagtggggcctgagacctctgagcgtgtggcaccctccctgccctgcccgcggccactggctcacctgcaccagcagagggaggctacggagagggcggctgcaccggccacacagaacgccaggatcagcactgcaggagggggcgtgtgagggcggccttctgcagggcgccctgctgcccctgcccacccccgaccaagacctaccaagggcgaggccgtcgccttgccctccccggggctccaggggcgacatgtgcaccgggtcggatgacacaggggagcccagggaggtgtggggcgtgggcgtgggggttcctggagtggaggggaggcccagctccagcccctgcccccgtgccgagaagcccagggtggctgcgagagaggacaggttagaatgagagcactgggctagggacagggccgtggggcaggggaagcgggggtctcaccaggctccgggagccgctgtcggtccttgggtaggggcggagttgagtgtccagactccttccgggcaagctcctgggccaggaagtcaatctcatcttccagtctgggctgg

SEQ ID NO: 18059 - DNA, 1495 bp, Artificial sequence
  DNA replication origin
cctaccaagggcgaggccgtcgccttgccctccccggggctccaggggcgacatgtgcaccgggtcggatgacacaggggagcccagggaggtgtggggcgtgggcgtgggggttcctggagtggaggggaggcccagctccagcccctgcccccgtgccgagaagcccagggtggctgcgagagaggacaggttagaatgagagcactgggctagggacagggccgtggggcaggggaagcgggggtctcaccaggctccgggagccgctgtcggtccttgggtaggggcggagttgagtgtccagactccttccgggcaagctcctgggccaggaagtcaatctcatcttccagtctgggctggggccggcccccgcctggggagggtgaggggccatcaggtggaggggtccgtccaggaggtagccccaggcccggcctccccgcttctggcaggttcctcccaggagcctgaggactgggtacacgcctggaggccctctccctcccagattgccatggtgacagcgcgggcgcttcctgtgaggggcagtgcttcccggaaagtggaggcagggcaagggaggaggcgctagggaaacgtccaaagaccgggcacggggaggaaggagtggggtctctcgccccaacccatgtccataaagggctggccagcacagccccttctgcttccccacctccaagcaccttctcgggtagaggggcagggactccccaaggagtggggggaagccgaaggaagccaagcacccgggacccctccccaggtcattgggagaacgggggcagctgtcaggggtggggctggtggcagggctccaccggtacccactgtgggctgcacagtctgggtggacgctcccaggttggcaggaggtgcatccacacagacccttacagccacttctcggtgctcctctcaacacctcctccaggaagccgctgctgctcccacccccagcacctctgagcaaagccctcaccacacctgaagtcactcagtgactggccatcccgacagatgcggctcaggctggcgagcggggcatccccagcacccagccagtgctggcacccttcaacatttgccaacaggcggacaggacagtgagtggtggaaaagagcaagctgcctggggacggggaagtgggggcctggagggcttctgggcagaccctgcagagcccaggcccggggagaatgggcccttcctctcccgtggccatcccagcatttcacatcgtgcagcccttctcctgggagggcctgactgccccaggcctgggcccacctccatttggaaaggatgggaggcttcgtggagagtgaatgaggatctcccaggccttggacccaacaccccacaaggtccaggggccccaagaccacctggcacaggcctgggcattgaggctgcaggctgctgcttttttttttttgaggcggagtctcgctctgccgcccaggctgg

SEQ ID NO: 18060 - DNA, 2739 bp, Artificial sequence
  DNA replication origin
cgccggccacccgggtgagcgagcgcgctgggcgcaggccgcggggcgccccggggccgggatcgccgggcggggaccgggttgccgggcgccgccgccctcgtcctgcccaggcccgcaggccctgcaggcctggtccgctggtggcgggggccccgcctcgcccacgatggaataaacaggcctggccggagggcgcagcgcggagcctccaaaaggccgcgccggatggggcttctgccggttcccagaggcgtaccttacattcatggcttcttccgccgggagcgcgtctggctcaggcctccgcgccgcggccatctggctctgggcgggcccgccgggagtctgcctgtgtgcgtctctgtgtctccgtgttcggggctcctgcgggtgtggggctggccctgagtgcccgccggcttcgctgccggtgcgcgtcccggggtcggggcctcagtgctgctctgcctgtcctcacgccttgggtggcgctgggcaccggccttgtgcgccatggtgggcgctgaagttctgggggcacttatggcgcaggctcggggtgctgttctagcttcaataggagggagactgttgcagcctcagagcctccgcctgcatcccctgccctcgagggcactggcattctgtctttgggactgagggctgcaggtggactccggaggagggtgataagcccagggtcctgggacaccctctcacctgcacagatgggtcctgagggtccagagagcagagctccctgcaggaacccaggatgcaaagctgacgtttttctggggggactgaactgggagactttgcgactgcattcgtacagtactcctggcagccctgcagaagaggtgctgtgagcccgttttacaggcaaggaatccgaggcatggagaagttaagtggattgtggcacagctgaggcgctgtcctgggcagcctggttctgtgtgtgtggcctcaaggggccagagtgaggccggcttcctcctgggctcagtgcccctggatgggaggtgggcatgaacaggagaggcttccgagaatcagagtgtgctcagccaggaaaggcggaggccacctattcaggaaacggggctgcagctgctgtgctgagcccgggtgggtggcaggtgccagtcctcagttcaccggcctctgcagcttcgtgtctgcctcaccgggagacctggcagggccctccctaggcaactcctcccattcccagtgcccagtgcttggaagggagggccctcaggcagcccagacgttggcgggtggaggggggtgtgccagccaccgtccagctgctcttgttcctgcgacctcttttcaggaggaggaagtgggggatggaggctcctgggctggggaaaagggctaggaggggcctggaacccagaccctagagccagctttgtacctcaggcccctgcctttggcgtggtggacggtggggtatcagcacaggagcggggactgcctcactccccaggtgccaagttggcgggtgggcccaggtggacctgctggcacaggtttaatgtttaacgtgcccaagtcccggcccactgatactggaggctgctgccccaggttgtggagggtgtgcggtgcctggcgttggctcctgtgcccacctgccactgcggctgctggaactgccttgaaggaaggcggacagcctgagggccctgagtgtcaggttaccaaggaaaccaaaccagccaaccaaggtctggagaaggatgatgccccgtgtggcccccgtggccctgcctgcagtgtgcagtgtggggctgggcagagaggaagagtcctggttagccagaggtgccaccgcagactccccaggcagggttgatggccctgctggggttcccctggctccactggcttgctgtgactggggacattccttagctttgaggcaactcagctatatcccagaggggaaactgaggcagagggccattgccccctcgccccgttctccagcaccaggataagactgattagccacatgtgtcagctggcaccgtggcctgggcccctcatcagcgagatgaaagtgtggttaggaactagggaactagggcctggcctgccatccccagcactgccaacctcggcctcctgaggccctcgggtgccacctggcccctgactgcagcccctggtgtggtggctttgggagtgacctgcctgggttctgtgtctgaggccagtgaggtcagcagactccatcttaggtgtcctcggtgcctgggggacaagccagaggctggaggagcagcatcccttccaggctgcacacttgtcagtgccgggttctggggagagccgcacgggaaggagaggtcgctggcggcatcgtttgctgctccccagagacagacctgggcccttccctctgggactcccaatctggacggggttcctggcttgctgtggggcatgttgaggccggaggctgggcttgtggggctgcacggccctgcccaggagaactcagcactgcctggacggcgagactcagcttctgagctgagggctctatcaggcctggaagtggaccctggggaggggtggggcagggtagttctgataagtcctaggactgttcgcttccgggttctgagccctggcgtcagggaggaagggcatgtccagaacaatggccagaaccaggcccggccagctcggggggtgacgggggcgggt

SEQ ID NO: 18061 - DNA, 2666 bp, Artificial sequence
  DNA replication origin
ggtccccgcccggcgatcccggccccggggcgccccgcggcctgcgcccagcgcgctcgctcacccgggtggccggcggcggctccacgcagggcggcgccgaggacgaggccggagagcagcagccgcagcagccgcaggtgccgcggggagggcggaggcagcggcgtcgccatccttcagcgccgccgccggggcagcatggcaccgcgaggccaggggctcggcgcgggctccgggctccgcgtcgggagcagcggaggcagcgggggaggacgcaggaggaagaagaggcggatgccaaggaggaggaggaggaagaggaaaggcacgggcggcggcgctgacgctgcagcaaggatccgggatggaggcgccggcgaggcgcgcacgcggagactgcgcctgcgcgctccacctgagggggcgggagggcggctccagactgcgccccctccccctgctccagttctggtcccctctccgggcctcgctggacctctctcggcctcagggtgtctcggcacctgcggtctctggggccggtgcggttcccagaagtccggctgggtttgggccgcgggtgggcttctccaggatgcgctcccttctggcctcttcccggtaggactccgagcccctcacccgcacccgcgatggggcagaggacctgtgtgggcctagcctcgcgagcgcacagagacacaggagcgccgggcgcacgcagacaggtgctcacgagctgggcaggtgcacaggaaggcacaggtgtgcccacagaggcaggggcacccccactcgcgggaaaagcaaatacaggaacacagaacggccccggccccgactgcagctttggctggagccgcggcggccgcgctcagtgaggccaccagggggcaagagtgatccggagccactgaggaccggagctgggagctgtccaaggtgttcagggtccccaggtgacagccctttagctccctcaggacaatgggcatctttttttttttttttctttgagacagcgtctctgtcgcctagcctggagtgcagtggtgccatttcggcccactgcaacctccacctctcgggttcaagtgattctcgtgcctctgcctcctgagtagctgggattacaggcgcgtgccaccatgctgggctaatttttgtattcttagtacagacggggtttcaccatgttgcctcagctggtcttgaactcctgacctcaggtgatacgccagcctcagcctcccaaagtgctgggattacaggcgtgagccactgtgcccagctgacaacgggcatctctgatgccccccttgcacctcacctgttgcctcccaagagcacgcccaccccatcccactagaaacctcctttgactagtcattcagagaacaagagtgagacctccaacccggggtgtccccttggtccttccagtctcagaactccaaagctggggctggctgccctcaggtttatcaaatgactttaaaaaaaaatggtgaagaggggagggaagagcagaataagaaccaccaccctcctcgccagggcactgagcatagagacagtgtctaagctcacttcccaggaaggtgaggaggcgagtgggcaagaccaggccttcccatcctggagaaaactggcttggggaggggctgcagggcctggctggggctgcaggatgccttttggaggtgcaggacactcagtcccaggtgagaagggcaaggtgccctgtgccattgcatggctcagctccacagccaggttctgtgcaagattcctgcctatgggtcctggtcctgatctcatctcccacccctgtgccacctcctgatgtgggcctgccctcccgccagtctctaccagcactgactgccccctaggaagccgcctggctggctgccacccactctccgccacctccctgacctctaccctcacccccaggctcactgtaccaggacccaaccttcagtctggccttggtcaccaacgcagatctggatgtgatggttttggggaactctgctggccagagaagactcaagggcccaggaacattccctcgggccagccatcctgcagctactctaggctgccacggcacaccagggcagcagccagtgccccaggcctggctccagagcagaaggcagtagggagggatggtgtccaccctcaggaccaagggcaggcccgtgcggctagaacagcgggaaggtgggggcacaggccacagcaaggatgccccaccccacagacactctcctttcacgtctctaggaaaaactttttattacaaaatttttacaagtaggtgctgggctggctgccagcccgtgggctgtgaccctccccagtacagacccagactacacagaaggagcctctaagggctgattctcaggaccaaggccccactctctggagacccagccctgaggaggaggaggaggagcacggggcctgcagtgatgcccaggctgaagcgggctggaggggttcaaggagctggattgagcgctctttgcccacccaggctcctgtgggtaccagagtctcagttcctatttcctgggctgccttaggggcagagacgctgagggtggggtggaaggatggagaagacagtggtggggtggagcggtggg

SEQ ID NO: 18062 - DNA, 1338 bp, Artificial sequence
  DNA replication origin
cttccggggtgcacgcatcctctcgggccaggaagagggggtgtttggctgggtgactgccaactacctgctggagaacttcatcaaggtgggcccagcagccagccaaagagccagggggcgtgggcgccctcggcccctggttgaccccacactcccctctccacagtacggctgggtgggccggtggttccggccacggaaggggacactgggggccatggacctggggggtgcctctacccagatcacttttgagacaaccagtccagctgaggacagagccagcgaggtccagctgcatctctacggccagcactaccgagtctacacccacagcttcctctgctatggccgtgaccaggtcctccagaggctgctggccagcgccctccaggtgcccctccaccctggctcacctgcactgcactgttccctcctggagcagagcctggacagccactgtgctgtggaaggcttctccaggctgggctttaattggctggaaagacaggtgggagggtcagagcatgagcaaaggcccagtggctgggctgggcctggagaagggagggccagggacggctctcagagggagcctggtcaggggcgttgggatctgtcaagcaggcagtggggagccatggattgcccctgagcacaaaagtgaagttgccagagtgagacctgtgggaggtttgtcaggctggtcctctggagcggtggtggtgccaccctgtcacgctggtgattcccccagacccacggcttccacccctgctggccgaggggcttttccacccaagtgctgctcggggatgtgtaccagtcaccatgcaccatggcccagcggccccagaacttcaacagcagtgccagggtcagcctgtcagggagcagtgacccccacctctgccgagatctggtttctgggctcttcagcttctcctcctgccccttctcccgatgctctttcaatggggtcttccagcccccagtggctgggaactttgtggtgagtaggggcaggcgggtggctgggaactttgtcgtgggtagggacaggcgggtggctgggaactttgtcgtgggtagggacaggcgggtggctgggaactttgtcgtgggtagggacaggcgggtggctgggaactttgtcgtgagtagggataggcgggtggctgggaactttgtcgtgggtaagggcaggcgggtggctgggaactttgtcgtgagtagggacaggcgggtggcagcaggtgctctgagccgctggggttcggtcacagtgtgactgcgccccctacaggccttctctgccttcttctacactgtgga

SEQ ID NO: 18063 - DNA, 3017 bp, Artificial sequence
  DNA replication origin
tgtgcgtccccacccgcgacgtccgggagccgcccgccctcaaggtgcgcgcccgggcacccagcgcacgtctggggagcagcgggccgggcttggagccggggagggggtgcggctgggaacctgagcaggatcagcccgggacccccaccgtgctctgctcctggcgggctgggtggggtcccgggttccgcgctctgcgctccccgaccgggtacgcggagggggcggggggcggtggcgcttccagggcgacgcggtgctgaaggaacaagtcccgggagttccgcgcccgccgccgagtccgtcaacgcagcccaggggctgtgtccccgctcccgggatagcccagcgatgccccctgggtgctgccggacgcccgcccccaggcctgtgcgggcccccaggggcactccgggccacttctgccctgtgccgccgccccggagggtgcggttagagccacatcgactgggtattcagcccagatggggatccacaagccccaggacccagggcccccgccaggacacgagagtggcccagaaagacaggagggcttgaccggagcagccctggccggtcctcaaaaggttggagcaggctagcctggatctccactccagcaggcccagggacctcctggtcggcccctttaaccctttattgggcttgtaggggggtggggtggagagccaagtcccccagcctgatggggagtcagaagcagggagctctgcggccctgcaggacggccatgtggcggtgcacgcgctgacctgttgatgctctgggctctggggaagccttggtcgggatggactggtgcggccctctcggaggctggaattggcgcccgggcctgggaggctggtccccagctttccaggtggatccaggatgctggggcaggagctggaaaagggcatttacaagctcgtgccactcaggtctgcaggaaggcccacccagcacccccaacaaggcagggccagcctctctctctggccctggcttggaggcctagggagagtgtctttagagctgacctggctctgaggcccacggccagcctcggtggaccttcttcacctggggccctgcctcctgcatcctcaggttgggctgccgtcagaggagctggaaggagacagaggaggaaggaagaggggaggaaggaagagggactctagggagctcctcttgcagaggagcttcctctccctgagcctgggaaacttgtgccccagggaaaagtccctggggaccctctgtccctctgtccctgactcagtccctcagtctgcccttgccaggaaggctgctgcccagaccctggcatgctggcttcaggtagtcaggagggaagagtcacctccccaccacctccctgttctccttccaaccacggcctcagaggaggccctggcctcctctgagcttcagcatgaggcttggcacatgactgggtgggggggggagcggtggcaaactggaggaacccaacttcacgtttggtgtcagggtgtcagggcccccggacaccccaggctgactccctccccctcccccgcagtatggcatcgtcctggacgctggttcttcacacacgtccatgtttatctacaagtggccggcagacaaggagaacgacacaggcattgtgggccagcacagctcctgtgatgttccaggtgaggcccagcccagcccagccaggacgcccactcactgcagggtctctgggaccctctccagccttagccagtgcaggtccttctgcttagtgttgggtggggctcactccaggcagaagccctggaaagagagaggctggtgcccctgcgcctgagtggggccaggagtcgtttgcattctagaaaggaagcctaggcagcaggtggggaggtttgagcctcgccgggcccagtattggcttctgtgccccagatggagcaggaggaggtctgggggcctggcggacacacccaggcaggcctcaggaggccaacctgggttgaccatgcccagggctttgtcctagcacctgcacccacaccctctcagcaggcagcagccttggtctccgggtggcacctgggcccctttgtctccaacctgggcgtttctgggggcttaagcagggaaggtgtgccacctggtctgggagcccacggcccccacccccaccctcactctcctggcctacggcccacctaggggctgcccgtgaggcataggctcatctctctgcctccctctaggtgggggcatctccagctatgcagacaacccttctggggccagccagagtcttgttggatgcctcgaacaggcgcttcaggatgtgcccaaagagagacacgcgggcacacccctctacctgggagccacagcgggtatgcgcctgctcaagtgagtgtgcctgtgccctggccctgtccccatgatggcctttggctgtgaccccttgcagggcggactccgagcacccctacagcaggctcacagccacctggggagaaggcctcttggagttctctgtgttttgcagcctgaccaatccagaggcctcgaccagtgtgctcatggcagtgactcacacactgacccagtacccctttgacttccggggtgcacgcatcctctcgggccaggaagagggggtgtttggctgggtgactgccaactacctgctggagaacttcatcaaggtgggcccagcagccagccaaagagccagggggcgtgggcgccctcggcccctggttgaccccacactcccctctccacagtacggctgggtgggccggtggttccggccacggaaggggacactgggggccatggacctggggggtgcctctacccagatcacttttgagacaaccagtccagctgaggacagagccagcgaggtccagctgcatctctacggccagcactaccgagtctacacccacagcttcctctgctatggccgtgaccaggtcctccagaggctgctggccagcgcc

SEQ ID NO: 18064 - DNA, 2658 bp, Artificial sequence
  DNA replication origin
gacgtcgcgggtggggacgcacagcagtaggaggccggcgaggcccgcggcggccagcagcagcggcggcagcagtgaccgcaccttcccggccatgggcgggcgggcgcgcgggaggacgatgcgtggacccggagagtgcggggagccggaggcggaggcgggcggggccgcgggaccgcggggtaggggccccggggcgggacgaggggcgggaggccgggcgggcccgcccatcaccggccacgcccacgggcggacaggtttcgcctccgctcccaagcttccgccgtccggcccgcgcaggtgagagacgcgggcgcggctgagtcaccagcaccgccccccggctcccgggtctgagcccgggcgccccgcggctatggcccaccttccccttcccgcccactcagcaaggggatcccccggccgtggaggcaggagacctggcgtgggggtgggcgggcgaggctggctcggagggtcctgtgctggagagccgcgcttttcccgggcccgggaaaggaggccagactcgcttgcaggaatgaggcactgtcggctgcggagccacgcggggcccgggctggggactcaggaggaagccgagggtcagcacctgtttgtggagcagggccctgagcgccaactcccagggctggtgaggaccaggctggcctgcgggatgccctcccggccagcaaggatccgccagcctgcggcgctgagccagcgcaggtcagctccagagacacgcagctgacccaggccagaactacccttgaggcccagtcagatccacctcacctgggccctgtactgaggtgaaggtgaggacgcaggaacggggaaggggagggacggcccaggtcacaccgagccgagaaacaggagaagcagcacagaccgggccaaaggtccatacctcccagcccagggcctcagccgcgcctgctgccccctcggcctgaggggaacagaggcttgggctgcggaggccagaggaggcttccccaggacggaaacaggtggggcctctacgtggcctgaaaggcaaggaagagggtccccaggccaagcttggggtgcgggtcagcaacaggcttctggggacggctggggcaggcgaagcgcagctggccccagacgcaagccctgctcctccgtcccacgacatggctggcctttcggctctgcagcctcacaggccccgcatcccagcccggccaggggccaccccctttgcgcctgctgcaaagtgggaattcttgtcccaataattccagccacacagcgtcagggagccacgaggcaaggccaccagggagtgcaggctgctggggcccaaagggcagccccatggggcagggtccagaccatgcccggccttctggaacgggcagtgacaattgtgctgggattgctgcctgggctgagggtctggcgccacaggcccagtaaaggcatctttcttccagctcaggaccccaaagggaggggtgggaaccctgggaagcctctctgctgcctcagcctcacagcccagcctggcggggctccagcaggcaatctctgggtgttgccggtgctaagctccaggccccaggccccagtttccccccacacaccccaggcctttcttccacccctgaccgcccagaggagggagaggcacgcacagtgcacatcatgcctgaaaaggaaggaacaaaggccgcccagaggcagggtgctgcgacccccactggcctgcggtaccccgcttccctccaggcccagcggggcttcctggtgttctggactcttttcatggacaaaaagctcaagccagggagtgggaggtctgccaggcctgagaggatggggagggagaggggagctggactctgccccggggagacaggctcatggccgagtgcccagcttcgcctgcggagggagaggcagggagcccagagcggccaggacaaaggctgaggctgagctctctttgagacggagtgagggcgggggaacgccccttcctggcatggactcagggaccctggaaggcagacttgggagagcgtcagagggaagctggcaggagctgaaggggtggaggggcctctgggtggggcagctctcggcttccaggaccctctcggggatggggcctccagatgtgctgcacatgaccccggctgagctgggaacatgcggatgcagagaggttaggggagaacccctgggggagggaactcggagcctcccgcccacgcagggctcagacctcccagggaggggggctttcctgaggcctgctgacatcttggctgccctgcctcagtctccacatcagaagcttgtgctgtgtggctcacgtctgtaattccagcactttgggaagctgaggcaggtggatcacttaaggtcaggagttcaagaccagcctggccaacatggtgaaacgccgtctctaatagaaatacaaaaattagccggttgtgggccgggcgcggtggctcactcctgtaatcccagcactttggaaggctgaggcgggcggatcatcaggtcaggagatcaagaccatcctggctaacgcagtgaaatgccatctctactaaaaatacaaaaaattagccgggcgtggtggcgggcacctgtagtcccagc

SEQ ID NO: 18065 - DNA, 1872 bp, Artificial sequence
  DNA replication origin
gccaaggctgagggaccctggctgcagcggatcggcacgccgggtgggcgagagcttggcctgcatgtgcctcccacagaccctggggtgatggccttccccctcttggccgggacgttgccccacgttgagtcccacacaacatcctgtgagcctggctccccaggagggcccccagacagctcccaggcacgtcataggcaaagcctgttcccccgactcaggatttccaaggcctggggtcctgctcacccccctttgctctcacgcccagcctgtccccaggtttcagctgggagaggccacctccctcagccaaggaaaacgagaacccccagggtacaggaggaggctggggcaggtccccttgggtgtcactccctcagcccctgcccaggcccactcccgctggtgctggagtacgcactggtgggggggccctgctcagcccaacctggagggtcccagtgtcaccagaaccaggggcacggcaacagcatcgatgggttctgcagcccagggcccccgatgcggggtcagtgcgtggggggcgcagggcccccgatgccgatgcggggtcagtgtgtgtggggcgcagggcctccgatgcggggtcagtgcgtggggggcgcagggccccctcgtgtccagggcactttggtacactgtcccacaaggcacctgtctcagaggaggggccctggcaggcagcgtggcaactcccttccggagcccagctccatgctaacctgcccacagcaaccccacagagccacattccctgctgcacctggtctgcaggggtgtcccaggacaggcccaagtcagcccagcatgcagctgccctcctaccctgaagatgggagtgggctttccaggggacataaggatgtcaggcctggacctcctgggcaggaaagggtgcaggtcctgagggcctgtgccccacagccccagcaccaggtggactgcagcgcagtgggtgggccagtggcagccagggagaagccccccgtcagcaggctggggtctgcccaccagggcctccccacgtctgcctttgagggtgcctgccatgccctgggggatcctggcatctttactggactggaagcaggagacagaacagtgtctgtcccggggtgacttcatcaggagaccgcccacatagagctggaccccgcagctgaagcggaaatgtgagacaggctggcacctccggaaaaactgcctttcagccttggtgttccgtgcaaggtgaaaagaaataggtcctcccagtttacagcttgaaatcaggctagtgagtggccctggagaccacgaggggagaatttaaaggccccggctggcagggtctaggtggctggcagaggcacatgcagaccctgcctggagcctgccctaggacgctgggcgggtcagtctccgtgcaggatgtgagcagcgtccctgggctctatccgcgaggtgccagtagcgtgtgcaggtacatacacgtgcgtgcacactgtgatgacacccggaaatgtctcaggatgttgaaatgtgtccttgggggcagaagtgtccccagttgagaatctgccccagaggaacacacccacaccaggcctcaggattttgtgttgatcaagttccaaggaaaaggaacatctcagccgggcgtggtggttcacgcctggaatcccagcacttgaggccaggagttccagagcagcctgggcaacgcagtgagagaccccatctctacaaaaaaaaaaaagaaagaaagaaaatgagagatccaggtttaaaaattcataaacaccacaaggaaacaatacactatgagacccagcagaagcaacagattgactctagacccagata

SEQ ID NO: 18066 - DNA, 1098 bp, Artificial sequence
  DNA replication origin
ctgtttgaggcccgcgccctgagccagcaggacgggggacctctggattccaccttcatctagtccttgtgggccgcgtgggcccccagggccagcctggcactcagcccttcgagggtgggcgccccatcgcacccaccctctctggctggagacccccggcaggcccaggcacagtcccggagtgggcgccttcctgccgcccttgccagatgggctccccaggcctgcccccggctggtccccgcaccgagcgcttgactccgttttggctcctggtgctgacatgggctggggctctcttgagtccgcatagtccgcagctactactgccgctgtcagtggacagtggggtacccctccatgagttagcgtccccccgtttccagcggtgccgccctgggtcccatcttcagggaaaggcactgcccacgccaggctgcacttccaacaacgggcagcagagggcgcggggcggctccgacgcgggtccaagggcagcttcccgctcaaccagggcaccaggacgaggtggctgtagctcggacggacggaagtagatggagggggtggggacggcctgtaagcggggggtgcctgcctggctggggagccccagggatagcggtcggacttcaggttctggccaaggctgagggaccctggctgcagcggatcggcacgccgggtgggcgagagcttggcctgcatgtgcctcccacagaccctggggtgatggccttccccctcttggccgggacgttgccccacgttgagtcccacacaacatcctgtgagcctggctccccaggagggcccccagacagctcccaggcacgtcataggcaaagcctgttcccccgactcaggatttccaaggcctggggtcctgctcacccccctttgctctcacgcccagcctgtccccaggtttcagctgggagaggccacctccctcagccaaggaaaacgagaacccccagggtacaggaggaggctggggcaggtccccttgggtgtcactccctcagcccctgcccaggcccactcccgctggtgctggagtacgcactggtgggggggccctgctcagcccaa

SEQ ID NO: 18067 - DNA, 1811 bp, Artificial sequence
  DNA replication origin
tcagcaccaggagccaaaacggagtcaagcgctcggtgcggggaccagccgggggcaggcctggggagcccatctggcaagggcggcaggaaggcgcccactccgggactgtgcctgggcctgccgggggtctccagccagagagggtgggtgcgatggggcgcccaccctcgaagggctgagtgccaggctggccctgggggcccacgcggcccacaaggactagatgaaggtggaatccagaggtcccccgtcctgctggctcagggcgcgggcctcaaacagctgcttaatgagcgccgacttctcctgctccagctgcgtgatgcgctcactcttctcggtcacctcctgggcaggtgcacagttggtcaaggcctgcggggcctcacccccacccctgcacccctcccgcgcctgccctacctgggtgaggagtcggttctgctccttcagcatgaggatggtctgctgctgccagaccgggggtgaggtggacgtcagggcagggcaggggggcccggaggaggacgggggcagggcctgcgggagggcaggattaggcaggcctggacgagggcggggaagcactaaactggcctgggccccagcgtgggtgtgggggtttggggtacactcacccggctggcacaggctgcagccagcagctcccccaggcaccgggccacctcttgtaccttgggcagtagccgccccagtgggcgggggctccctgcagccccaaagtcctgggaagaaagcagaggacaagcggtcagagaggaggtccagccggggccagcaaggtgccttgataggggttcccacaggtggctctcctgcctcctgatgctgcagagagcctagagggtcccaggggcattgctgaggtgggaggtctgcccaagacaccttaggccctaggagtggggcagccacaggcggagaaagggatgtctcagcatcctgggtggaatcgacagccactgtgtccgggaataggggcagccacaatgcccaagggtgcctggggtgagctggggtccccatgtgtggggatctggggacagggctgtggcactcacggcgctggctctgctctggcccaggcggcgctggcgctcctgcactcgttgcagctgctgctggtaccagtcgcggccccgcgccatcatctccaaaccctgcagcagcacctccttctcctgctccagctccttcatctgcttcagctgcaatacgtgcatttacatggaatgcctggccccagtgagcacgcacacgtccacacatgcatgagctcacctgtgggtgggcaccagagccacagacacaaatgcagcagcacgtgtacacgtttgcaaacacccacggacgcacgcttctgctgacacctgcatgtgtgagccccataggcccatttggagcaggagccccgttcctcctgctgaggggtcttggcctttcttagcccctccactcaggcttccctgggggaggggtgacggacccttcagctgagcccaccctcccgaagtctgcctgtggtgagcacacagctgggaagccagactggcttgcagcagcaacctcgtgaggcgggctgggcagccaccatagctgccctaaacgacctcttgacctccctctgcctgaccctgggccatccctccaggggagtcaagcccaggtagggagagagatgtccagagctgactgtacttccgccatggactcccccaggctcaaggcccccctgctcccatcccggcctccagcctccaggcaagatggagagccccacagagccc

SEQ ID NO: 18068 - DNA, 1454 bp, Artificial sequence
  DNA replication origin
agcccctccactcaggcttccctgggggaggggtgacggacccttcagctgagcccaccctcccgaagtctgcctgtggtgagcacacagctgggaagccagactggcttgcagcagcaacctcgtgaggcgggctgggcagccaccatagctgccctaaacgacctcttgacctccctctgcctgaccctgggccatccctccaggggagtcaagcccaggtagggagagagatgtccagagctgactgtacttccgccatggactcccccaggctcaaggcccccctgctcccatcccggcctccagcctccaggcaagatggagagccccacagagccccagtccctgctcaccaggccgcagtccacgccgctggcgatggtgtgcctccgacgttcccctcgggcacggggagcccgccgggcatcccctgagtccgcctccagggccctgcacgccactgcacctgttatggagaggcatgggcctggctcacctccagacctgcctggccaggctctgctgaggtgcagcggcctccacatctcagcccaccctcgaggtctcgggcaccagcctggcatggcccacgtgtagcctctgtgccaggctggagtttggtccctctcccctttccagctcctcacactggcttggggagggctgtgccgccaagcccgcatgtttgctcaaacacacaccctgccccctcatcggtccgtgagctctctggggccagaggccttatccagctctcttctgcacacccagtgcccagaacatggcaggcacaccctgggtctccaaggcagctgggtaagggaggagtgggcgggggggttctggtcctgactacgcctctcccatctgcacggggtcctgcaaggcagcaggagatgtgggtgtgaatgacggaaacctaacttttcccaggatggtgactctgatagaaagttagtcccgcatggccgggcacagtggctcacgcctgtaatcccagcacttttggggaccaaggcgggtggatcgcttgagctcaggagtttgagaccagcctgggcaacatggcaaaaccccatttcttcctttttttcttgagacgttgttttgttcctgttgcccaggctggagtgcaatggtatgatcttggctcactgcaacctccgcctcccaggttcaagtgattctccggtctcagcctcccgagtagctgggattacagacacccactaccatgcccagctactttttgtattttttagtagagatgaggtttcaccatgttgaccaggctggtcctgaactcctgacctcaggtgatccacccacctcagcctcccaaagtgctggaattacaggcgtgagccactgtgcccggccggcaataccccatttctattagaaacacaaaaattagcctggtgcagtggcatgcacctgtggtcccggct

SEQ ID NO: 18069 - DNA, 2073 bp, Artificial sequence
  DNA replication origin
cactgcactccagcctgggcgacagagcaagactccatctcaaaaaaaaaaaaaaaaaaaaaaaaaaaagtcccgcgtgtgtgatacgccaggcggtgcacccaactgacaagtcaggcacgtcctggtgctcacagacccctgctctgaagtttgtttgagggctccccctgggggcagccaagagtatcgcgttggtgccactccggcccagcttcctggtgagggagtaggtgcacctccccaggctacagaagtgggtacaggtgtggaggaaggcatcctccttcggcctccagctgtagccccagcaccaggcacatccttagaggccatgcccctggcacctggccacaggagtcagggagtgatgcaagaattgggcccaggtaggcacggcagagagcctggctccaggcaggcccgaattcgcactccagcctgcggtgctgagcggctggcagctctggggcaagacagtggaagagcacacagcccttcaggaggtgggagcagagagggtacagacagagggaggccatagaggaagtcccaggacacctgggcccggtctgtacagttgagtccatagagcagctcctgggtccccagatagcagcgtgctgggtgatgagctagatggcctctaggtgggggtggtggctctgcccctccagggccctgagccagcaggccacacctccagggccacagccagcctggagcaaacacgcagtcccaggtgggaacaaggaaagaggccctgaacatctgggctgggggcttggaaggctgtgtgtgttggcaggctttctgggagttggggtgacctcagagctccagatttgacaccccaaaagccagctgtgtcaatcaaatatgtcacgccatttgtctggccctccgtttgcctgtgagagggtgacagctacagccctagccatgtggccttcagggagatgtggtacgtgagccagtgccgcatggggcatcagagcagagcaggggtggaccacaggcttaggcctccaaaccccaggcccggccacagcgtgcaatcccatggctgatttcaaactgcatggccacatggatgacgctgaccctgcatttggagccagataccctctgaaggttccctcaccatagaactaggggtcccccagcctggtgtggctgctggatcagatcaccagggaggccagggccgccgtggctccaaacaccagctgtagggctggagaatatggctgaggtgggggagcagtacagggagggtggcagagcagcaggcagcacagggaccggcaggagccaccggtgggcaggcctcccctggcagaacgggtgcacaggccgaatgggctgtggggcctggggcccctctgggagcttggccccccaaccccagccataatacaggtcctgttcccaaggcaggcactgggttgggggagacaggggaccattcagcaatctcccatcactgccaactggaccggaaggcaggagaggagtgtgccagccatccccagggactacggcctatgtccctccatggcatctgccatagtacagccccactggggtgcaggagatccacccacgcccctgcccatcttggcaacagggccaggtcctcttgggccaccagcagcagcccccgcctgcctaggcctcagtggggtcagtgggcccagcccccctggctaagctgtcacactgagaagggggaccctttctttgagaaggaagcacttctgcctgagcagccacagacaggaggctgagggcccaggtgtccccaggtgcggaaagggtattggagatggagagcccaagctcaggcttggtacaggttgggctcccggtgggttttctgagtcacctgccaccccccggccctggtggccttatgctgtggcaggagagggtctggcttgcctccctaagcaagcccctgggctcaccgcgacaagcatgaagccctttccctccagacccgccgaggcgccctccaggatccggagtccacgaagagccgctccccggtcccgtcccttgtgggaaatg

SEQ ID NO: 18070 - DNA, 1728 bp, Artificial sequence
  DNA replication origin
ggaaggggactggggccagagcagagttctgaaggatgtagtgcggtcagcctggagcagaggggaagggccttcctggtagaagagccaccaggcacaggggcctggaagtgagggagtgcagggaccccaggcctggcactggcggtgaggggtgtgctggaagcagggtaggtgtggggatgggggggcgggggcttgcgtgttgtgctggtttgttttgttttgttttgtttttgagacaagatctcgctctgtcacccaggatggagagcagtggctcaatcacagctcactgcagcctcaacctcttgggttcaagggatcctcccacctcagcctcccaaatacctgggaccacaggcatgcaccaccacgcctggctaattttttaaactttttgtagaaatagggttgccttatgttgcccaggctggtcttgaactccccagctcaagtgatcctcccgcctcggcctcgtgctgggtttttgagcagaccagccattaaaggggaagctggcttacaggaccaagctctgatgggctgctccaggctcagagcttcttatgtccttccagcattccctacgatgaaggagtcccacttagagtgagtgacccagaagagaagtggacccaggatactccctggcctgggaagatgcctctacagcttgagacacaggcaccagtggctcaggcctgaggacagagacccaggtaggtatgccagctgaggcctgcccaggagggagggtgggagacccgcagagggccaaggcaagtctcggattgggggcctgtctggggagggtgtttgcaccctgaacacctccctggaacctagagggtactactggccagccctgagatgggctcccagggctagaacccaggctaaggcctggtctcacctcccatgtggacagaccaaatgaagacagagtgaccagatcccagctggaaacacagcagaggcagggggacagggctgcgggagccaggagagcagctggaggaggtgtccagccaggggaaggaggagaggagagcaagaggcagagggagctggtcactagatggggatctggggacacaggagaaagtggctttgttctgcagcaggcaggccaggccagactgtcccgagggaccagaggaggagccagcagcagtggggacagaaaggcctctgtgagtgggaagcgcccagctggctggagcctacgatcctcttggggccctcctggtggaagagaagggggccgcagggtcacctgtgcttgcggccagggaactagaggggaaaagtgggatctttggagggggtgcccccccccattcttaccccacgaggctacctggagacaggtttttttgtagggtgccaggccccgccccttggagaggtggccggggcagccagccacagctggatccgagaaagcgcctggccgcggcaggaggtttggtggggctggggcggggcagaaaggaaggtctgcgaggccagagtggagcaggagctgggggatccggttccgcctgcccagggcctccgcgcgcctcccagggccactcggcaagaaaaaaaaaaaaaaaatcaaacctcctctcagcctatcagagagcagatgggacgggctcggccaatggccgcggcgcatgttaatgagggctgacgccgcgaggagggccccattcaaaagtagtcgctattgtcgcc

SEQ ID NO: 18071 - DNA, 1061 bp, Artificial sequence
  DNA replication origin
caggtaaatgcagcacacagtaggcactcaatcaatgtttgttgattgaacaaacgagtgttgaaccccagcccacaccgtgactgggcaacagcaaatgttcagggagtacctgctgcatgaatgaattaatgaatggcctgttctgctccagtggtttgtggtggttgaacatcgtttaggtgaacgttggagttggaggggaggctcgcggaatccggtgagcagagcaggcttcccgccccaggccagagtccatgggaacccttatcacccctgcagggctgggcagcagaggaggcacatgtctcttggaggcaggtgtcaggacatgaactgttggccctgtaggtcagggtgattccaaatcccacctcaaggtgtgggttgggctgtaatagaagatttggaaaatcaaggtttgtacagccagaggcacttgcggcaccagaaggggaggagcgaccctgcccagaccgacagagcctacggatgggtgggagtgctggcaaggctgaggtgggcagcaacctcctggaccaccttgtggccaggcagttgtcttcacaagaggcccaggggagcaaggccctaaggctcagaggccaggagtgcagacggggagccctgggaggctcaggggctgggtggctgttgccagttcttcacttggtgcccactgctggggatacatcaggggacagaggggccggtcttcctgccacctctgcccagagtggtccaggcttacacagtgagaacacaattacagctaagatggggcctccaaaagtacagggacagcatgggacccccaggggtgacacagcactaaaacctgaaggattgggaaactatcaggccagccggaaagtggagtgaaggaggaagtggtcagagctcaggacaggaaggacacaggaccacatcttagctccacgcccaaagccaggcacagcctccagtctttttttttttttttgagacggagtctcgctctgtcgcccaggctggagtgcagtggtgccatctcggctcactgcaagctccgcctcctggat

SEQ ID NO: 18072 - DNA, 830 bp, Artificial sequence
  DNA replication origin
ccgggcgcgcacgtcctgctccgaagccatgtcgccgctgccgtctgtcaagtcggcactcgtgacccgcgccactgaccagcgtcacgagaccgggcgggcggtgtagaccccccagtggggcgggccccgggcgccccgccccgccccgccccgccccgccccatcccgcccggtcccgcgccctgccctggagcccgcccacccccgctgcgcaccccagactctgtccgggttctctctgaccccgccctgtctacatccccccagcccccccgcgtccggtccgagactcgagacagggcccagccccatctctccagcctgtcccccgtccctctccgtcccctggacccgctccggtgtctggccctggcctgctccctcgagctcccgtccccgttcctgctcttctccaggccccgggcccatgcccgccctgtccactccgcgccccgccccgagagatcccaggaccctctgggtcgcgccagctggcgtgggcagaggaatcgaccattgagctaagggaggaagaggccccagggacgccccgcaggggaaagctaggttctgtcccagcacgggctttgaacctgagagtggcatggccacctttgcgctaaccaagacttggacggagacctcctggtgcagagacaaccggccagagtgcattgaagaggcctgggctacggctgagctgttgggaggctggaaccagaccaggttccgggatgccatcccgcggcttggggctccctcccgcacacccttcctgcttcccattgcctggtgaccagagcgctctgcagcccctcgcccacatt

SEQ ID NO: 18073 - DNA, 1765 bp, Artificial sequence
  DNA replication origin
cacctctgcctttgcaagctcaggatccattctccaccccgacccatcagccgtgcctgaccacagccactcctgaccacagccgctgtggcccagggcactcagctcactgggaccccgcgggtccctggtcaacgcaggcggctctggccggcaatccgcagccacctgctgccgcacacctggtgaccgccttaaggaagcctcgggtgaagaagtggttgcagatgttgcctgcattgtacagcaggctcccgtcggaggcacgtagctgtgcggtctcaggactgatctcgctgtactccaccacctgggggacaccgtccacctggcacaccacgcccacgggctcctcggggtatgccttttccaccacctgcagccaagaccagggatgggttccgagggctgggcggaggggcggggctccgtgaggggcggggccagcctcgggtgcggggcgccgcgcagtcgggcgctaaccttggcgccacagtctgcgccctgcaacacacagaagccgatgaagacagggtccgccagccgcaccaggatgttgtccacacagtacacgtgcacaaactccactccccggcgctccatgtcctccaggatcttgtggtcctccagcgcgcagtagaggcccccgttgccgtctgcagacggagaagggaatgggcatcgcgagggctcccgccagggatcgctctgggagtctaggacgtgctggaggcgggggaagccccggccttgtgcctaaggcagccctggtcactaaccagacagcccagttggtgtaccatgtgacaaatgacgatcaaggcccagaaaaagaggcgcctaacccaggaccacacagcctcggggcagccgcgaacccgggcgcgtggacccccaactacgctcccagttctagtctgggcggtccctccccgtctcaggaacgggccacacctggggccatggcaactttgtctttccgctccaggataaccttgccatcaaaggtcacagcaggcagcaggcgctgctcaaacatgaccacgttggcggggtccaggtggaagaagttgtgctccctgaagaactcggccgtgggccccagagtgaactcgctggtcatgacgtacctgcaagggaggcgcggtgagccggccgcgagtacgcctggccctgcaggcagacggggctcggaccagagccggcatcggggttcggggtccagtgtccagttggggctggggccaggccccattttgggccggttctgggcaatgtcccggtctgtgccggggttggggctcgcgtctggagcggggatgtgggggggcgtggggaagggtacctccgggccgaggtagggcaggcaggacacaccaggggacggtgcagcgggtcccgtggcgctcaccggccagctgctccacccgccgaatccgctccgcctgcagctggtacagggtcttccggctgggcagccccacacggtacatacccttggggtaggtcacgcccaggcgagtgccctgccccccagccagcagcaggacggccaccttgttcagagaaatctgacggaaacctgggggtacgggcgccgtgaagggacgcccgggacccgcccacccttccgctttaggggaaaccaactctggggctggggcgccaggactcgggggccggaacgcgtgaggcgagacacgtctcaaagtagcgaggagaactacagttccccgagcgcggcctcggttcccacccgctccgt

SEQ ID NO: 18074 - DNA, 1717 bp, Artificial sequence
  DNA replication origin
aacatcctggtgcggctggcggaccctgtcttcatcggcttctgtgtgttgcagggcgcagactgtggcgccaaggttagcgcccgactgcgcggcgccccgcacccgaggctggccccgcccctcacggagccccgcccctccgcccagccctcggaacccatccctggtcttggctgcaggtggtggaaaaggcataccccgaggagcccgtgggcgtggtgtgccaggtggacggtgtcccccaggtggtggagtacagcgagatcagtcctgagaccgcacagctacgtgcctccgacgggagcctgctgtacaatgcaggcaacatctgcaaccacttcttcacccgaggcttccttaaggcggtcaccaggtgtgcggcagcaggtggctgcggattgccggccagagccgcctgcgttgaccagggacccgcggggtcccagtgagctgagtgccctgggccacagcggctgtggtcaggagtggctgtggtcaggcacggctgatgggtcggggtggagaatggatcctgagcttgcaaaggcagaggtgctggagatcaggcacaagccgtgctcagcaggcagctgctgtaaggctctgtgatcaagtctgccatctcctccttctggggacctgccctggtgcccagggtgctacctctgctctggggcttgccagtttgtttgcctgggcagggatgtggctgatggtgcctggcacttggcacagggatgcagggaggaggcctgtgcctgcttctccctggagatctggccctactctgccgcttctgtgccctgtagtgtccttctgccatcctgtcccacccagctgggtgtgctcagaagtggggacagagcccccagcggtgccatatctgatctgtttctttcctcccctctgctctcccgtgccccagggagtttgagcctttgctgaagccacacgtggctgtgaagaaggtcccgtatgtggatgaggaggggaatctggtaaagccgctaaaaccgaacgggataaagatggagaagtttgtgtttgatgtgttccggtttgctaagttagtagtagaactcatttattttccccttcttccttctctcagttttggtggtgggaactgaggcgcagctggtagggaagtagaggcttgagggagccaagggccccgcgggcaagtctcagggagaagaccagagggtgctcttggccctgagggtaagcagcccctgaggtgggggcatagggagtccttggggctgtggacttgggaggacagtagtgccacctcccggaccttccactgcccccacccatggttaggagaggtctcctggccaggttgccagggcggctcgcagggcctttggccctcactgcaggggtcccagggttgggccttcggctgctggaaatggctgctgggattgggccatccctggcgtctcaggagcaaaaacactcagtacctgcgggggctcctccctagacttgctgcccatgggaccagaccttcactctgtcactggaaacctggcccagctctcacctgcccggatcagggcctctgtgctgggacgtgggtgactagccctttccccaccaggaactttgctgccttggaagtgctgcgggaggaggaattttccccactgaagaacgcagagccagccgacagggacagtccccgcaccgctcgccaggccct

SEQ ID NO: 18075 - DNA, 1033 bp, Artificial sequence
  DNA replication origin
tcacacggtgactgtcggcacagcctcctggcccgacccttcaagttgtgctcagtgcactgagggaggcaggggctccccaactccctccccaacttatccacaaggttttggtttgtttacaaaggcatacttagatttggcttttatttatttatttttatttttatttacttttttgagatggagtctcgctctgtcgcccaggctgtagtgcagtggtgggatctcggctcgctgcaagctccaccctcccccggtttccgccattctcctgcctcagcctcctgagtagctgggactacaggcgcccgccaccacgcccggctcatttttttgtatttttttttttttttagtagagacagggtttcaccgtgttagccaggatggtctcaaactcctgacctgtgatctgcccgcctcggcctcgcaaagtgctgggattacaggcgtgagccacctcacccggctatttttttatttttatttttcttatttgtatacatttgtggggtgtgtgtgcaactttggtcagtcaggtcagggcttttaggggatccatcacccaaccaacgttgttcccatttattcacaggctttgaaactgagccccgggcatgaatttagaaagtagcaggacagtttgatttcagggctgggaaagaaaaggacgtttggcttccatctccctgattttctagggccacccctaaatctagctgcctaggctctgcgtgggaggcctgtgggggtgctttctaccccaaatcaggtcctgtcacttggcagtgggatgtgtgctcagggtttggggtgtccagaggaagatgagcttgctgagacaggagctgtggggagccaggtgtgtagagctcagtctcctatcgggactgggggtgctgggggagggctctgggcaggtgctgcaaggagatattgacaagtggactttccctagcttgcccccaaatggagaccctccggccatctgtgagatatcgcccttggtgtcttactctggagaggtgaga

SEQ ID NO: 18076 - DNA, 1324 bp, Artificial sequence
  DNA replication origin
agggtcttgagtgtggtcttgggtggccttgcagtgtgtgtctgctcctggccctggaagcctttctgtccccacccctccctgactccaggcagacctgggatcgcacctggggactgtggctcttggtgtggccagaggggctgtgacccgccaaaaggtgggtacttggccattgtcccctgctcgtctccagggtttagaagtgtacctgcaaggccgggagttccagtccccgctcatcctggatgaagaccaggccagggagccgcagctgcaggagtcctgacccgcccagactgtccccagactcccccgagacctgccagccccggcatcctggaagtcccgactccccccagacctgccagccccggcgtcctggagctgggggctacagcccagcctgagctctgggtgggaaagcagcctgccccatgcttccagcctgcagaacacagaatgaaacatgctggtagactccacgagggcagggcctctcctgtcgcctctggacacaagtggcgacagcctgctgggggctctgtggctccattcctggctgtggggtctagtcaagaggcagagggacttgggacctgggagaatggggctgagaggaggcttcgggttggggcccaagggaggtgtggtgtcatctggggagaacaggagggcatgtccctttgggagcccgccttgtggatccaccacaccccaccgagcactagaagctgcataagctacacaggatgtgcttctgcagcctacagatgcagaaccagaatgagggggacaattccacccactcgagggctgccccctcttccttagcagacgaaccagtaatgggggcaaggctggggcatcccagcccacacaccctggatgcccagcaaggccacagaaagagcctgatgtccatgatccaggtggctctgagaagcttggcctggacacctgagcctgcggccggtactcctgccttctccccatctatccccaaggcctctgcctctcagcctcttccatggtcggtttaggctgctgagttttctgtgcttccccaagaaccagtgggatcaatgccggcggcctctgtgatggttgctgactaatccgggatttcatgagtcagaggcaccacccctcaccccagctgcctgctgcttctgacggatcttggtgctcaggctgcctggctctccgagtgaggacgcagcctccatatttggtgcactcaggcatggctgggacaagccagctgccccagggttcttcccctggtgattctcgcctgctttctcatctcaggggaggcagt

SEQ ID NO: 18077 - DNA, 1002 bp, Artificial sequence
  DNA replication origin
ttcgcctcatgggcctggagctgggcttctctcgcctcctgtcgtctggctgcaccgactttgcccacgccctcacgggagacgcagacactagggacccggggaggcgcccgggcggggccgccatgttggcagagagtcccagcgtcccgcgcctcggttccggaacccgcggcgcggggatggagctgggctgcccttgggcgccgtcctgggctggtgcccaccctggccgcgtggtcaccggcaagaagcccagggcctcacccaggcgtgggggccgggggaaggaccggaccctcccgaagtcgcggaccaggccgggcggcacccgggctggggtggctgctaccccgagctaagctggctgcgccgcatctcacggtccccggggcccgagcgctgcgcctggaccggcgccgagcgaggcggccaatcggccggctggacccacagtccccgcgccataggcgggtcggggctttcagacccggctcccagccctcgaactcggtaaccttggaggtcagcttgagatgactgcgcttcctgcacgcgttgtcctccccagaaacgcccaaaatggcaaagcggcgtccgtggccgcccgaggccctccctgcctgggttctccccagccgaacctcacgcccggcccctccttcattctctcctggccaggctgctcctgcccttgggcgaatccgctgcgtcccacggtcctgactgtggcatttctgcgtgtctggagagctcccccggcagcgacgtcctgcttagcacgtggctcgtctaactctgttcccctggcctcctgctcttctaggggtcatctttaggtttctgctggtctctgccccctgtgacacttgctggtacccaaatgaagtcgtttatgtcacactctaacaagaggccctgaagaagccctcacaaaaacattagcaacggagcgcctgcggcaaacccttctaacctttggtctttatggtttcaaagcag

SEQ ID NO: 18078 - DNA, 1654 bp, Artificial sequence
  DNA replication origin
caatgaacctgagggcagggcggagtcgcagcagttgtctgacgcagtcgccgtaggacgcagccccgtacgctggagcgcagcggagacaggcgcgggcgcactggccgcatagagacgcagcgcacgcgcagtcgcgtatccgtgtgatgggcgggctgttgacggcgctgcgatggctgcctgcgagggcaggagaagcggagctctcggttcctctcagtcggacttcctgacgccgccagtgggcggggccccttgggccgtcgccaccactgtagtcatgtacccaccgccgccgccgccgcctcatcgggacttcatctcggtgacgctgagctttggcgagaactatgacaacagcaagagttggcggcggcgctcgtgctggagggtgagggtcgcgccgggctgactggggcccggggctgccgtgcccgccgccctcccagactgcggctccgagcgggacctgggcgggcggactcgactccccaggcgccgccctctccaccccttccccgcaaaaaggggcaaatgtgcgttcctggttggggcagccgtgggcggctcgcctgcagcggtctcagcggcccaaattctgcggggcggtggtgggaagagggctcagagccccagcaggttttctgggcttcgttcgcttttctgcaaggtcctggcccaggcgcctgcccctcttggagcggaaaccggaggttccccgtggtgtatgctcccctcggtacagtgagaaatgagcccctcttgattggctcctggtctgttcgtggtggtctcaggccgaagggcattgataaccacatgcggactgtgcatcgcctgggcggtgcctgggctacatctgtgggagtcgcaggagtctttctccactgttgatgaaatgtgacagaaatgtttctgcttttttcttatcctcgtctcatctgcaccactgtattaacgacatctgtagtattgtcccagcaatgttcctactccctgctgagagggaacttctccccattcaaaataaatagagctggccgggcacggtggctcatcccgcgttccacccactacactccagcctaggtgtaacagaatgagaccctgtttccaaaaaaaaaaagaaatagagctgaacactggatcttccagaagaattccttattgtcctcacagtttgtgacagttgagacgttccgtgtgatatattcagtaagaaatgtcattctctgtacctcccttagaaatggaagcaactgtcgagattgcagcggaatatgattctcttcctccttgcctttctgcttttctgtggactcctcttctacatcaacttggctgaccattggaaaggtatcagaaacacgtgtacttgaaaacgatatctgtgttgagggttgattgggcagaagcaatcttgcattctaccttaaacagctccaggaggcatatatggcaacgaattggcaagaaatcaagataaagagaaaggtagagctgtatgtaaccacctggctagaacacagatgttaatttgatgctgtctgactactttctaggtctctggtgtaagtactgatatgtccagcctcccttatagagtaagtcagctggtgggcttgaacactcagcctaaataaccacacaa

SEQ ID NO: 18079 - DNA, 1352 bp, Artificial sequence
  DNA replication origin
agcggccgtgggcaagctcccccacaaaggtgagcttactgggctcggagtgccgcagcaggtgcgttctgacaccctcgatggcttccacgtagtcttccagcagcctgtggacaccagcagtcatctcactctaccaggacggtgcatcggctcccgtggggcaccagggacaggcacatcctgggcccacacaagtacagcaggcctggcccttgccggacagaaggtgccaccctgcacagcccatggccctcagtgaagatgcccccctcacccccccagaggccacggtgagaggtgaatgaatacgccctccacataaatgcctgggccaggcctggcacggctgcggtttcctgacacacagtgtggcggggggcagcaggagcgggggccgtgggagctgggggcagcaggagtggggggctgcgggaacgggggagccgcgggagctgggggcagcgggccgggcctcactgtgtctcctgcttcccgccctggatccactgcttcagcaggtactcatagtagctgtcggccctggcgcccagcgtgaatacgcccaggtgggtgaagaggccactgtgggtattgatgaacatgggcaccagcccatccttcttcccagacaggccgtggatgtgctgtgtcaccttctccactgcctcctgcggcagaaagggggatggtgggtttactggccagggccgagctgcagggtgagctgtagaggggctctgtgagctctgcctcccctcgccccagcaccgactgactcccagcagagagagctctgtgcccagcccacagctgtccttgcccacatggctcctggtggccgtaccacacagccacacagccaccagtgcaacgcacctgaatgtcactgctcccaacgggtggtcaccacagagctgacccatcttcaggatggctctcatcccttactcgaagggacagcatctgacaaccacaggcactgtcctcacgagagcccaccaggcctggccgtcagccatggctctggagggacggcaagtgtgcctgccttctgagcccagtgttgctcctgatgatattaaacgcctcggctccacgccctcctggtgagctcctactcatcctccaagtcacagccaccctcagctcctcagggcttacgcccagctggcagcaccaggcgtcctggcccacagaggggcacagggtaccgggatgttagggcacgcccagcaagggcgctccgggtctctacccaacgcagacacccaaacccatgcccagcaccttcgaggcctggctgcctatccctgtgtaccggcagcaaccagaggccctggtgacatggg

SEQ ID NO: 18080 - DNA, 2892 bp, Artificial sequence
  DNA replication origin
gcccacggccgcttcagtgccaagatggtgagtgtgtctgcggggccttccggccgccgccccttttaccttggcttccaaggtgcctgagtcatgatgtcaaaaagaacgaaatcctggccatggcgcccacgtggaggccctgggtggaccgtggctgcctggccaggcctgtcttggcaacagggcagtaaggccttgtgtggcacctggggtgggcagggcttccccagggcagctccctccccgtgcccggtgtgtagcaggtcctcgggcggtgtgtgggggccgggttggagggcctggtccaggcagctccgctgttccatgccaagtgccctcgcgtggcctcccctcccagggtaccagggccgaggcagcgctgggctcccacgttggctgcccgtgcagctgcaggctgagggcagggcctgggatctggggctgaagagaccctctgattccaggaccacctggtgtgcttcctgccagggacgctggctctgggcgtctaccacggcctgcccgccagccacatggagctggcccaggagctcatggagacttgttaccagatgaaccggcagatggagacggggctgagtcccgagatcgtgcacttcaacctttacccccagccgggccgtcgggacgtggaggtcaaggtgggcctgggcctgggtcagggtccatcaggaggagggtgctggcagggctggccttgccctgagctctgctccgcccacagccagcagacaggcacaacctgctgcggccagagaccgtggagagcctgttctacctgtaccgcgtcacaggggaccgcaaataccaggactggggctgggagattctgcagagcttcagccgattcacacgggtgagcacctgtcctcgccccgcgtggtcacggccaccgggccacaggcacggctgggctgtggggctcaggctggctccgctcttggtggtggctgtgacctggatccgggaggggcgggcttgccgcagcctcggggtggccacactgcagcttgggggccctggcatccccatccccactgagcttcatggttgtgggacccagagtacttggaggggctgggcacccctcattttcatttctcagggcctgtctagggagggtctctgctgtgggcccagcatccccccagtttaggaggcacacgcacccatgactggggcaccatccccactgtggaccaggccctgttttaggtcacgccctccacgccagagtgtcacttcctggctctgctgtgatcttggcctgaggcccccgctgcctccgctcccaccgtctgccctgtgccctgtgccctgtgcggcaactgtgaggccccctgagcccaggttctgggggaggcggtttctgtcgtggtcacttgagggttgttggcatttccaggtgggctccggtggaaccacacggctcgcctgggggtggccatcatccaggcgccctccaccctgagcttgcgctgggggccacattcaccatggggtggagagcgcttcggtgatgaggctgaggggggtgcagggtgccccccgtgtggtgacgaggccctggctgctgcacaggtcccctcgggtggctattcttccatcaacaatgtccaggatcctcagaagcccgagcctagggacaagatggagagcttcttcctgggggagacgctcaagtatctgttcttgctcttctccgatgacccaaacctgctcagcctggatgcctacgtgttcaacaccgaagcccaccctctgcctatctggacccctgcctagggtggatggctgctggtgtggggacttcgggtgggcagaggcaccttgctgggtctgtggcattttccaagggcccacgtagcaccggcaaccgccaagtggcccaggctctgaactggctctgggctcctcctcgtctctgctttaatcaggacaccgtgaggacaagtgaggccgtcagtcttggtgtgatgcggggtgggctgggccgctggagcctccgcctgcttcctccagaagacacgaatcatgactcacgattgctgaagcctgagcaggtctctgtgggccgaccagaggggggcttcgaggtggtccctggtactggggtgaccgagtggacagcccagggtgcagctctgcccgggctcgtgaagcctcagatgtccccaatccaagggtctggaggggctgccgtgactccagaggcctgaggctccagggctggctctggtgtttacaagctggactcagggatcctcctggccgccccgcagggggcttggagggctggacggcaagtccgtctagctcacgggcccctccagtggaatgggtcttttcggtggagataaaagttgatttgctctaaccgcgatgtcgcctgtgtctttagggatctccatgactggaaagtctgggcggacgttggggagaaggtattcttcaagtcacgtctcagaattcggtttgctgagactggactctagctgtcccctgctggtgggcagggagaggccacggggaagctccgtgtccctggccccacggggcagatgcttggcgggaggcatccttgcgcctgcgtttcacacagggcctgtttccctgcagggctggcactgaggcgcacagctgagggatacacgggccctcaggtcaggcagctcccagcagcctggcatggctatggccccgagccctgggctgtggtggcagagttgtcctcatcatcactctactgctgtccctatcccagggctgaccctgggccttggctgggttccccccgaccctgaaccaggtgacctcttaggaccacgccccctcgctctcccctgtgaaaaatccatcaccttcact

SEQ ID NO: 18081 - DNA, 1031 bp, Artificial sequence
  DNA replication origin
acatggcatacccggcctgtgtggggtgcgccgcgtccccagccgtgtctccgagggtcccgctcccacagcctgcgtgtgggccccacagacaggaaggacgggacatacatggccaggcctccaggcgtttattcagccccttccctctgccgccagctgcttgagtgaagcccccactccatgaggagccttgagacccctccagtcctgtgctcagaggctgagtctgggccccccacgcagagctggctgctgctcacgcctggctgcctttacccactcgccgatgatggtggcctccagcttccgcgcctcaaccacggaagcaggatcttctgggtgggaggctctggggagcgggcacagagggggcccgtcagccccagccctcggtgagcctgtcccgcccgacccgcgaccaccgccaggccacctccctccgcacctgaggtcgaggtggtgcgctcccccctggatggtgacggcgatgactgaggcactcaggttcctccgaatctgtggtcagtggaaagaactccatcaggtgaggaacgaggcaactgcccagcctccgtgggcccattggagaggagacgtgagagggcgagccgagactcagtgcccatcaagcaaccagagagaaccagccagagacggaggtgggaagtgacgagatgatgggggcaaaaccgggtgagacaggagcagggaaggggcaggtgtgaggcctgtgatcccagcactctgggagtaagacaggagcagggtaggggcaggtgaggggcctgtgatcccagcactctgagggtgagacgggagcagggtaggggcaggcgaggggcctgtgatcccagcactctgggggtgagacgggagcagggtaggggcaggcgaggggcctgtgatcccagcactctgggggtgagacgggagcagggtaggggcaggcgaggggcctgtgatcccagcactctgggaggccatgcggggaagatcgtttgagcccaagagttcgagaccagcctggg

SEQ ID NO: 18082 - DNA, 967 bp, Artificial sequence
  DNA replication origin
acagcacgaccttcccagaaaccctgggggaggcaggggccgtccctggggaccctctcagcactggctgtagccaggcccagcttggtgggtgctgcccaaggggcccctggggtccccagcatggagggcaacagagggcagcaggccccaccctgccccgtggagagcgggggggccctcaacagtcaggcccggggctggcagcacagacaccgccgacctccaagcaggtagcctggagggccttcctcactgggacctacagatcccagagccccagatcccctgcaggaccattccgaggggggacaggttggtggccggagcccgcggtgtgtctgtgtgtggccgctgggccccagcgcctctcctccccagggctggtctacaacgcctcgggctccgagcactgctacgacatctaccggctctaccacagctgtgctgaccccactggctgcggcaccggccccgacgccagggcctgggactaccaggtgtgggggtgtgggtggcctggaaccactcgggggcaagggtgggcgtgggctggcctgactcaggctggggcacctgcaggcctgcaccgagatcaacctgaccttcgccagcaacaatgtgaccgatatgttcccggacctgcccttcactgacgagctccgccagcggtactgcctggacacctggggcgtgtggccccggcccgactggctgctgaccagcttctgggggggtggtaaggctgagggggggtgggccagcgtcctgctttctgccccgagctctgcaccccctgcccatggctcacagcccccgtgaggggcccacatcacaactttctctgccccttgcagatctcagagccgccagcaacatcatcttctccaacgggaacctggacccctgggcagggggcggggtgagtcctggcctgggccctatgaccccgttagtttgtttgttt

SEQ ID NO: 18083 - DNA, 1376 bp, Artificial sequence
  DNA replication origin
gggcagggtggggcctgctgccctctgttgccctccatgctggggaccccaggggccccttgggcagcacccaccaagctgggcctggctacagccagtgctgagagggtccccagggacggcccctgcctcccccagggtttctgggaaggtcgtgctgtccaccccaccacagccctggggcaggaggcaaagcccctggccgggctgcggatcctcgccccacccggccccaggacccaagccaagcctggggtctccacacttgcccatctggggccgggggaagggcacctgccagtgctcgcagccccgtgatcctctgggcctcactcagcagccgatcacagcccacctggagtgcaggggcagcggcgactcagcggggtcccctccaccagctccgcctccctggctcccaggatgagggtcaggccgctgaccaccagcctcgggacactccagccggcctctccctgcgccctgggaggcggcgcctcaccttgacggggttggcagggaggggacccaggaagtcagtggggtaggggtagtccatcatggccagcacggtgaaggcattccgggcgaacatgaagagctgggtcaggtccttctcgtctgacagcggctggcaggtgccgaactcccagcggaccgtgtcgtaggctgcgtggaaggggcagagacttgaagtttgggcatagctggcgctggggcgggtcaggcagtgggaggcggtgggaggacctcacctccctgtaggaacaagtccttgatctgtcggaacgcttcccgcacaccctgggtgcatttgggactctggccctcaaagtcctgggggaaagagaccgtgctgactgcagctgctgtcccttagggggcctggaggaccccaagcctcactcaccgccgtgacgtcccggaagaactggttggagtcgccgaggcctgccacagctagaacgggcgcgctggccgccagcgcccccgccaccaggtggggatacttcatcctcaggtaggcactgagcatccccccataactgggtgagggacacagggttagggctgctgcccccaacaccccatttcctcttttcctcctcaggggcccacaggtgccacaaggaggacgacacttctgagacccacaaattccaaccctgggccaggtgcgggtgcagctctcactgggaaaggccgctagtgtggccgcacatccaagctgagcaggtggctgggaggacaggtgggagggcttcctgggggaggcaacactaagcctggaaccactgcctgaggccttacgaaaaggcagcggtgggagtcagaggggagtggggagaagggctgggggcgctgggtcggggcag

SEQ ID NO: 18084 - DNA, 1470 bp, Artificial sequence
  DNA replication origin
tggaagaagcgctcctggaagccggggtccggggccctgcgggctgtggggggacgcgaacctcagaggcggggccgggaccggggaatgggccggggggcgccgccactcaccccccgcctggaggccgcgcagcccgagcgccagcagcaggaccggggcccagggagcggagcccatgtcgccttccgcgggcgcccgtcacgtgggcggggtcacggggccgccagggcgcgctcctccctccaggccccacgtgtttcgggcgcccgcggtccccacggagaccgtcgctgcttcagcgccgcgccggggctgtgccccccaacaccccgcgccccgcggccgctgcccaggggtccttcccgggcacggcgcggggaagcagagggcccccgggccatctccgcggcctcccgccccactggctcgtcctcctaccgcggccccatccggagctgcgctagggcgagtccctgctgcgcccgccaagcctccccagcacttgctcctggcaggtgccccactccaaggcagggccgggagagtgggggccgttctgctgccctaagggcgggagggagagggtcccaaacagagtgctggccccccgaagaaagcaacccagggtttgtccaagcgataacgggctgggcttggcggggcggggcctcgcagcgggcaggagtgtggggtgcccctggagcgtctgggcagggccgggatgtggccgggtagctcccaagagctgggaatcgccacctgcccttccgactggcacccagtgtgcccacacagccctgcagggacaaggggggaccagaggcctctgctgggagctggggcctcctccctggggagcacccagaggatggaagaagtcacctttccccagcgtccagttcagggagtgggtgagggggccgtagtggtgggtgccagactagctacgtggagtcctgctggggatgtacatgggccgctagccaggcccagaacaggtgcaggggcagcaggggctcagctacagagagttaccctgtccttctcccaagactaccctcggccagcatgaccctgccctgcccatcctgtgtggggctgagcggagaagaccggccacttccacagcccctcacgccatggccctcccgtgcctcacacagaggcaccccccatggtgggtgactggtggctggggccctcagcatggtggcagtgaccatcacgtcacactgcaacacgaggtcatccagggccacacaccgtccccaccacggccctcacatctgggccctgtcccatccctacgcagttcctggggctgcctgccggggcccccgcaggacgggggtgaggacaaacagcagacctccttggatgtggaggtaccccacggcgtcccccaccccacacctctgctcctttggctccctcgggtgccttaggtggccagaactccaccagcaa

SEQ ID NO: 18085 - DNA, 829 bp, Artificial sequence
  DNA replication origin
ctgcaacacgaggtcatccagggccacacaccgtccccaccacggccctcacatctgggccctgtcccatccctacgcagttcctggggctgcctgccggggcccccgcaggacgggggtgaggacaaacagcagacctccttggatgtggaggtaccccacggcgtcccccaccccacacctctgctcctttggctccctcgggtgccttaggtggccagaactccaccagcaaccctcacccaggaccgcagctctggagacgccagctaggccgagagctggccagctccccaagcacaccagagcctggagacgctccaggcttggctgggcccacagaggggccagagcctcagggagggctccaggagcagggtttccaaggaagccactttccctcttgtccacggcccaggcattgatgcccctctgggcagcagccagggcctcccaagccgggaagggtgggcatggggctacccagcatggctctgccaggggtgagggtggccacagtcccctgcccacatccctgtgcccacagaaacatatgctgtatggaatcaaggtttaaggcatctaggcctgtgctggtaacctgtaaccttagccccatccctgtgcccacagaaacatgtgctgtattgactcaaggtttaggggatttagggctgtgcaggatgtgctttgttaacaatgtgtttgcaggcagtatgcttggtaaaagtcatcgccatcctccattctccattaaccagggacacagtgcactgcggaaagccgcagggacctctgcccaagaaagcctgggtattgtccaggtttc

SEQ ID NO: 18086 - DNA, 1347 bp, Artificial sequence
  DNA replication origin
tgctggaggaccatgcaccgaccacgcccgaagcagaaccaaggcccgccctgttgccgtggcgactgcgcgcggggtagacgcaggcgccgcaagccgtgagctctcagtgcaggcgcataggctgcggggttgaggcgcattgcgtgcgcgtgcgcgctgctcacacgcggacggttctgtgcgccgcaatggctgcccgcgagtatcggagaggcggagctctcagtcttttacaggaccgggtctcctgatgccgccggtggttcctcgaggcccccttccacgcatccgccgccgctgcttcatcaggacttcatttcggtgacgcagagctttggcgagagctacggcaacagcaagaactgccggcggctcttgtgctgcagggtgaggaccgcgccgggcggaccgaggcccggggtcgctgcgcccgccgccctcccagcctgcggctccgagcggggcctgggcgggcagactcgactccccccgacgccgccctctccacccttaccccgcaaaaaggggcaaatctgctttccgggccggggcagccgtggtcggcacgcctgcagcggtctcagcgacccaaattctgcggggcggtggtggtgggaggaagggttggagccccagcaggttgtctgggcttcgtttgcttttcggcaaggtcctggcccaggccccagtccctcttggagcggaagcctctggacctgttgctcctaagaaagcaagcggcccctgacgcgttgctgtggcctggtttgaccctcgtagccagcccatgttctgtgaggcatgaagcgccacgcagacaccacgacaaagtgagatgaactaagacctcttcttgattctaagcagggaacgcacagctcaccctgtcacatgcagcgatcataagctgagaattaccctcttccttcccacagcgtctaatctttttttatgtttttgtggcaaggtctcgcttagtcgcccaggctggagcgcagtggcgatcatggcccactgcggcctcgacctcctgggctccagcgtgcgtctaatctagaaccaaatcctccttccttagatcatcccccaaatcacccaactacaggtgaaatcctgtaatagtttcctccgaacaccctgttgctgagacacctcaacgtctcaacctggtgtgtttgtacgtagagtaaaagacccaacttgtttaactacaggcgtgtttgcagtggtctttggcttaagggcgttatagactctcagtcggagagtcactgagattcagttgagactctcaactcagagcatgcctttctgagtcccttttgtgtctgtctctgggagcac

SEQ ID NO: 18087 - DNA, 1458 bp, Artificial sequence
  DNA replication origin
ggcgtggtcggtgcatggtcctccagcactgttcgccccgcgggtctggtcctgggttcctttcgcctcctgtcgtcggacggcaccggctttgcccacggcctcgcggggagacgcagacacccgggacccggggaggcgcccgggcgccgccgccatgttgtcagggagcgcccgctcccagctcttcggttccgggacccgcggcgcggggatggggctgggccgcccttggtagccgtcctgggctgggggccaccctggccgcgtggtcaccggcaagaagcccagggcctcacccgggcgcggcgtcgcgggggccgagggaaggaccggaccctcccgaggtcgcggacccggccggctggggcgaggctggggtggcccctaccccgagctaagctggccgcgccgcatctcaccgtcgccggggcccgagcgctgcgcctggaccggcgccgagcgagggggccaagcggccggctggacccacagtccccgcgccataggcgggtcggggctttcagactcggctccagccctcaaacctggtagccttggaggtcagcttgagatgactgcgcttcctgcgcgcgttgtcctccccagaaacgctcaaaatggcaaagcggcgtccgtggccgccggaggcctgtgttctcccctgccgaacctcacgcgcggcccctccctcattttcttctggccaggctgccccctgccccttgggcgattctgctgcgtcccacggtcctggctgtggcatttctgggtgtttggagggctcccccggcaacgacgtctaatgtctataatcccggccctttgggaggtcgagggggggcgggggatcacttgaggtcaggggttcaagaccagcctggccaatatagtgaaactccgtctctactaaaaatacaaaaaatagctgggtgtggtggcggttgcctgtagtcccagctactcgggaggctgaggcaggagaatcgcttgaacccgggaggcagaggttgcagtgagccgagatcgcctcgttgcactccagcctgggcaacagagcgagcctccgtctcataagattaaaaataaataagaaatcacaaaaaattagtacgtattttgagctgaataaaaatggaaatatgcacatgaaaatgtataggatgcagctaatacagtgcttagagaaagttataactgcaaactcttaacgttagaagaggtgaggccgagaacagtggctcacccctgcgatcccaatgctttgggaggagactgaggccgaccccggaggattgcatgagcccaagagtttgaaattagcctgagcaacacggtgaagctccatcgctacaaaaaaatatgaattaaaaggccgggcgcggtggctcatgccagtaatctcagcactttgggaggccaaggcgggcagatcacgaggtcaagagtttgagacca

SEQ ID NO: 18088 - DNA, 1547 bp, Artificial sequence
  DNA replication origin
ggtctacccccacgcagctgccaggctctggcctgcctgaggcggatacttttttttttcttttttttgatggagtgttgctctgtcgcccgggctggagtgcaatggtgcgatcttggctcactgcaacatccgcctcccagattcaagcgattctcctgcctcagtctcccaagtagctgggattacaaatgcctgccgccacgcccggctaatttttgtatttttagtagagacagggtttcaccatgttggccaggctggtctcgaactcctgaccttaggtgatccacctgcccttgcctcccaaagtattgagattacaggcatgagccactgtgccctgccgaggtggaagtttggagatgggccacaaactcctggagatagggccagctcagtccccctgagcacccacacacaccctcctgagagccaacagaaggagtgagggccccgaggcggatgacccgtgtgcctcaacccgaacggggagaggcggggtctgcagcagggtacgggcaggtgatcccccaaggaaagattttcctgtattgagagagaaggggccaagaggaggagcttgtcaaacaccacagcccctccccctcctctcagctccagggggtccctggtgccagtgttcggctgatggagagaacggcaagcgggagagagagtgtgacccctgtgggcacatgacttcccttgctgcactgctgcacatagcagaggtgtggtgacgaccctgttttgtcccattgggggcgtttgctgttaggtctgcagaatcctcagttgctattggaaatggtgacatcactggcaggggcggagcttcagccatccttcaagttagggaggggcacgcacactccaggggtggagggggacaaagacagggtggtgtggaccagagggatgggtaaggctctggaaaagggggcgctgggagcgcattgcgagggggctggagagggagagaggagcggaagctgagggtgtgaaacggctggccccgaacacacctcgcggcgctccagtgattcctggtgtccgacctcagccccagtcagtgcgggtccagtttccaggctctcgcggaaggcctggctgagcacatgcggcagccacggtcaccctccctattcctcttagcccgaggaggggggtcccaagttacatggccacgcagatggggcctctccctcatttctgaaccttgtggggaggggaaccttgaagggagcgccccccagagccatggcttagggcctcccccacccctctggagctccagtctgcaagagtcaggagccgaaatatcgctgactgtgggtgacgactcttgcgcgcacacacacatacaagcgggcacgacgcgttcggtcctattaaaaggcacgcaagggtgcgggctgcacgcggtgacacggacccctctaacgtttccaaactgagctccctgcaggtccccgacagcacaggcccctgtcccaggacccctccaggcacgcgctcacacgcacacgcgcgctccccggctc

SEQ ID NO: 18089 - DNA, 1631 bp, Artificial sequence
  DNA replication origin
cgtgagtggtagctgcaggcattgcctttgctgcagaggccatgcccacagacagacagcaacatgggcgtgagttgaagcaattccccaggaatggcccctcctggatttcctgagtccaccttccgtgtccctccccagtcccagatggaatatgtgactgcagccactggctacagatgcatccccccagtcccatcccatggtgtcctgggctggggcacgggggtggcttgtgaagtggggagggaggatttctgagaaaactctggtgtgggccctgcagctgcagctgtttgaagtggttctccctcccccagctcttgcttccagcctgcacccagaggtgcttggcaaagacccgtaggtccgtgtgtgaccatgcaggtgttcacgcgtgtgctagggtatggttatgtgcatcacatgccctggcatgtctgttcgtgtacatgcgtgtgaatgactggaaccatgtgtgtaaatgtgcatgtttgcacgtgcctctgggaatgcatgccaagccgtgtgtggcacatgagcaggtgtcaatggatctgcatgtgtgcagatgagcatatgaaattgattgtgtgatgctgaggtgcatgagtgtgtgctaatgtaacatttggtgtgagtgtgagcatgtgtgtccacagatgtggtgtgtccatcaggtaggcacgtgtgagcggtgctaggctggatgtctgtcttgcctcttacataaagggctgcattgcagatccttgcagcctcattggaattcagcaggcgctcggcccaggggcggacagctccgacaggcaaaatcccaggagccacgtcctcccccgcagcgctggctgccgacagctcccatgccctgatgcctctcgcgtgtgcacccccactcccacccccacaaagcgtcctgccgtggcacctgagccatttctcttcccaggcggacccatcggtagggggaagggacgaaagaaagggcaggagaacctggaagcagaaacaaagatggccccaggccccgtcctgtttaaagctctgcagggcgggcatgtagctggacaggcgcttctactctcttacccggaatgcccacccccacactgacacactccagccccacgtctacacacaccagtcagggcctggagccccaggggccctctgaggaccagccaaggtggcaggtgactggtctcaggccaagataggggagccagcagaccctggtgtttggttcctagtgagacgaggcctcccggaagcagccagctgactctggggtggtgtcttacagggaggaagggggcacggaaaggatggaatgaaactgggggtgtggggttgcaggatggaggagaggggaggtgggtggcggaggtgggggagggcacctggctggagatgaggtcctcgcacaccgacagagccatctggatggcgttgggcttgtgcgtgacggaggtggcattgagctgaatcttccaggagccgtgccgcttgttggcctggttcacggcctcgcggaacatctgctcgtgcttccgcgtgctcagcaccgcgccaatgttgacgatcttggggtcgcacgcggcacgggcgacggagcaggagaacagcagggc

SEQ ID NO: 18090 - DNA, 1489 bp, Artificial sequence
  DNA replication origin
tgtgcctgtgcacgtgtgtgcgtgtgtgcatgtgtgtctgtgctggctggcgcaagtaagggtgagcatgcacatgaggagcgcacctgagcgtgtgtccaggtgtgtgtgtgaggagcgcacctgtgcgtgtccaggtgtgtgtgtgaggagcgcacctgagtacgtgtccaggtgtgtgtgtggcgctggagctgcatggaggcaagcctgagcctgtggccagaggtgtggagtgtgatgggaatgtgtgcatgcacctgtgagtgaaagcaggcagttgggtgcgcaggggtgagtgtgtgatgggagtccgtggccgtgggtggacatgccagaaggtgaggggcctgtcgagcgctggggtgaggggcctgtcgggtgctgggggggaggggcctgtcgggcgctggggggaggggcctgtcgggcactggggtgaggggcactgtcttgggtggggcccttggtgcccatgcccctcccccccaagactcagcagaccccccacgacagtactcccaggaccctctggtctgcccctggctttacccccgacccatgccctctggtccctcccggggcctggggtgccttggggggtgctaggttggccctaagtccgatgaagccagctctgacacgaaacatgctcccagccacccataggtctggccctcctcagcctgggcctcctcccactgcttgatcaggagctggcccaggtgctgagcacccagggctccgggggtctgtagccgagaaccagctctgccccagactgcaaatgggagtggtaaggaaggggaaaggggtcgctcggacccccccaaatcccagctctgatctctctgcagccccacagagtggacgcctggctgtgttgggggtcagtgtgtcctagaaccaggtggctaatgggtcttggtgaggagtgcagagggagccctgtggtgggggcaaggaggggagtggagcccacaggggcggtccaggctggggggcaggtgtctgtggacagggctttgctgagccatgaggtgcagagcttcaggggaggccacgcgggggaggacagggaatgggcccagccaggaggggacaggcctgcaggggcggtatgtgggggtcgtgtacaggggagaccttgcccagagggaggctgctggggactcaggacagggtgggcgggaagggtgacgagtcccaagcccggctggggcctccagggagcgaggggcatgggcaggaggaggggacgagggcgctcggcagcgcggggcaggggtgtttgcggagctccaggtggtctggccctcgccccgcagggactgacacgaaggagatttcgactaatggcaaaagcgagtgaaatgagccgaggacaggctggggcgggcgctcgccagacgtggtggtgctgaccatgcacgatggaaagaagagggtgtcacacacggagccacagacacaaggcggcccgtcctgc

SEQ ID NO: 18091 - DNA, 1267 bp, Artificial sequence
  DNA replication origin
tcaaccgtttataatcttcttctgtgtctgcatattttctctgtgcacattattcatcagagtaaaaaaaggaactatgaaaacctcgaccaactgtcctatgacaacaagcgcggacccaaggtatatatgcatggacgtgcacgccacccacggctagggagccctggcctcggcgcctcggccactagggccactgtctggcccagccgccgagccgcaggcccaagcaatgaggagaggcagccggcagcaggcaggagagggcaggcaggagagggcaggcgtggcggcgtgggtgcctgaggcccacccgccgtgaccctagcctgcaccctcgaggcaggcgcggctgcaggaggagctgctctccgggaagtgcatgcgaatctccgagaccccaagggtttcctcgtggaacccgggagggagcccgcccgcctggccacccactcgccggggccgggctgctcctcaggggcctgcggaatcaaacctcagaggacctcccatggttttggaaaagtcagccccatctcttttcctggttgcattccaaaactcttttctgtttcccgtccgctgcacgcctcctgagtctgggtccacttcagcttgcatgctcagtgcaaagatgaggacaggagtgaggtggagagagagatccagagagagcagagagagcacagaacgagcacaggtgagcgcgcaggctgaagacaggacaggaccggagaggcgaggccaggccaggcaaggactgaggaaggcaggcggaggcgcaggtggcaggcgcagaccatggcagccctagctaagctgcctcggggttcccagcggctccggcccaactctcacccctgaggcgctatgtcccctgccccagccgcctgctaacactcttgctcacaccgcaggcagagaaggtgctgcagtttgacccagggaccaagaacgtgacggccctgctgatggaggcgaaagagctggaggcccgggtcatcatcctttctgccaggtgaggctgggcagggccctacacactccacacaggatggtacctgagccaagtacccgccatctgagccagagctgggacattgttgggcacagtgaccttcagcttccaaagcaccttcaccaaggacagccacccccacccccacccgcacccacactcctatcggcatggctgatgtgacaccctccatctgtccctcccttcctgggcccttccccattccacagtcacatgctgctgctgccc

SEQ ID NO: 18092 - DNA, 2296 bp, Artificial sequence
  DNA replication origin
gcaggagaatggcgtgagcccgggaggtggagcttgcaatgagccgagatcgagccactgcactccagcctgggtgacagagtgagactccatctcaaagaaaaaaaaaaaaaaaaaaaaagaggccacaagttcgagaccagtctggccaacatggtgaaaccccgtctctactaaaaatacaaaaattagccgggtgtggtggcttgtgcctgtagtcccagctactcgggaggctgaggcaggagaatcgcttgaacccaggaggcagaggttgcagtgagctgagattgtactactgcactccagcctgggtgacaaagcaagactccctctcaaaacaacgaaaaaggaaattaacttctgagagtctggcggggctttctctaagaggggctttttctgggcggggctttttctggtaggggctttcactgggtggggctttccctgggtggcacgtttctgggtggggctttctctgagtgggaatttctctaagtgggaatttctctgggtgaagctttccctgggcggggctttccctgggtggggctttcttctgggttgggctttctctgggctggtcttttttctgggtggagttttccctgggcgggtctttttctgggctgggctttccctgggtggggctttttttctgggcggggctttccctgggcggagctttccctgggcggagcttttatctggccagagctttttcctgggcgggtctttttttctgggaggggctttccctgggctggtcttttttctgggcagggctttcaccaggcgcgacttttttctgggcgggacttttttctgggcgggtctttccctgggcggggctttccctgggcgggactttttctgggcagggctttccccgggcgcgacttttttctgggcggggctttccctgggcgggttttttttctgggcggggctttccctgggcgggactttttctgggcggggctttccctgggcgggtcttttatctgggcagagttttccctgggcgggtcttttctctgggctgggctttccctgggcgggtctttttctgggtggggctttccctgggcgaggctttcgctgggcagggcttttatctgggcggggcttttttatgggcggggctttccctgggctgagcttttatctggccagagcttttcctgggcgggtcttttctgggcggggctttccctgggcggtcttttttctgggcagggctttccttgggctggtcttttttctgggcggggctttccctgggcgggcttttatctgggcagagctttccctgggcaggtctttttttctgggcggggctttccctgggcggagctttccttgggctggtcttttttctgggcggggctttccctgggcgggcttttatctgggcggagctttccctgggtggggctttccctgggcaggtcttttttctgggctgggctttcctttggcgggtctttttctgggcggggcttttatctgggcggagacttctcttggcggatctttttttctgggcggggctttccctgggcgggcttttatctgggtggagctttccctgggtggggctttccctgggaggaccttttttctgggcggggctttccctgggcaggtctttttctgggcggagctttcccttggcgggtctttttttctgggcgggtctttccctgggcggggcattccttctttgggacctgtgcatacccttgggactttgcctggtcacgtctttaaaaatcttttttcctggagcccaggccaaccctccctggggcttgcagttggatgagtggagtggacaagtgacctgtgagcttaaagccgagtgcagggggcgtaatgggggacgattagtgcctttttatagcagctgcaggaggagcatgtaaggccccgtgggcagctctaagcaacaaccctaccttgggctggggagattcctgccttctagtccgaggagccctggctggccccaccctgcgttctgccctggtgagggggctgcatctgtctccgtgctagagggtcatttgatggaccgtggaaatggtggtctgccctgggactgagagtgtcgccggctctttcccatatgcagggctggagggctgggctgtgttcctccgggtgtttcactgctgttttgctccgctctgttggagcctagcagagcttttaggtcagggacagtggggttttggctgtcccatggggcaaggctcctcaccctgcccttccccactcttgcttttcc

SEQ ID NO: 18093 - DNA, 980 bp, Artificial sequence
  DNA replication origin
ccttctcgaggagctcgtgcacggcctgggccaccacgcccacggcgtcgctgatgtgggccgactcgttcttgccgttgatgagctgcagcccgaggatgcctaggcgagcatgcgactcagagcccgtggggtcctccccgttcggggaccccgccaaggcccagcactcaccgtctggggcgtagcgcagggcgttccccgagatctcgcgctcgccgaccagccacacgtacccggagcccgtcatgttcagcatcgcggctgcgcggtatacagtggcagcatcgtcctcgctgtggggcagacggggatgacgggccaggactccagcactcccaccgcggcgctccgcaggcccaggtcctcctcctctggagcagggacctgcccagcccccatcccctcctagagcgaagcctgcagacctcgcagaggcgctgcggcccagaacccaggagcctcccaggcctccgttgctggctcttaccttgggggagcagggatggggttagatgctggcccccttaccttgggggagcagggatggggttagatgctggcccttaccttgggggagcaggggtggggttagatgctggcccttaccttgggggagcagggatggggttagatacctggcttatgggactgacttccttcttgtgacctgcacctgtgctccccagcacgcccttccctccacctcagaaggctctgatggggtcccaggatggtaatggatcaccattgatcacttgctggccagataccaggcactgctcgaagtgttttacggggattatgttgtttaactttcacaatatctctgtgtcccgaggggaagcggaggcacatgggacacacaagagttggtaagtggcagagtcaggacccgagctcctaagacctcctagacaggccacacccctctggtcctctatgttcaaacatgtgaaatgaggggttgagtggctctc

SEQ ID NO: 18094 - DNA, 809 bp, Artificial sequence
  DNA replication origin
gggaggcgtgggggtggtgggagaggcaccctcccggcatgtcctaggcagggtgagcctgagaggggggcaggcccgcccaccctcagcctccaggcagcattttgtcttttatccccaggggaatcaggagccattgaagaagttgatttgctttataaaactttcattacattttcctgttatacaggtaatatatatgctagtatttttaaaaaattagtgaggccagaaacaaatttgtaaaaagccatctccatctcacagcctagatggggccttttggccattagcgtttgaccgctgctttcagacttttcagtgtgaggtgtctgggctgcaatgaaacccacactggcactggaaaaccccaccctgtctgcagagcagggaagggagcttgggtgagaggccacaggggccggtgcagagcaggggagggagcctgggtgagaggtcacaggggctgacaccaagcttcaggggtgggctcagaaaacagacagggtcaagagacatttgagggcttggaatgaccgagagaaggttggtgggcgtgtcgcctgtgaggtccttgcctttggtggtctgtgatgctaccaggactggagtgtgtgtggagtgggggtagtgtggctctgcccggggaggaatggccaggagagcaccctggagtagggagccaagggaaagatgttctggaggaggaagccggcgagggcagaggctctcagaggcccaggggagtcaggaagggctgtcccacacggtggaagaggacagtttgacccggtcccatcaagagcaat

SEQ ID NO: 18095 - DNA, 2052 bp, Artificial sequence
  DNA replication origin
ggatgaagggaggcacgggtgggtggccccacgggtcccaggtcctgtgcaggtgcagggtcggctttgtggacatgcccctgtcctcgtggcacagcagggtgggggtcagcctgcaggctgggctgtttctcaccccaggaagatgcctggcatacacgggacatcagcggctcctctgctggagggaatcatgtctttttttttttgagacagagtctcgctctgtcgcccaggctggagtgcagtggcgcggtctccgctcactgcaagctccgcctcccgggttcacgccattctcctgcctcagcctcctgagtagctgggactacaggtgcccaccaccacgcccggctaatttttttgtattttcagtagagacggggtttcaccgtgttagccaggatggtctcgatctcctgacctcgtgatccggccgcctcggcctcccaaagtgctgggattacaggcgtgagccacagcacctggcggggaatcatgtctaagccaagactggagaaaaagtggccaagagaagggtccagctctccaggagtcttttctgagcccccagcccccacccccccggggctgcaggcagacgatgctgacggtggctggggaggacgtgtcctgaacacttgggctcgtgaagaagctccagagaggggcagtggccggcggcgcagggcggggggtgtgaggggtgcgtcggggattaagaggggcgccaggggaggctgggagctgagaagagactgccgccctgggcagccttaggtcggtggtccaggctgggtctccccttcccccccagattgtgacgatccaccaggagcccttcgtgtacgtcaagcccacgctgagtgatgggacatgcaaggaggagttcacagtcaacggcgacccagtcaagaaggtgatctgcaccgggcccaacgacacgtcgccgggcagccgtgagtgcgcggggcagggcgcggggcgcggggcagggcgcggggcgtggggcggtctggagcccagcagttaccgcccgcacctacccagcccgccacacggtgcctcagtgttgctacggcttttgcatcgacctgctcatcaagctggcacggaccatgaacttcacctacgaggtgcacctggtggcagatggcaagttcggcacacaggagcgggtaggctggacggcgggggtggggaccagcgtgagaggggcctgcaggcgcggtcggagtgggtggggcatggagtaggcggggcttgcagatggtggggggtcctggggtgagtggggcatggagtgagcggagcctgcgggctgggtcctggcgtgggtaaagcatggggtgggcggggcctgagggctgggtggggcctgacatgggaggggcctgacgtgggggtcggagtgggtggggcacggagtgggcagggcctgcaggcgggggtctggagtgggcgggacgtggagtgggcggggcctgctggctgtggtggggcccgcccggcgtgggaggggtctgcgagccagggcggggctggagtggggtggggcctgcgagctgggtagggtcttggggagaagacccccggagtgctctagggcggcttcagtcgggggtacctgtggcgggagctgggaggacgctgcctgcatgcccgccggctctgtcgcctcgcaggtgaacaacagcaacaagaaggagtggaatgggatgatgggcgagctgctcagcgggcaggcagacatgatcgtggcgccgctaaccataaacaacgagcgcgcgcagtacatcgagttttccaagcccttcaagtaccagggcctgactattctggtcaagaaggtgggcaggggccgggtggcggggtggcggcggggggagtccctggagggcccgggccgcgctgacctcgcgtccctccgcaggagattccccggagcacgctggactcgttcatgcagccgttccagagcacactgtggctgctggtggggctgtcggtgcacgtggtggccgtgatgctgtacctgctggaccgcttcag

SEQ ID NO: 18096 - DNA, 821 bp, Artificial sequence
  DNA replication origin
cctgggcaccaggcctcggagggtggcctgccctacctgcaggttcttccgccacacgttaacggcggcaaaggccagctgcatctgcttccggcgagcatccttgtgccgcttgtaggcaatctcgatgaaaatcaggaagatcccggccacgatgcccccagctaccagcatgaagacccctgtgtgccgggacccagagcctcagttgctggccagggaggccgcagcccacggagaacccacccgagaatggatgaaggagaacgcaccggccatgttctcaaaagtaagggtcgcaggggcgttgctgcgcgagtcacattcctgataccgaacccacgtcttgtccaggtcttccatgaagccattctcgtgggacctggcggtgggaacaagtgagcctgcagtgaggcggggcccaggacgggaaggagcaagctgggggcggggccggggcggggcctgcggggtagggtgcggcgtggagtgggcagcgcccggcctgggtgggaaatcagtggtggcctcggagtggtctggcactggggagggcgtccacctctggcggagaggggcggaggagggacgcgggcgcacggacactcacttgaggatggacagggagacgttctgcttccaggggctgtctttgcgcatgcctatgccgaagcccgagcggaaaaacagctctccagtcgtcaccaggtcgcacttctgcgaggcctcgaactccagcaccgccgagtcccagatgaaggcatgcagcttgctgccggcagaggcggagtcacgggggccttggtcctgccagcctggaa

SEQ ID NO: 18097 - DNA, 897 bp, Artificial sequence
  DNA replication origin
aaattctcatggatacaacctgggcaccaggcaggaccggacctggcccaattcggattagagtcacggagcacaaggacatagcaggaaaggggggggtctccgaagggtgtcaaggggcttgggtcggcggagggcaaaatgcatcttggactcacgtgccatacacaggcgggcccctgtcttaccctgcctgattgccttcctatggaatgggtaccggcgggcgactctggagacagaggggccaggcggaggcttggagcagggtgcgtggcctccctcggccccggctttgcagtgggcagccacctgcaggcagccccccaccggtgctgcccccgtgccctgggagcactcaccactgcccctggccatggctcctagctccagtcctgcccaccagagccagagccagtgccacggccttcggggatggaggagggccgtggccaggccgggccctgggcaccaggcctcggagggtggcctgccctacctgcaggttcttccgccacacgttaacggcggcaaaggccagctgcatctgcttccggcgagcatccttgtgccgcttgtaggcaatctcgatgaaaatcaggaagatcccggccacgatgcccccagctaccagcatgaagacccctgtgtgccgggacccagagcctcagttgctggccagggaggccgcagcccacggagaacccacccgagaatggatgaaggagaacgcaccggccatgttctcaaaagtaagggtcgcaggggcgttgctgcgcgagtcacattcctgataccgaacccacgtcttgtccaggtcttccatgaagccattctcgtgggacctggcggtgggaacaagtgagcctgcagtgaggcggggcccaggacgggaag

SEQ ID NO: 18098 - DNA, 1193 bp, Artificial sequence
  DNA replication origin
gggcctggggtgcctctagcaaggctgggttcgctctgggggcctctggtccgagtgtgcatatccgctacagggacaagctgccccgagcaggaggtgggggattctgggctccaaagggcagaaggcctggctctttggggtgggccttgtggggttgctggggtcaggagctgaggtggtcgtttcccttccagaggcctccctgtctgggaacctcagtgtcgtcctgggctctgcaggccagggcttgtggggccgcccctacccattctcagaccctctgggagctgccgccacacctcctgcagggcccccgctcagcctggggtgggagccaccccttttggtcccaccccactccctgcctgacagtcccctgtggccggggccagttccaactccaggccccagccgtccacccagacggacccaggcccggcccccagcccccggcccacacagagaccacatgaagatgcaacacgcatggctctggtgagacaggtgagacaggtgtctggggggcggggccagtggccagacagacggacgggatgggacatcacagccaccccctccagggccgtcgcaggggcgaagtgagggcggcgggcccctctgggagaggcgagagaaacggggacataacagagaagtggtgtggcctcccggcagctgaggagtccaggatggggccacgctgggctcccagggccccagacctggccccgagaggtggtgtggctgactgactgaccaacgagatgacaggcttcaagatggcgtgtgggtcatggcaggggaggtgggcgggcagactaacggagacacacggggaaagccgaggacccaggagggccggggagaaaggtccagagagtgagagagagcagcatgggcgggctgggcagagcggccgccacagggagacaggggcagagtgggccacaggagcccagggtccggggcggggtgatggggcgggagacacacgcagggcagggcaggtggagtcggacgcgggactggggtgctctcccccttaccgtgtctttggaggacctacgcctcttgaagctggaagccagggtggaggtgatagccctaaatgtggctttctttttagggtcaggctctgctctaccactctttctatcctaaaatgaatatgtataagtgattagatggct

SEQ ID NO: 18099 - DNA, 2159 bp, Artificial sequence
  DNA replication origin
gccgctctgcccagcccgcccatgctgctctctctcactctctggacctttctccccggccctcctgggtcctcggctttccccgtgtgtctccgttagtctgcccgcccacctcccctgccatgacccacacgccatcttgaagcctgtcatctcgttggtcagtcagtcagccacaccacctctcggggccaggtctggggccctgggagcccagcgtggccccatcctggactcctcagctgccgggaggccacaccacttctctgttatgtccccgtttctctcgcctctcccagaggggcccgccgccctcacttcgcccctgcgacggccctggagggggtggctgtgatgtcccatcccgtccgtctgtctggccactggccccgccccccagacacctgtctcacctgtctcaccagagccatgcgtgttgcatcttcatgtggtctctgtgtgggccgggggctgggggccgggcctgggtccgtctgggtggacggctggggcctggagttggaactggccccggccacaggggactgtcaggcagggagtggggtgggaccaaaaggggtggctcccaccccaggctgagcgggggccctgcaggaggtgtggcggcagctcccagagggtctgagaatgggtaggggcggccccacaagccctggcctgcagagcccaggacgacactgaggttcccagacagggaggcctctggaagggaaacgaccacctcagctcctgaccccagcaaccccacaaggcccaccccaaagagccaggccttctgccctttggagcccagaatcccccacctcctgctcggggcagcttgtccctgtagcggatatgcacactcggaccagaggcccccagagcgaacccagccttgctagaggcaccccaggcccaggcaccatggtggggaggggctgcccagagaggcagcggagacctcagccccgtggccaccctgcagtccagggaccagtctggcccacaggaagcccccagcccataagcagcatcaccagagagaagcttacgcccgggggaggaagtgcgatttgcagccacctgcccctcagtgcactggaagcggggcagacctccagggcacagacaggacttggcatcaagcaagccaaatcccgagatgaagccaccagggtgccccaagagggacccatgaggcctggctgctcagcttcctggggaagggacttggcatgcaggatgggtggacagtgagagcctgtaggcctgggggccactggaggctcaaggagcaggtggaagcaccattcctggagccacctctgctgcggaaagcgggcagagctgatgctgcaaagtctgagccaggagtcccgcagggaacagggagggggaatagcgcagggatcgtgggctgggcaggctggggaagagggggtgtccaggcagacaggagaaacagcgatttggggcaggcagccacggggggcaagcacaaatgtcgtgcaggtgatgggccactttcagagggtgacactgggtcccagggccctgcctggagcgaggccaggtgcagctcagagaccctcatggtgccctcccagggacatgttcccagcggaaccctcacccgagcctctctgggcaccagggaccgtcctctggggccagttctggcatcacgtggcatctggggctggccccgccctgcaaggctgaactgtggggggcactgccagctgggggtctgggcaggggagggcagcccagctcccacctggtctctggggctgcgagcttattcagagggaggcgtgggtggggggctcctttgggtagggtggggtcagtccggctgcggagatcccctgcccctgtcctgtggccggtccgggccagggcggcactgggcgctgagggctggggtccctggcggccggcggggccagcgggtattgattgttggttcttatttatagagcaccgggggtggacgcggcgctttgcaaaaccaaaaagacacagtgctgccgcgacgcgctattgagagggaggagggccagctgcagctgtgttcccgtcatagggagagctgagactccccgcccgccctcctctgccccctcccccgcagacagacagacagacggacg

SEQ ID NO: 18100 - DNA, 913 bp, Artificial sequence
  DNA replication origin
ccgagaccgccagacccgaaccccgatcccgacccccacggctgtgcctcgcccgcggacccggggagccccgccgctgccgcccaagcctgagcggccgcggccgcctggagcgctcgaagcttcccccatgcctttgccctccctttacactgtctgccggcgtcaacaagcgacacagaccgaaaactgcgtgacattcctttaggcatcaccactgcatacaccgggaggtgggggttgggcggtgcgcgcctgcaccctggggacggaggggcagagcgcggctgcgcacgggccgcacggggaaggcacgcgctcgggccctgggagtgctggttctgtacaaggtggcgggccggtcacgcacccggagcgagggcgggggcgggcgggtggcgctctcccgtgcccaaggtgcagggcagggttgaagacagtcccgagccagcgtccggggacccccggggaggcccgttctgggctgcaggccggacgaggagaggaggggctcagccctctcgagtctggaggaggcggcccgaggcggcgggaggcgctgccagctgggaagtcagggacggccgtgggggagggcagggccagccccggcgtgtggggtcaaggggcagacggggtgtgggtgggcggtgccgcaagaagaggggagggtggagctcaggctgcagaggagcgcaggcgcccgaggaggggcgacccagccagctggggccatgggccccactgtggctcaggctggtgctgcgggaaggatggggctgccgtctctgctccaagcccctccgcctggggccagttagcccccgctccccactgctcagagaccccagggccctgcctctgccggagcgccctgcggccctgcccagccgactcagctctgccccgtcct

SEQ ID NO: 18101 - DNA, 2356 bp, Artificial sequence
  DNA replication origin
ggcgagcggatcacaaggtcaggagatcgagaccatcctggctaacacggtgaaaccactgaaggactgcccgtaagaccaggccagccccactgctgcctctgcctcagagctggcctgagctggctgggctctcaggcctctgcccaccctacctgtcccattcccagagctgcttggccatggctccttgaattgcggtgcccaagggcaaatgacacactggcattgtgagcccccccacccccacctcacagtcctactgtgaagtcagcaccttccaacagttccgtcagaggtgtgcagtggggccagggctggacatggcccccggtccctggcctgtgtcctgcctgcgtggtggccccttgggcctcacatatttgtcccttctgctcatccctgctgcaggtgcctcctcctgcccccgcactccactcccagccatggctccccttccccaggcaaggtgggagctctggtgtccttctggtggctaccagggcaggggcagacttgggggccctctgcaggcaggtgaccggcccatggccatgtggccctgtctctgcagctggaacctactgtgaatgcagccttggcctcagccgcgaggccctcatcgccctccttgtggtgctggcgggcatcagtgccagctgcttctgtgccctcgtcatcgtggcaattggtgtcttgcgggccaaggggtgcgtgaaccctggggccgggagaggatgggagtgaggccaggctggctgccctgggcccttggtcttgcaagaagggctttaccccctgggtgggctgtcacctggggtaggaatggcgtttcctaggcgtgtgctgggggagctccgggggcccagcactgttccaggactcatgttggccttcgtcccctcagtgaaacatgcccgagacaagtggacaacaggtgagcaccagggaggccctcgagggaggcacgctgtctcaggggaggcccttggcggggggagctatcccaggggagtccctggaggaggaggggtgctgtccctggaggaggaggggtgctgtccctggaagaggaggtgtgctgtcccaagggaggccctttgtgggggtgcactgtcccagacgccagcctgtcctgggggaacaaggactctaccagctcgtgatgacccggcccgtcatgcaggttggtggagaattttggggtccaggaagatctcatggacctgcacccggtttacgtggagtcccagctaatggacgctgacctggaggtctccctggtgccaccactagaggatcagagccttgtggccatccccatggaggcttcttcagaggagccgccaccacccccgcccctaccacctgagtagagggctgagggcagctgggggaggggaattaaagcgtatttagtggctgtgcactgtcctccctgcaggccctcctgagggcagctgggggaggggaattaaagcttgtttagtggttgtgcaccgtcctccctgcaggccctcacacccctcacggctgcatcatggggggtgcacgcgcatatgggtctcatcaaagcagagtgcccaggccccacagcaagttcccctgttcctctgccccctggcagtaagccatacccctaatgtttccaccttctctgccacagctggtcagcccggctccttcctgcacccagctttggaaagcccctagaacaggacctgcaactggcaactgtgaagggcgctgggtttaacagcaggacttgggctgatacccctgccccactgcactggtctgtacctctatcccaggagagtcctgggggggaggggtggggcaggcacgcctctcctgcctcgggtgtgctgtctccctccaccccaaggcctgtctccaacccaggccctatccagcatgggaatgggaccatccctgcgtgggggccactccgcatgtgcacgttgggatcactttgcggagcctgggtggggtcgagacgggtgaggagcaggacctctgggttgcattgcgtgtgggcgcctgttgcagccgtgagctgggcgggtgcaggtgggcggtgtcctgctgctcaggtcagggctcggcgggcgcccggtggtggacaaggcggggtgaggtggtcttgatagcgctgtggccggcgctgagccaagagtagtttggagctcccggacaggtggctggcggtgccgggcgttggctgtttgccctgcccccgccccaagcgtggatccagccgtgggacaggaactgcctgagctcgggccagagagttaatatttgtgcaggcgccgcaggaacgggctccgcggacgacgggctccagggacgc

SEQ ID NO: 18102 - DNA, 1901 bp, Artificial sequence
  DNA replication origin
agggtctggctcacgccctggcaaagctcaggtcagaagggctgccggcacccaagggaatcccccatcaacttggaaaggtctgggggacactggccacccctgtctgagcaggaccccaagccctgcctcccagacatcccccaaggctccagactaaaggtgtcactgaagttggagcccccaggagctttcccctctgcagaaaagacaagcgttgcccaaggaagtcgaccgcaggccggcatggccagggttgctttcagcctcctccctgcacctgctattccaggctgggagagaggcccctgccctcccagcctcccctcctctggacctgccaagcaaaccgccaggcagcaaaaggaaacacctgccccacagccaacggaggccaggccttctgccagctcaggacacatgggacacggggggtggggggggtgggcacagtctggccccagtggccctgggcaccagggaccccctcgcctgttgacaggcaccctcctgctggggtcctccgacctctgacttgccgagtgacaccgtgacccgagatgcacccttcgcccttgtcttcaggacacaaccagagatggaatccacaggacacagaacaaaaggtgtaccagagccaggctggcagtgacactcgacaggccagcccagcaggtttgtatcctggttaggacaatggcacacccagcctggggccaggtggtggccacagacagcgggatccaggcaaggccaccttgctctgagggggcatcagagcaatcgggaccatcccaccagaattcaggagaggggtccctctttttgtgacagcagcacagacagccttggagtgaagtggagcaggtggcagggcccagggctagaggggagataccgcacaggcggaagcagccctccttggcggggcagaggcctgatgggcacaggctgtgcatctggcgcctgcctaatcccggccacttcctccttcaagccctgaggcaaacaagagttctccagagcaaggagggtgcaggaatgtccactgaacgggacggctcaaacaggccagagctggagaggtgggagggtgctgggcggcagctgcaggaacccacgacaatggacatgggaccagcaagggcatcaggccagagctggagaggtgggagggtgctgggcggcggctgcaggagcccaggaccgtggacatgtgggaaccagcaagggcatctggggacagcggtgggagcactgaaaccaggcgcagctcacagcctgggaaggcgctgcagcaggagcgggactcgaggcaccagttcaaagggcctttgtcccccgcgaggacggcgccatcggggtggaacgtgtctggcctggaaacggcacctctgggacagaggcccaggtttgagcagcagaagagcccagaactggaccctagggcccttgctcagttttgtggcgtctccctctcctagtgccagcctctaggacaggacctgggcagcctgcacacgcgtgaccacacgtgtgaaggacgtaggggcgacctgcctttctgaggcacacctgtgaagctgagccctccggccaccctgcctgagtgtggagcaggggacaagtgcccagtccctctggccaccagggcacagccttcggcagagcctcactgccagagacgaggcgtgttggcctagaggtcattcgccagcctcagcaattccaaccgaacccgcacaacgtcccaacctcgcccgagacctcctggccgagcgtgtggaggtgggcacaggctgagcagagggtgaccccagggctccttctaaaggccagaggcgcaggaatggagctggaggtctggcgggtagcaagcactaagccctaggacgtggctg

SEQ ID NO: 18103 - DNA, 932 bp, Artificial sequence
  DNA replication origin
tggccgagcgtgtggaggtgggcacaggctgagcagagggtgaccccagggctccttctaaaggccagaggcgcaggaatggagctggaggtctggcgggtagcaagcactaagccctaggacgtggctgcctgagccgtggcccgggcgtgacgtggaccttcacgtgccgctccctgagcaccctgggtcgggggcggcccgggattctctcaggaggctacattcccagtgcagatgtgtaggcctaggtggcccctcacctgctgctgaggagcaggccctgccaggctgagagagaggcccaggctagaggaggatcctggggggccccacaaagccaccaggacagaaaaggatgatctgacttgctttaatctgcacactgcgggggtgggggtgggcatgctcctcagcagtgcattctgggacacgggcgggcgggggctggcacgggaggacgagagcacctgcagggcagcgcctggcgggcgggcgggcgggcgggcgatgtgtcagctgcagttcttgggcaggcggtagacgccggccgagtagacgagctgctggtcccgcaccttcttctgcaggtagccctgcagctcctgcaggtcaatctcggccagtgcaggcccagtcaccacaaacatgcggagcatgttgtagatacgatccagtgagaggctctccaggttggtcagcatggcctggatgtacgtccagaagagctgcggacacaggccagcccccgtcaggcacctgcaggcctcgcccccgccccctggccccccgtggggcctgcacgcgcaccagcagctcctcctccttctggtcggcctgggaggccatgccggagtcgctctcgtcgtcactgtcaatgagcaccatgttgtcccggtcctgaggccgctcctcctcaatgacagagaagg

SEQ ID NO: 18104 - DNA, 1707 bp, Artificial sequence
  DNA replication origin
cgggcatcttcaccgccttgctcagttcctccagggtccagctggctgcgtgcagagtcaccgggacgctgggcagcctgggcacgggctgcacctcccctgcctcccgtcagccgagaggtcggggggctcccgggccaccctgccttgcccgtgggaaagggaagggtgccgcctgctggcgcagctgccccaaaccacaccctcactggggaacagcccctcacccacagctgggccgtgtggccggggcaggccagctaggggctggtgggctcaccttggtcctgaaaatacagcaagatcaccgcctgtactggggtgaccgccacagacagcgtgcggtcggccagctccacgtccatggtcaccaggcccagggtgtgcttccaactgagggtccgcatggcctaaggagggccagggtcagcacgggcagctcggctgcagggcgctcaggcccgtgggctctgccacctggtaccagtgagaaaggggctcccagagccacctgccccaccccaccctggcaggcaggtgagcagcgagagcacaggactgggtggggtccccacctgctcagccaccatggaagggcaatggggccagcatcataaggtgtgtcccgaaaaggctacaggggcctcctgacccccagtgcttggaaatgtggccatatttgcaaacagggttgatgcagatgtaactgaggtgcatcctaacccaactgactggggtccttctaagaaaaggaaagataggaagacacaggcaggcggggagggggccacacgaagacagagaccacctggagcaacgcggccacaagccaagaaacaccaagggctgtggcaaacaccagaagctggggggcaacggaggtctctaagagggttcagagggaacggggctgccagtactttcatcttggacttccagcctccaaaactaagacaatctatttctgttttttaagccacccagtttgtgacactttgttacagcagccacagtaaacgaacagattttggtaccaggaagggccaggaggggtgctgccaaaacctaacaccaagaactgtggcagcagctttggaagtgggtgatggggagaggctggaagaactggtgaggcctgcacgactgctggtagaaaggcatgaagacaagcctggaaatggctggaagaggagagctgccgccgtcttggagaatgcacacagcatcacagactggatgtcggcagcaatgccgacccaacaggtgcttccagtgaggtctcagatggaaatgaccgtgctactgggaaccggaggaggcagcagagagcttggctggctgctgctctgctgttgggtgcgaagtgggacctgcagctgatgagcctggacatcaagctgagatttccaagcagtgtggaaggtgccacctggcttctccttgctacttatagcagaatgcaagagggaaacaatcagtgaggcagggaccattaagcaaaaaggcaccagcccttggggatctgaaaaatactctatccaggcagctctgagacgtggccaagggtgtggctggaccagggtttgctagacatgaggtgtgacctgtgtatccaactaaccatctcagcagcagacagggacaggtggggcctccgggaaagggctgcggacccgcctgtctgaaggcttcggcactggtgagctg

SEQ ID NO: 18105 - DNA, 1257 bp, Artificial sequence
  DNA replication origin
cagcacacagcacctggatgcaggagccgagtctccagggcagccttgagggacacgagcagctgctgcctctggtccgtcctctccaggcagtacttgaggtcctcgatggctggccgggagtctgggaagtctacaagaagaagaacatccctcagggacagacatggatgcgtgcgcacgtgcaggctggtgcagagtgtgtgcggtgtgggaaaggacacgtgcttgccagccccaggacgatgatgagaccacctgctaggcaccagacatccccccgacactctggcgtgctgatgcatttgaccacaatgccacagggtggacagagcaacacccaggggccagtccccagcaggagccaaggccaaggcagcacagcagtggacacccagaagcactgtccagcatctgccacacctgccctgatccaggcacgggggacgccgcagtggggacagtcccagcactgcccggtgcacccccctgcaagagcgacagcgaaggcacagggagccccagacgtggacacagggagcccagatgcagacacagagccgacatggcgaaggccctgggagccccagatgcagacacagagcagacacggcgaaggcacagggagcccagacgcagacacaaggagcccagacacagacacagagcagacacgacgaaggccctgggagccccagatgcagacaaagagcagacacggtgaaggcacggggagcccagacgcagacacagggagcccagacgcagacacagagcagacacggtgaaggcacagggagcccaagacgcagacacagagcagacacggcgaaggcacagggagcccagatgcagacacagagcagacacagcgaaggccctgggagccccagacgcagacacagggagcccagacgcagacagagcagacacggcgaaggccctgggagccccagacgcagacagagcagacacggtgaaggcacagggagcccagacgcagacacagggagcccagacgcagacacagagcagacacggcgaaggcacagggagcccaagacgcagacacagggagcccagacgcagacacagagcagacacggcaaaggccctgggagccccagacgcagacacagagcagacacggtgaaggcacagggagcccagatgcagacacagaggagacacggggaaggccctgggaagactccccagacgggagagcggaccccagggccggggcaggaccacctc

SEQ ID NO: 18106 - DNA, 1093 bp, Artificial sequence
  DNA replication origin
ccgttgccggggcgagtacgagcgctccttcctgcgtgagttccacaaggtgaggacccctcccttgggctgtgccccgctggagacaggggagtaggtttctggcaaacctgacacctggcttcagaagcatccagagcacggaggcctgggtgggcccagaccgggtggtggctggagctgtcttgatgtggggtagagaccagtacttctgggccctggtgatagcgaggacgcatctgaggtgcgctcttcggatctgcgcagaatcccatggctgcaggcggtatcgggccaggatcccgagggggctacctcaggcaggtgtggcgaagctgggcccaccagaggagccactgaatggatccccttctcctgtttgctgccctacttgagtgtggactcgcttggccggtccctaatggactgacctacagccagcctgcaccacagcggggagcgagacaccctcacatggggcctccaggcacctgtgctgttggggtgtggtctggggctctgctctgggctcccggagccataggggagctgggcccagccatgtgggtccccccatcctgttcccatgtgtcacctgtcctttcctcagtgtttcagagtccccctactgaggtgcagattggctgtgatgttgggttttcaaagagggagggtgtccccaaagcggtgggcaagagtgggtagtagggtggagagggtgaacatccgtgcggtcttgccactgggtagcaggtctgtggggcatgagcacgcctgggccccgcggcggaattgccacctagaggtttgtgctcgcctgggccccccggctggtctcaagggcgtgtttatccatttaagtgggggcaagtgtgcccaccaggcacagcgcacaggtcgtgtgtgtctgtcatgtctcacgctagggttgctgctgccagtgataagtgtgggcactggcgcgtgtgagaggcacgaagactgcaggggggccgggacgtcgccttttgggccatcacccaccctgcaggttttgatgtgctccagcctccagacgcaggtggccttcgggctcccctcggtcccggccgac

SEQ ID NO: 18107 - DNA, 1562 bp, Artificial sequence
  DNA replication origin
cccgaggaagccagagtcaggcaccacccccgagcgcccggcgcggggcctgcgagccagcgagggctcgggccacggacacccggcctccggcacggagggctctgctcagccgcgcgatgcccgcagcgaggcgggtccaggggcaccccgctgcgagccgggaacccggccctgcggccctcccgacctccccgtcccggctgcgccgctcacacttgaccagctcgttgttgtagttctgcagcgccgcgccctgctgggtcatggtcaacgccgcccggggccccaccaccccaaccgccgcggaagcagcgctgtccgcgcctgcgcacgactcccccacggcgcgccgaactagcgcgtcatcgctgagcgccttgtgcgcgtcatggctgcgcgtgcagacgtgcgtcatcgccgcgcgccgcgccgagcgaatctcggagtcggtgggtgcagatggcggcggcagttgtggtggcggagggggacagcgactcccggcccggacaggagttgttagtggcctggaacaccgtgagcaccggcctggtgccgccggctgcgctggggctggtgaggcctgggaagagaggggcggccccgcgcggagtttccgggaccgtacgcgctttggggccgctaccctcgggttcatacggctctgtccatcatccgcctctgtcctgtcctgccattttccaccacctttccgtttcgtttcgttcagctccgctgacagcccttccatagcttcggcccaacgtccgggcagcacggacagggggcagcggagtttttgcagcctccccctcagcttcttcccttccccgcctctccccacctctatgttgtgttcccctcgcctcacggttttctgcaccccaggtgtcttcccggaccagcggtgcagtcccgccaaaggaagaggagctccgggcggcggtggaggttctgaggggccacgggctacactcggtcctggaggagtggttcgtggaggtgctgcagaacgatctgcaggccaacatctcccctgagttctggaatgccatctcccaatgcgagaactctgcggatgagccccagtgccttttgctactccttgacgcttttggcctgctggagagccgcctggatccctacctgcgtagcctagagctgctggagaaatggactcgcctgggcttgctgatgggcactggtgctcaggggctgcgagaagaagtccacactatgttgcgcggagtcttgttctttagcacccccagaaccttccaagagatgatccagcgtctgtatgggtgcttcttgagagtctatatgcagagtaagaggaagggggaagggggcacagacccggaactggaaggggagctggacagccggtatgcccgtcgccggtactaccggctcctgcagagcccgctgtgtgcagggtgcagcagtgacaagcaacagtgctggtgtcgccaggctctggagcagttccatcagctcagccaggtcttgtgagtagtctgtcccgatggccatgcccttgctccttctggttcccc

SEQ ID NO: 18108 - DNA, 1775 bp, Artificial sequence
  DNA replication origin
tcgctcggcgcggcgcgcggcgatgacgcacgtctgcacgcgcagccatgacgcgcacaaggcgctcagcgatgacgcgctagttcggcgcgccgtgggggagtcgtgcgcaggcgcggacagcgctgcttccgcggcggttggggtggtggggccccgggcggcgttgaccatgacccagcagggcgcggcgctgcagaactacaacaacgagctggtcaagtgtgagcggcgcagccgggacggggaggtcgggagggccgcagggccgggttcccggctcgcagcggggtgcccctggacccgcctcgctgcgggcatcgcgcggctgagcagagccctccgtgccggaggccgggtgtccgtggcccgagccctcgctggctcgcaggccccgcgccgggcgctcgggggtggtgcctgactctggcttcctcgggtggaaggaggcccgccctccgccgccgcgctcctgccctgggcccacagcgccgcccctcccggcccccaggcatagaggagctgtgccagaagcgggaggagctgtgccggcagatccaggaggaggaggacgagaagcagcggctgcagaatgaggtgaggcagctgacagagaagctggcccgcgtcaacgagaacctggcacgcaagattgcctctcgcaacgagttcgaccggaccatcgcggagacggaggccgcctacctcaaggtggagctcgggaggccaggccgagcatcaggggataggcacggcaggggtgttgccacggcaaggcgtcaggaccggctggggctcccggctgtgggcagtctgtgcctcgctggcatttcgggcaggggcagcgtggccaggcccattgaggaacccaggctgctgtgggagtgactgtggggctgtctgtggggcctggggcatcctgggtcctggtctttatccggttctcgctagccatgtggttatttctgctcagtgtgaagagccaggtcttgggcagagcacccagcacgggccagtgctaacccagcctggctttgagggtggagaggaagtgttttgggtcagattccggagggaagagggccctgccaccccgtctgccagtccccttgggcttccgccttcccccacacaggatcccttggctacagcacccccagccaggtcccagcacctgagtgtgaggacagctggggcttaggaccttaccaacaggtgaacattaacaaccttctcacttctctggccccagatcctggagagctcccagactttgctcagcgttctcaagagggaagctgggaacctgaccaaggctacagccccagaccagaaaagtagcggcggcagggacagctgaccagaccacgggcagggcctgcctccgtgtgcccctcagctcagccccagcaagtgtgtgctcagagcatctttgttcttcacggcagcagctaccttccctcactgtctcaggtgccgagaggggcaggtgccagcctccactggcatcagtgacaagcccagggcacagcccacccgggggtcctcgcttcatgctcacacaggctatggggatggtgggctccaggtcagctctgcaaggggcttgtctctgtggcacccacactcctgccctgccagggaggctctggttgtctgagcaccatgggggccccctcaccttgtccctcctcagccagcagaggcccagggcaagggacaggaggacaggggttctccttcaccacagaacccaaacctcaggtctcacccct

SEQ ID NO: 18109 - DNA, 1212 bp, Artificial sequence
  DNA replication origin
tgtgtccacgtctgcatgtgcacctccattcacaggcctgtccagctacaccccgaagcactctgtggccttcagcaagtggcaggagcaggcgctggagcaggccccgagggaggcagagcccccgcccgtggaggccatggtgagatgcgggggagtggagcgctggggggagtctgacacccgggcgagcccatgtgtccacattctgtcctctcactttcagctcacacccgccagtcagaatgacctctcggacttccgcagcgagccagccctgtatttctgagcccagcactgccaggaccaaggctgagcccagctgtgggagtcccggaagctgggcagtagccagggactactgcacccgcttctgccttgtttggcctcactgtatcccacccacccctcctggccctggaagcagctagggtgcctcctgccatcggggccaggtctgggtctcactccccggccctgatttgggagggtccaagggggaagtggggtggggaactgcctgtgggtgagtgccaggggcctgctgggtggtggccatctgcgacccggcagggggctgtgcagattctgcacctggccattccctgtcctgtctcctcagcctgcctcacagtggccatggggtgtcggggtgaagggctgtcccagctacttgtcctctgcaggaccctaagcccctgcccgcagcccacatgccctctgtgatgagtggcgtctttcctgcctctgatgatggactcaataaacagcactggacaaggctgctggtgtccccactgcgtggtccttggctgagaagggagcagggggaggtctctgcaggaagaggccacatggggtccagtgggccccagtttgcacgtctatgccagggtgtgtgggaggtgaccccgatctggtacccccactccttgatgtcccagtggccaaggctctgacctcccaacttccatggcctgttaacctgttgcccctccaccccagcctcccagagctggcactgtgggaggtaggatgacaggcctgctgtcaggggcctagacttcaggtgggagggtgagagtgttgcagctgttgggcctgaagtggcttctctgaggggcccagagcctggggagggaccaagggaagggcagcatgagggcagcacaggggacggtgtcttctgctgggcttggcgtgccccccgac

SEQ ID NO: 18110 - DNA, 1008 bp, Artificial sequence
  DNA replication origin
gaggcttctggggacccagaggctttgggctcctggtcctggtcagcgtttggtccctggctggaatggggaggggaggttgacccccagggtggagggatggacgcctgcagggtccagctggagagctctgtgccccctcctggagcccccggaacggttgatggtgtgtctggcgccccacttgggtcagcctcatcctgagggctgaacctgagcccctggcatcactgtgcccatgtgggccctcagccctcgttcacgtgactctcactcccagatgaagatctccttcaacgacaaaagcctgcagaccacatttgagtacccttccgagagctccctagagcaggaggaagaggtggaccagcaggaggaggaggaggaggaggaggaggaagaggaagaggaggaagagggatccggctcagaggagaagccctttgcactcttcctgccccgggccacgtttgtgagcagcgtgagacccgagagctctcggctgccagagggtagctcaggtgagtgcccacctgggggacaggcagcctgggaggggtggagcctggtctgtgtccacgtctgcatgtgcacctccattcacaggcctgtccagctacaccccgaagcactctgtggccttcagcaagtggcaggagcaggcgctggagcaggccccgagggaggcagagcccccgcccgtggaggccatggtgagatgcgggggagtggagcgctggggggagtctgacacccgggcgagcccatgtgtccacattctgtcctctcactttcagctcacacccgccagtcagaatgacctctcggacttccgcagcgagccagccctgtatttctgagcccagcactgccaggaccaaggctgagcccagctgtgggagtcccggaagctgggcagtagccagggactactgcacccgcttctgccttgtttggcctcactgtatcccacccacccctcctggccctggaagcagctagggtgcc

SEQ ID NO: 18111 - DNA, 1021 bp, Artificial sequence
  DNA replication origin
cagccaacagagcaggcaggtgggtcccagctcagcccagcctcccagcagagcctcccggcttctcaggacccttctgttctcgctccacccaccctgcctgtgcacacctagctttggttaccaaagggcctggcctccacctgggacaaagggccaagcagccagccccaacctgcccagatggaggtgtgagctgagcccagccccgcctctccctcctccctgcacacagctacctgcctcccatcccccacgcagccccagccaaggctcccacgggtggccggaccctagaccaggctgcacgagtgcaatgcccagagcaggctcccgggaagctgggtgctccctgagtcaagtgtggccccagcgccaggcacggcctccacccatgagaaagctgagggaggagcgtccaggccgctcctggggttcccggcttcagaaggaccacctaggcggcacctatgggaagagctggcggagagacgagaaggaaaggaaaactgacaagaagggactcagccaacaacagtgagagcctctggccacccaggatctgcctgcacaggggtagaggcagggaggagcccagcctggggcttggtgctggccaggaggtggtgtcagtaggaagggcagatgtcagggtggctcttgggtctaaggatcagagagcgaggccttgggagtggaggcggaagttgcacagcaggtgagggcggacggccctgggtgtccaggactgagccctggggacactgacacgctccagctgggcagagagccaagaggggaggaggggagtagggcagaggggacgggaaggggccgccagacaggtaggagccaggccaggtggtgctccacgaagaggaaaagctacagcgccgagtctcaagggaggcaggtgtgaggatgagaatgggtgtcccaccctccaggaaagcagcccgggcgtggctgcagcacacagcagtctgctccaagctcagccctgcaagacggggcacctgcc

SEQ ID NO: 18112 - DNA, 1499 bp, Artificial sequence
  DNA replication origin
agaaggcacactggttgggagctgggcaggagtgccgtgtatgcctgttctgggcctgggaagcttgctggggagaaggggccttcggaggctctgagccagccaggcaggggagtctccctcttggccagtggcctggaatcctctgggcacaggaaaaaaaatcttcagattctttctggtaattcctgcacctgtatttgttccctggggcaaattccaagggcagctccatgtgacttcccggtctgcggtgacctgtcaggaagcaggtgtacctttcctggggactgagggggggcgcctggggcgcctcccttgggtcttcctatccaggcactgccccagagccattgctggctaggctcacccctgaggcgggctgtcctccagcctcagtttccccaggctggggatgggaccttgcaggctccctcagcagataggctgctgcctccctctgtttgcttcctgcccgggattggccttggcattgcgcctctccctgtgccatactcccctcctggaaccagggcgttggtgcccctgccggctctatctgccggcccaggcatccgtgctaaccctcctgaggtgcttccagtgggggcttggggctgggtccagggcccctcccactcctggagccacgtgggtctatctccccgaccctcgcccgagcatcaccccagcccatcaaggtggggtcagtctgatagccacagcctctctcctccagctcctgtctgcctctccctcccctgcgtctgtacctttggccctggctgctgtgtgaggtgggcacctcctgggcttgccccagaggtggcagtggggacagctccccctttgtagagagaaactgcgcctcagcttgggagtcagacggggtcatggggcttgtggggcgagtacggagttcaggtttctgtttctagaacccctccccttaacctgtgtggccatccctgggagcctggcttcttcctgggacttgaggccactgcctagagtctggccatcttgccctcagaagggacagaactgggctgggcgcggtggctcacaccttgtaatcccagcactttgggaggccgaggcgggtggatcacgaggtcaggagttcaagacaagccttgccaaggtggtgaaaccccgtctctactaagaagatataaaaaaattagctgggcgtggtggcgggcgcctataatcccagctattcaggagactgaggcaggagaattgcttgaacccgggaggcggagcttgcagtgagccgagatcgcgccattgcactccagcctgggcgacagagtgagactctgtctcaaaaagaaaaaagcaaagaagggacagaactgtgggggtcatttgcggctgggttagggtcagaagggcagggtgggggccggagggccaacaggagcaggaagatgcagtgggggagaggctgagcctgggaaacaggccctggaccagcaggagggaggagctcg

SEQ ID NO: 18113 - DNA, 2378 bp, Artificial sequence
  DNA replication origin
cggtaccgccgcgtgcctggcgtgcgcgccctccgcgccgacagcgtcctcatcatcgagacggtgcccggcttcccgcccgcgccgcccgccccgggggccgcgcagatccgcgccgccgaggtgctggtgtacggggcgccgcccggccgcgtcagccgcctactggagaggttcgacccgcccgccgcgccgcgccgccgcgggagccccgagcgcgcccgccccccgccgccgccgccgccgcccgcgccgccccggcccccgcccgcggcccccagcccgcccgccgcgcccgggccccgcggtggcggggcgagccccggggcccggcgcagcgacttcctccagaagaccggcagcaactccttcaccgtccacccccggggtctgcaccgcggcgcgggcgcccgcctgctctccaacgggcactcggcccctgagccccgggccggccctgccaaccgcctcgcgggctccccgcctgggtcgggacagtggaagccaaaggtggagtcgggggatccctccctccacccgccccccagccccgggaccccgagtgccactccagcctcaccccctgccagtgccactcctagccagcgccagtgcgtctccgcagccaccagcaccaacgactccttcgagatacggccggcccccaagccagttatggagaccatccccttgggggacctccaggcccgggcgctggccagcctccgcgcaaactctcgaaattctttcatggtcatccccaagagcaaggcctccggggctcctcctcctgaggggaggcagtccgtggagctgccaaagggagacctgggcccggcctccccgagccaggagctcggatcccagccggtgcctggaggggatggtgcgcctgccctcgggaagagccccctggaggtcgaggcacagtgggcagtcgaggagggggcctgtcccaggacagccaccgccctcgctgaccgggctattaggtggcagaggccgtcctcaccgccccccttcctgccggctgcttcggaagaagctgagcctgctgagggcctcagggttcctggcttggccaagaatagccgggaatatgtgaggccggggctgcctgtcaccttcatcgatgaggtagactcggaggaggccccccaagcagccaaactaccctacctcccgcaccctgccaggcctctgcaccctgccaggcccgggtgcgtggcagagcttcagccccggggcagcaacaccttcacagtggtgcccaagaggaagccagggactctgcaggaccagcacttcagtcaggccaacagggagcctcggccacgggaggccgaggaggaggaggctagttgcctcctggggcccacgttgaagaagcgctaccccaccgtgcatgagatcgaggtgattggcggctacctggccctgcagaagtcctgcctcaccaaggctggctcctcaagaaagaaggtcagtggtgggggcagggccactggctggcagggagagagtgacagctcacagaactgtgggggcagcacctgccctgatcccaggacgcttggcctgggcaaaggatggtttctacatggacttgaggcgagctggggctgggtgggccgtgctgggtccagggccccagtggagccccctgacttgggccgtggggacagctggcctgctgtgtgccttgccaggctgctggagagcgacagggcagacagtgctatgtcccttgccagttgttgtggctcatctggaattagctgggcgggtctgtccctttgtgagtccagctgaaagaagcagacctgggcttgtgggttcctccctgggcttggctttgaggggtggcctcacatggtctcctggaggcccgctgcatgggcgccaggcgccacgctatgaatgggaagggccagatgatcggggttggctggatcctcgcatcacagtcagccttggggtgcagcccaccagccagttgggagagggccatcagctccccagaaggcacactggttgggagctgggcaggagtgccgtgtatgcctgttctgggcctgggaagcttgctggggagaaggggccttcggaggctctgagccagccaggcaggggagtctccctcttggccagtggcctggaatcctctgggcacaggaaaaaaaatcttcagattctttctggtaattcctgcacctgtatttgttccctggggcaaattccaagggcagctccatgtgacttcccggtctgcggtgacctgtcaggaagcaggtgtacctttcctggggactgagggggggcgcctggggcgcctcccttgggtcttcctatccaggcactgccccagagccattgct

SEQ ID NO: 18114 - DNA, 823 bp, Artificial sequence
  DNA replication origin
acgtggcagcagggtggaataatcagacacaggggtcggccctatggggcccaccgttaccctggctttttttttttttttttggctctgaatgcattggagagctctccaagcatgcagggccctgccctggtgaacctgcttgcgtgtggcgggagaggctgcttcctttgtgcctgctcctgcagatgctttttggggaccacggatggcaaggttgggttaagaggctcccacctgggcagcctataaaaactagggatttctgagaaactggttcgttggggctgctcggggctccagaattggcatttccaagccccgcaggcacctgccggaggtcggaggacccctggtgaaagcagggtccgggccagagtgtggcctgtgcaccgtccacggacacgggtgccttcggtcctggagcagcgcccttcctgcaccgcgctctcagcggacggaacaggcggcctcggtgctggcagcatgaggaagtcccaagctcagccaaggtcactcggggcgcagggtccaggggccgcgcacccggctacccccagggacgccgggagctgagagcgcagaggcggaagtggggtctgccagtgagcggcgcgaggcaccggggtgtgtccggggggccgtccccaatggaggccagctccggtgataggcgttgtccaatgaagtcccttgggaggcggggttgaggcgagtgttgtccaatcggtagggtcacttgaggggcccgccctcctcccctgccataggtgggcctcccgcacggggcggggagagcgggctttccccaatggtcggtggc

SEQ ID NO: 18115 - DNA, 1321 bp, Artificial sequence
  DNA replication origin
tagattttgtgttttgtgtgttcccctgttttattttggtagttcagaattgggcaaccctactagggtagaagtgatgaacatcagatgcttcctttagaaaggtgatttgaggagggccctaagggaggagacacttggcttctggaaagctgaaatgaaagtttattctggccaggcccagtggctcacgcctgtaatcccagcagtttgggaggccaaggcaggcagatcatgaggccaggagttcgagaccagcctggccaacatggcgaaatcccgtctctactaaaaatacaaaaattagccgggcgttgtggtgggcacctgtaaccccagctacttgggaggcgaaggcaggagaatcgcttgaatcctggaggcggaggttgtagtgagccgagatcgtgccactgcactccagcctgggtgacaagagcaagactctatctcaaaaaaaaaagaaaaagaaaaagtttattttctccagcttaatggagtggcaggagaataaggcaagcattaagctagcggctgctgcagactgtcatggggcacagaagctgagaagggcatccccaagttaaaaaaaaaaaatctgttctgcatcattgcagagacccaggcgaccttggtgtgggaaacagcagtgtctactgagcaggctgctgactgcagggcaggtgatggaaagaaggtgatgtccgtgcactccaattccccttctccccgtgactccaagcgatctccctattgtctgcaggcttgaaaggctgtggaagcactctgaagccctccctggggcagaagggacttgtcagccgggaggctgtgccctcagggtcatggtatccggagccttgatgaggggacgttcaaccgatgggagaggagtaaccttaacgtggcagcagggtggaataatcagacacaggggtcggccctatggggcccaccgttaccctggctttttttttttttttttggctctgaatgcattggagagctctccaagcatgcagggccctgccctggtgaacctgcttgcgtgtggcgggagaggctgcttcctttgtgcctgctcctgcagatgctttttggggaccacggatggcaaggttgggttaagaggctcccacctgggcagcctataaaaactagggatttctgagaaactggttcgttggggctgctcggggctccagaattggcatttccaagccccgcaggcacctgccggaggtcggaggacccctggtgaaagcagggtccgggccagagtgtggcctgtgcaccgtccacggacacgggtgccttcggt

SEQ ID NO: 18116 - DNA, 1581 bp, Artificial sequence
  DNA replication origin
aggagtccagggcctgcacccggcagccaagccgccggcgccgggcctcgcgacccagtctctccgacacatcctgagccgtgcctgtctggctgccgaagagcaccagaagctgcgggctcggcatcggggtgcgcccggtggtctggtctgagactaaaaactagaaggcagttcccgccggccgggttgcagggaccgctccgccttccgccttccgccgtcgaccggaagtgacgcactagggacgcgccctgtgggggcatggcgtccgatcgaggcgggcgttcacgggcggccagggttgagtcccgggtcggggccgggggattgccggcgcatcagggccgagggctggggctggcggggccgctcgctgcctctcgctcgcagcagcggcggcaggcgcgggcgagggccacggggagaggagacgcagccccgcgggtggcacgctcggccgggccccggcccgcgctcaacgggcgcgatgctcttctcgctccgggagctggtgcagtggctaggcttcgccaccttcgagatcttcgtgcacctgctggccctgttggtgttctctgtgctgctggcactgcgtgtggatggcctggtcccgggcctctcctggtggaacgtgttcgtgcctttcttcgccgctgacgggctcagcacctacttcaccaccatcgtgtccgtgcgcctcttccaggatggagagaagcggctggcggtgctccgccttttctgggtacttacggtcctgagtctcaagttcgtcttcgagatgctgttgtgccagaagctggcggagcagactcgggagctctggttcggcctcattacgtccccgctcttcattctcctgcagctgctcatgatccgcgcctgtcgggtcaactagcctcaccgaggtgccggagagggagcgctggacaactagaatgttgacctcgagccgaggccctacttgcagcgcaccggaggagaggctctctagtctgaaggcaccgccggcttgcgccgagctgagtgccgggtttccctattccaatcctgtttgaaatggtttcttcagcagggcttaaaagagcagccttcatcctgaaaatgtatttccttttgtttaatgctttgagtagataatcctgaattgaggtcatgaggaggccccccaggccagacagtcctgaacccctctgacacttggaaactgaatataagtaaaatgtccaggtggactctgagtatttcctgtggatcctgggaaagtactgttgcacaaaggctgcaaagctggactcaggaatgtcctccaaccagcagcgctgacctaagagctccctgtgccgtctatccagaccagacttcggtagatgcctttgttagatctatcacatgtaaacgagcttgtatctccttccctgtgccacgagagagattggctttttattccagtctaggcagagacagaagaatgttgaataagagcacgattagagtcctgtctggttatctgttgcccaagaaaagaactctgctgtccaggcactgcttggcttactatcccagcaaagactgcag

SEQ ID NO: 18117 - DNA, 1134 bp, Artificial sequence
  DNA replication origin
ggcagcgagcggccccgccagccccagccctcggccctgatgcgccggcaatcccccggccccgacccgggactcaaccctggccgcccgtgaacgcccgcctcgatcggacgccatgcccccacagggcgcgtccctagtgcgtcacttccggtcgacggcggaaggcggaaggcggagcggtccctgcaacccggccggcgggaactgccttctagtttttagtctcagaccagaccaccgggcgcaccccgatgccgagcccgcagcttctggtgctcttcggcagccagacaggcacggctcaggatgtgtcggagagactgggtcgcgaggcccggcgccggcggcttggctgccgggtgcaggccctggactcctacccggtggtgagggctcgctagggcctcggcgtgggggacgagcaggcctggcgtgcccgcctcgcggggtcatcgacccaaaaggcgtcgcattttctctgagagcgggtctttcccttatggcggatttagggaaggaggtttgggaaggggagttcagtttagcacctggaggaggttggaacctgaaagagaagacggtctggctgctcacataaatccctctgccctgtcagcctgagtaaaggagaagggggtcaagttttgggaaggacgcccggtccttacagccggaggtcttacgtgtgtgtgtctttttgttgaggtgaatctgattaacgagcccctggtgatatttgtttgtgcaactacaggccaaggagacccccctgacaacatgaaggtaaggctggcctgatgtggctcctcagatccctgccctcgaccctcaccccgttttcattgcctggcgtctaggtgcagtaaatagctctcctttatctcatgcaccttcagaggtggatttgagagaacgtccgtgagtggggctgggggctccggttgccctctctaataaactcgtcgtagccaccaaatagccttattatccgttttaacctttcttatttttccagggctatctatatgtgcatctagtctgggtcttgtgtgtatttctagactgtatgaccctcagggaacgttgctgaattctctgaccatcttttaagcacatattctattcttggca

SEQ ID NO: 18118 - DNA, 739 bp, Artificial sequence
  DNA replication origin
ggggatccagctgtgaacccagcagccatatttccatcctggcagagttcacactgtagcagaagcagctaacgggcaatgacagtgccagcaaacacctgctgctggggaaagtagcatatgtcacaggagcactgataaggggcatcgagccttatctcacccaaccttggggcccaggcagaggtttctggaagaaaagagtgtaagctgagtcacggaaggatgcgtgagggctagtcaggcaccgaggaagaaggagcagtcagcgcagaggaaaaagatgatttggtttgtgtgaaaagtggaaagcagctcagggtggccaagctgaggagtacactggggcaagaggggaggagaagagaggcaggaagccaggcccagtccaaagagcctgagtaaccacagcaaggcagatgggcttgaaatgaagggttgtcggaactgtaggggtgacacagtcatgttcctaagctagcaaaaccgcactggtctgcaggacagcaggaataatgccatgagatgcacaggacaggcagcagatgctaccgatctgagctgaagtggtggcagaagatagaagtggacacattgcagtggtgtcaggaagagagagtccccgggacatggaacggacccaataggtcaagcagaatcgagacagggatgtgggctctggaaccaagatggatggtggttccatccacagaaatcagagaacacggtgggagtaggg

SEQ ID NO: 18119 - DNA, 917 bp, Artificial sequence
  DNA replication origin
caggtagtcgggagggatggcggcagctgtgtgcgggaagtcacagagcacctaggcaaagagagtctcagggtggctgcagcgtggctgtagctcaggggctgggcctgccgccctcccatctcacctccaggatggtcctgcggggccggttgcagtattcaaagagctcctcctggccttgggcagaactgaactccagcagcttctcccgctccagctcatggagggatagacaggccaggagttcgaagaaggagcggcgaggcacgctggcgatgtccaggtagtgggacacgaggtgccgcatggagcagggctggggcagcctcgtgggggaggagacatctgcagggtgagtgggaggcctccgtgggctgcggcggagcccttggggtgggggcccagggcacgggagagggcagagagtcagggtggccgaggctgggctcacctggctcccgcggctgcagcatgaagagctggtcagggtccaggcccagcacctggcagaaccgctggacatgggcagccgagttggagggctgaatcagcaccacatcaccagcagcaaagctgtgtggaagaagccaccagggctgtggggacgccgcagggaggatgtcggggccccggatagaagtcatcccctgcagcccggcccagcctcctccgaaccccagacccacggcccacctcaccttgccctcctcggtccccagcagtccccacctgatgccagagcccaagatgtcaaactcaatcagccgaacgtcctggaagtgggaggggccggtgactctctggttggagatcatgggtgctaggaagggcttcgactctgacgggggctcctgagagccggggtgagctacccgctgcccctcagagcccgtgctgggtgcctcttggaggaa

SEQ ID NO: 18120 - DNA, 2306 bp, Artificial sequence
  DNA replication origin
ccgggaggagctagaggacgcccacccatccagcacccagcacccagggcaccgggaggagctagaggacgcccatccatccagcacccagcacccagggcaccgggaggagctagaggaaggaaggaagcctgcgctagaagtaaccacccagaggccaccatttactgcaagggtttttctgggaccaggagaggaagaggctgctctggcctgggacacccccactgctctcaaggagctggcatctcagtggcctctgagcccagcctgagccctgtgggagtgcgggggcagtgactggaatgtgctgctgggcaggctgcagcagccgaggtggccccagggcagaggagtgcagcgcagcctcatgggtgccctatgccacccctggtgctcactgggctgctgatgccgtcctgggtcactgcaccggtgaggtggagcggcccaggccaccaccttgactgggaagggggtggggggacgaggacacagctcactgtcagggtgggggagcgcagggctggctgggcagaggctgcagtggggtcaggctcaaagggtgggatccagggtcaacaggagtgcggctgtgctcgggagctggctgttcccagaggaccagctggctggtccgagaggatgacggctgctggccaggagctccctcgtggatgccttcctgggctcccaggaggatggctgtcagagggggcacgggcagccgcgggcctcaggcccacgtctctgtctggaagcgccgtgtctgctggagcctggctagatacgcggctgcgtccgggctgcagagtccaccctcctcctggaagatggacatcagggcttccgagacgtccgctggcatggacttggcgttgctagaggggcaggtcgcagaaggcgcaatgaggcctggcactcaggggctgggcccactcctgctgcacgcaggccagctcaccctgccaggtagaagtatgcaccctggcggtccagcagttcccacacaagcgaccccagctcccggagccggtgctgcacatatactttctgctcctgtagggcagagaacagggctgggggctgagccggagctccctcccctcctttcccagcccctgagcatacacacctgttcccgggagaaggcagggatgagggtcagacagtcccgcttctccagctcctgccactcagcctcccagtagaagtcttggtcccgccagcggcagccaaaaaacaagaagtttcctagggaaatacagggtgctcttggccacaggtccttgaggttcagctggggagccctggcaacaaccctgcccggagaccctgggtgctcaccagtctggccctgggccacacgctcctggatggctgctcggaagggggctaccccagtgccaggccccaccatgatcacaggtgtgtctggtgtctctgggaaggccagactcccaggccgcacccagaggggcacccggacaggtcctattgcaggaaggaggtggcatgaagaggatcaaagacctgtgctgagtctgctggggccctagcccagcatttgcatgagcatgggagagaaggggatatgggcccacggcccccaccctgggagcaggggtcaccttgcccagggtccagggatgccagccaggaggagcagaggccccggcggggctccttgaggcgagtctggaactgcactacagccacgaggatctgcagccgtgaggggtgagtctggggaggacggcggggtgggggtggtggaacaaggctgccctcacctgtgcctgggccgtgggccccacctacctcccgcagaggcagtccgactgggggaacgtcacctggtcagagggcagcccctgcttacaaaaccccacagccccggtcccagctttcccagggccggtcctgggctccaaccaccaggcccctcaccagcagcgaggaggcgatggagaaggccctcggccggataacggggatgaggtccaacaggtagtcgggagggatggcggcagctgtgtgcgggaagtcacagagcacctaggcaaagagagtctcagggtggctgcagcgtggctgtagctcaggggctgggcctgccgccctcccatctcacctccaggatggtcctgcggggccggttgcagtattcaaagagctcctcctggccttgggcagaactgaactccagcagcttctcccgctccagctcatggagggatagacaggccaggagttcgaagaaggagcggcgaggcacgctggcgatgtccaggtagtgggacacg

SEQ ID NO: 18121 - DNA, 1393 bp, Artificial sequence
  DNA replication origin
ccgcgtatctagccaggctccagcagacacggcgcttccagacagagacgtgggcctgaggcccgcggctgcccgtgccccctctgacagccatcctcctgggagcccaggaaggcatccacgagggagctcctggccagcagccgtcatcctctcggaccagccagctggtcctctgggaacagccagctcccgagcacagccgcactcctgttgaccctggatcccaccctttgagcctgaccccactgcagcctctgcccagccagccctgcgctcccccaccctgacagtgagctgtgtcctcgtccccccacccccttcccagtcaaggtggtggcctgggccgctccacctcaccggtgcagtgacccaggacggcatcagcagcccagtgagcaccaggggtggcatagggcacccatgaggctgcgctgcactcctctgccctggggccacctcggctgctgcagcctgcccagcagcacattccagtcactgcccccgcactcccacagggctcaggctgggctcagaggccactgagatgccagctccttgagagcagtgggggtgtcccaggccagagcagcctcttcctctcctggtcccagaaaaacccttgcagtaaatggtggcctctgggtggttacttctagcgcaggcttccttccttcctctagctcctcccggtgccctgggtgctgggtgctggatggatgggcgtcctctagctcctcccggtgccctgggtgctgggtgctggatgggtgggcgtcctctagctcctcccggtgccctgggtgctgggtgctggatgggtgggcgccacggtgcacccttgttgggctgcctgtgcccgagtggcctctgcagctcttatgtctgcctctaatgggatgtgcgccctgactgcctcgttcttaagggcatagtgggtcggctaagatctgatcgccaggactgcgttctgggcaggtgctgggaaggcggaaccaagccgtccgtgccgctagggagccgagactgccggaaagaggagcggcaggagggggcgtggttgtgcagccccacccccgggaggggctttaggcactgggaaggaaagtcctgttggaggagttcggtggctgttcacacccgcctcgctgtcttggagtcttgatctgtcgtcggcgggtcgctggcacaggactaaacatggctgaggctgggctccagccagatctggctggggacagcaccgcgtgggcccaggatccacccagagcaggcaggccttgctggggccccagtcaagtccacttccagtgaggagagccagccgggaggtcagtgccagagctctggtggagcccagaccctgccttccctgagggccgcccctgtcgcc

SEQ ID NO: 18122 - DNA, 2024 bp, Artificial sequence
  DNA replication origin
cctgaggcgctgacggccccatccgggggtcagtggggggctgagcccgagggcagctgctaccagaccttccggcagtactgtggggccgcgtgcacctgccacgtgcggaacccactgtccgcctgctccatcatgtagtagcgcctgcctgcccgccactgcccgctgagcctcgctcgctgcttcttcagggacccggccctgccctgccgcccgctgacccttccttccccaccatggcttccggccccaccccgagtggcattgtcgctgcagccaactttgccattaaaactctttgccaaagtttgcacctgttcctggactgaagcttgctcctgtgggctgtgctcaggcctgggcctagggtgggcacccagggctgcaacccagagagggcccagcttggagctgccagagagaggcccagcgctgctcgggttgggcctgccctgcgcactgggggccaggctgggctgtgcatgcagctcaggagggccgggtgggctgtgtcggtgcaaacccccacacgtacagagtgggctgcttgtgtgcgcctggcaggactacctggtgggtgtgcagagacaccccagctgggcagagaggacattttcaatggtgtgggggtgcctgtgtgggggacaactcagttgatttccctcctggtgcccatctggacctgagcacccacctgggtcttccagggttgtgtgggagtagcctttgggcatgtgcaggagttagggacaaagactggctgaaatggtggtaggggaataaggacccagcgcctcctgtctggcacctggaccacttgggtgggaggaagagcccgccccaggctgggtgcggtgtctcacgcctgtaatcccagcactttgggaggccaaggcggatggatcacctgaggtcaggagttcaaaaccaggctggccaacgtggtgaaacctcttctctactaaaaatacaaaaaaaattatccaggtgtggtggtgcatgtctgtaatcccagctattcaggagggtgaggcaaaagaattgcttgaactcgggaggtggaggttgcagtgagcagagatcgtgccactgcactctagcctgagtgactaagtgacgctctgtctcaaaaaaaaaaaaaaaaaaaaaaagcccgcccagatggtgaagatggggtaacaaagacaagtagtaacaatggcatccccaggagctggtttattgaaagctgcttcacgttccaggatcagtcctccatctctcgctgggccacctgatgtctccatcccaggtgtggtgacatgagggtgtgcaggggcagagcttatgttccaaggcctgggtgggcccttgtcccctgcaacacaggccagcgccaacccccacctggtctgggcctgatcaagtggggagaggagcctttgcaggctgaattttcgcagcatggacccctcccccggctggcctgaccttcagggacacacactggcccttatctgaacacagggtgggcggagtccctgccctctccaaggaactgactcactgctgtatctctgtttgctttcatgcctgctgtgctcagctggccctcggaggggaagtgtggccggcgtcagcccgtggccagtacggtgcccgtctgccgcagggtgaatggggtcctgctcacagactttcctgctgggctggcctcctccaggagctgtccttgggcgctggtgtccttgggttcagctagtgtctgggcagcagtgcagccatggactctggcagggtcaggcctctgggtagccctggttgtgggttcagcaatgggaggtcttgattgaaggccactgccctggacccaaccttgggtttttccagcctggtcatcaggcctcacagcacccaggcatggggacgtgggccagtctgggccccctggcctgttggcggcggggctgtcctgggctctgctcagcggccagagcggtccaggagcacgaagagcagtcccagcagcaggagcggcgtga

SEQ ID NO: 18123 - DNA, 988 bp, Artificial sequence
  DNA replication origin
tccagatgggcaccaggagggaaatcaactgagttgtcccccacacaggcacccccacaccattgaaaatgtcctctctgcccagctggggtgtctctgcacacccaccaggtagtcctgccaggcgcacacaagcagcccactctgtacgtgtgggggtttgcaccgacacagcccacccggccctcctgagctgcatgcacagcccagcctggcccccagtgcgcagggcaggcccaacccgagcagcgctgggcctctctctggcagctccaagctgggccctctctgggttgcagccctgggtgcccaccctaggcccaggcctgagcacagcccacaggagcaagcttcagtccaggaacaggtgcaaactttggcaaagagttttaatggcaaagttggctgcagcgacaatgccactcggggtggggccggaagccatggtggggaaggaagggtcagcgggcggcagggcagggccgggtccctgaagaagcagcgagcgaggctcagcgggcagtggcgggcaggcaggcgctactacatgatggagcaggcggacagtgggttccgcacgtggcaggtgcacgcggccccacagtactgccggaaggtctggtagcagctgccctcgggctcagccccccactgacccccggatggggccgtcagcgcctcaggcggcaggcggctcaggatggacgtgttgacagccagcgcggccaggccgtagtcggtgaagagcacagtctcacggcggcaggtggggcaggagatgaacttgtacttggggcaggactcgtagagaatctgcaggcactgctcacacacagagtgcaggcaggacagcacgcggggcctccgctgggtgacattgtaggagtgcccacaggtggggcactccaggggctcgcctgccgccgccgaagaagccgccgaggccgaggggccaggccgaatcacgtactgattcacaatgacctca

SEQ ID NO: 18124 - DNA, 1405 bp, Artificial sequence
  DNA replication origin
aaaggcaggcccggacgcggcgcccgcgcctcggcccggcagctcggggggctccggcggctccggcggcggccgcagcgacctcaggcgatggcggggcccgggcggcaccgaggggcgcgggcgcgggcgtggggcgcggggcgcgggtttcggcacggcggcgacggcggcaggtgcgtgcggagcgtggcgcgctctgcggcggaggcgcggggaccgcagtgcgcgcggcgcccgcccgcgcccgcagcgccaccccccgtctggggacccgcgcggggtccgcggggcggggccagcctcccggccgcccctcggtccgctcccggcgtcgctctcgcccgcggactgcgtggggggcaggacccccgcgtcgcccccagttctctccaggctgatcctgggtcctggtcaagcccccgcccccccagattcaggaggagaatccggctgttctcctccctcacagtaggaggcctcaggactctggagtgagagggaggggacctgcgcggaggatcccaggggagctggttccagggcccaccggtgccttcccccgtccccggccccccgccccatgggaaggccccgagtcctccagctccgcctgtgcccggtgccgtagctcagatagatcgctgtgactctaaggggcaagagcggggcgggcggagcggatcagaaggccgaggccggtggacggacgggtccggtgggagtgcgcgaaggacaggctggcagcccagtgcggggtggaggcggccctgaggaccgcacctgcccggacagggtggcccctggcactccagcgcgcaggcccgggcctctccgcttcctcacccggggcttccctgccctcctgggtccgccttctgcctgtggagccctcgggcttgctggtcaccgtgaggcaggggaccagggcttcgagggcctccgctgccacgctgtgaccagctctggccccgcacctggccctggacatcctggcctccttcagctcctctctccgctggactggccagaccgcacctgctctaggcagagccccagggcctgcagagtgctgagcccagaggggacggtgccgctggtgcgggagctcgcgtgggcaaaacaggctggaggagcagccctgcgcatagggtctggcttggcccctctgtggggcctcgggcgagtgtcactcagaagagcaatagggagaggtgtgcgggtgacaggggcgctgctggaggggtccttacggggccctggcaagatggtggggcaactgaggcagcctgggcctggggagggccgggagcccagctccgccgcagactctgctcaccgacccggcgtgcgcccgaggaagcaccaggccgcaggccccgccccctcagcgagaccccacccc

SEQ ID NO: 18125 - DNA, 883 bp, Artificial sequence
  DNA replication origin
gaccagggcttcgagggcctccgctgccacgctgtgaccagctctggccccgcacctggccctggacatcctggcctccttcagctcctctctccgctggactggccagaccgcacctgctctaggcagagccccagggcctgcagagtgctgagcccagaggggacggtgccgctggtgcgggagctcgcgtgggcaaaacaggctggaggagcagccctgcgcatagggtctggcttggcccctctgtggggcctcgggcgagtgtcactcagaagagcaatagggagaggtgtgcgggtgacaggggcgctgctggaggggtccttacggggccctggcaagatggtggggcaactgaggcagcctgggcctggggagggccgggagcccagctccgccgcagactctgctcaccgacccggcgtgcgcccgaggaagcaccaggccgcaggccccgccccctcagcgagaccccaccccgtaggggatgagatcccgcccccgccacgaggccccgccccccaggccaggccttttcagacccgccattcagagctggagaaccccaagccgagtattggtcacatccgaaccgggtctttcgggaaaccccggagcgcgtgggcttctgggcaataatatttccacggccggttcctgccttgtttgcgcatgcgccataggcgccactcaagtggcaggcagggaggtgggcgggacttccggcgcctgcgcagtggacttccgtcgccggcctctcaagttttgggtccccaggagcacccagttctccccaaatcggggccgggttgcctgaactcatgtcccgaccggtctgactggccctacacaggccacgtctgactggaacccgcccttc

SEQ ID NO: 18126 - DNA, 1102 bp, Artificial sequence
  DNA replication origin
attgcctgggccttaaggtaatcaggggtgtccctctccagccaggacctgggattccgtttcaggagctcgggctgaacggccaccttcctggtgggtctgagccccagtgcctggtgtgaaggggcagacgcccatgacaacagccaccccgcatgtcccggcatgtcccggcactgtgtgagccacatttgctgaagtctgggtcctggccctggcagggtgggctgggctaggagatgacacagcagcagcagctgtggcagcggcagaagggggggcagtggcagcagtggcagcaggggcagcagcagcagtggtgggcgatgtcatccccgcgccccgcgggcggagggccagcgtaggtcagtccggcctggcgctgactgctgctgtaggggttgccaggctgctgccaggcctgctggttctggatgggggcagccccctggttacccttggcgcccttgggccctgggacctcggtcggctgcaagaggtgggttggctctggggcacagggccccactggcaggggctgcatctccgaggatgaggaacaggtggaagccacctctaactgctgccccaggtcaggccgcaggtgagcccgggggatgctgatgtgggcatatgggttcttgacgaccatctcttgggggtccatggtccagcctgcaggggtgggcagagaagacagacatgaactcagtggagtgggatggctgcccacgagcctgcggcccaggaaagcccccaccaggagcagcgtgcctcgtccaagctcagcatccccaaggcatcagtgccggggtgccatcacctccaaatgtgtgtgcaaggctagtgtcatgggtgtgagccaagtgtgagcaagcagcaagggccggtgtctcccagctgccacccctgccagggatcctccccctcccctggtggcattggtcctgggatggagctgggaatggggtcggggaggctgagagatgggagagaagggggctgaccctgcagtgcccctgagttcagggcagtcccggcggccaagggcttacctgtggtggcaacacggcagtctgtcctctcggtcttctgagctcta

SEQ ID NO: 18127 - DNA, 1917 bp, Artificial sequence
  DNA replication origin
ggatgtgcctacgttgacacccatgatgatgggcacagacacccggacagtcagcactgctggtgggggggctgagtcagcctgcggcccaccctgccccccccaccacccggggagggagtgtgcacccacgcttagcagccaccatgctgaccacgatggaggaggacgtgctggaactctgcaccagggctgtgaccagcacgccaatgaccagtccagccacagggttggacagcaccacgttgtccttgaagatgtctccggccactttgcctacaccggcaagagaggtgcgctgaagctgcggagggctggttgcccgccccgccctgggcacccgtcccgtcactcactgcccagcagctggaaggcggagctgaggacgtccagagagcagatgaagaagtacaggctgccgaggagcccgcaggccttgaggacgctgccggccacgcggcgcagcctgccggccacgcggagctctgaggacacagggcaggctgtccctggctggccctccaccctgacaggtctccctcccaggcccctcattctctgccccctctctcctctgtctccaacagggctgggtcccatttcctcctcttccgtaacccccagggcagggcccgggttcctgcctttccaagccagaagcccttgggaccctccctcgcaggagcaggaggggagggacggatgggcagaggtggccggtctgccccaggacagcacagacacccggttgagggacacgtgtctccccagagggggcctgcatggcggagttccccacacacagcctgtttgggcaggccccaccctgctctgtctccccagtcccgttggggacagaggcctgccagcctgccacccccggaacctccagacccacctttccagggctggcttgtgtccttcagctgagggagggtccaggggtctgtgtccccttcctccaagactggagcagaactggaggtccctgtggaggtagaattgagtacggctgtttccaggaccacctccctccaactgggggcacaagggcacaggccggaggacgggctgaggcgtaagaggcctggagtgagggacagaaacggaacggggaagatggggctccagctgggctggacctgagtggaggcgtcatgagccctgtgggttccccgggaggcccgcaggaaacctggcctgtctctgcccagtgcctggggggtgggtggtcagactggtgaaggcctggggcacaggggccactggtaccttcattcctcagagtcttttccactaggtcaaccgcgtccagagtggggtgggggacctggctgccgggaagggaactcggcatggatttcgggcagggacagacccaggcccaggtctagatctgctgggggggacgcgcgtgtcagagacatttcctcctgccccggccctgtcctcacaagctggattcacacccctgggtcccctgaattgagcccttggccgccaccctccctctctacgccctgcaggcctcagtgaccatccccctttctccatccacagggggatggctacaatgacctcaggcagttgtcaggcgagcccagtccagtttcaggggtagactcgaaggggctccagctccccggctcccttgctggtcctgactggaaggctagtgccgagggtgcaggccatgagctggggaacctggggacctcccctatctggtgtcatcggggacactgtggatggtcccgacttagactttggcatttgatactaaacagtgacgtctcggcttgataagggccccacgccctggtgatggggagcaggtggggtcctcacaccacttcaaggctcctggccccgaagctgctgccttagcctcctgggcctggtcaccccacccctggg

SEQ ID NO: 18128 - DNA, 1113 bp, Artificial sequence
  DNA replication origin
ccaaacaggctgtgtgtggggaactccgccatgcaggccccctctggggagacacgtgtccctcaaccgggtgtctgtgctgtcctggggcagaccggccacctctgcccatccgtccctcccctcctgctcctgcgagggagggtcccaagggcttctggcttggaaaggcaggaacccgggccctgccctgggggttacggaagaggaggaaatgggacccagccctgttggagacagaggagagagggggcagagaatgaggggcctgggagggagacctgtcagggtggagggccagccagggacagcctgccctgtgtcctcagagctccgcgtggccggcaggctgcgccgcgtggccggcagcgtcctcaaggcctgcgggctcctcggcagcctgtacttcttcatctgctctctggacgtcctcagctccgccttccagctgctgggcagtgagtgacgggacgggtgcccagggcggggcgggcaaccagccctccgcagcttcagcgcacctctcttgccggtgtaggcaaagtggccggagacatcttcaaggacaacgtggtgctgtccaaccctgtggctggactggtcattggcgtgctggtcacagccctggtgcagagttccagcacgtcctcctccatcgtggtcagcatggtggctgctaagcgtgggtgcacactccctccccgggtggtggggggggcagggtgggccgcaggctgactcagcccccccaccagcagtgctgactgtccgggtgtctgtgcccatcatcatgggtgtcaacgtaggcacatccatcaccagcaccctggtctcaatggcgcagtcaggggaccgggatgaatttcagaggtgagttgtgggtggaagggctgggctggggctgcagtggcagccccagcccgggcccccccacctgaccctgcccactctctgcggccacagggctttcagcggctcggcggtgcacgggatcttcaactggctcacagtgctggtcctgctgccactggagagcgccacggccctgctggagaggctaagtgagctagccctgggtgccgccagcctgacacccagggcgcaggcgcccga

SEQ ID NO: 18129 - DNA, 970 bp, Artificial sequence
  DNA replication origin
gacggccaggtagccgccgagccagcccagcgggaaggggaagtctgtgggggatgccgggtcagccctggccagcgcccacaaggagggccaggtagcccccgagtcagcctggtgggaaggggaagtctatgggggatgctgggtcagccctggccaccgcacctcctcccacgccctcacccgcattgatgactgtcctcacgacctgggccacgcggccgcgcagcacagagttgagcagcttgactatgaggaccaggcagccgcagagcaccagcagggagccggccagcaggatgcagcccacggccaggtccgtgagctccgtgcccgcaaacaggtggcggcctgggggcagggcaggggcaggtgagggggagcctggggggtgggccggggtgggccgggcctcacagggcagcctgtccgccggggctgtgctgttcctctccatgtaggggccggtgagggggagtgtggggggtgtagggggcttggggtgggccgggcctcacagggcagcctgtccgccggggctgtgctgttcttctctgtgcacgggccgaaggcgccacagctgctgttctcctgggtctggggagggcagggaggactcaggacaggctcagtgggcagacagaggtcagagggctcgaggtgagggtgggtggggcgggatgactcagcaggtgggaggttgggggtcagtgagggcctagggttgggtgcctcaccggctgccccgtggtgccgcaccagtgcttaatgagactgctgttagtggcgttgcctgtggcactgctcatgatcatgtcggagtccaactgggggccagaggggtcgtgacggtgtgctgcaccctctctcaggactcacccggggctctggcgcccgcggggtccagcccagccctgcccactgctgccctctcctcccctgtcccaggacagggcccagaccctccgct

SEQ ID NO: 18130 - DNA, 1535 bp, Artificial sequence
  DNA replication origin
ggtaacgggcggtcaccaccccgaagtgcctggccagcgggatgggcagccgcagtgcaggcaccaggtaccacagcaggatgccggccaggttgaagaagaagtggatgagggcgacctgggggcgagggggctgtcaggggcctgggcccaacgaggtggggtcaccaggggccccggacccctgccctcctccaccctacagaaggagcgccaagtctgaagttcatcctgcttcacggatgagatggccgtctgggaggcgggctgtggccagatgtggacatgttccccagcacgcctcccgcacgctcctgggagctgcagtccagcccagcacccccgagcactgactgcatcactgctgccctcaagggggacctgcgggggaagcaccttccgacctggctctgcctgtgcctcctgccaagagaccccgtctcctcagtccccagtgtgctgagcctgcacagtccaggccctgcggggaggaggcacagggccacaggaggggagaacagtgtcacgggcccctccaggggctgccggacttggaggagtccacacacaggtgcagtctggagggcttcctgcagggggtggagcaggaccctgcactgggagggtctaagtggatagagacagggcagaggcaagaagaacgagcgtgggttccagggggtgccgcacttgtctcttcctgtcagcggcggtgcagcatgacccggagtttcgggagctgaacctgttgggcctccgggcagcaggccgcagacgggctgttttagagggagaaccagctggactaaatgagactggggttggggcacagagctgggggctcagactgggggaagtgtcctggaggcagaatcacagccctggcagcggcagggcagggcccagcatcggtgggactcggcctttgcagatgtggaatgggggctgggagggtcgtccagatggggacctgctggaggtgagtggctgctccttgagggagcaggggttgggggaaagcatctgagggtgctggaatagaggggcttagagccccctgagatgctgggggcaggcccccagggacacagcaaagagctgagaaaatgtggaagtgaggaggtctcaagggaggagacgcagggagggtgtgaaatgtgtgcaggacctgtggggtccaaggaggcagagcagcagggctgaggctggcggccagggaaggggtccaggaaggcgggggcacagccagcctagggccccggggctggtgacacactcctgtctgtggggctgagaggaagctggccagttctggcagcggggcagggtggacagtacctgcagggcgctgagcatcctgtctgcggggctggccagggcagccagcagggctgtggtagtggtgccgatgttggagcccagtaagagggggtacgcccggtccagactgatcaccccgacccctgggggaactgggagtcaccacaggaccccagcccgagcccccgttcccgaggcctctgtcctgcctgctc

SEQ ID NO: 18131 - DNA, 1496 bp, Artificial sequence
  DNA replication origin
ggcaggcgtggctgtgggagtgctgggcacctgccctcctcctcctgcagctgtcggaggatccacaacgaaggctctgtttactggtggccatggtcccagtgggagggtgtgttaccgccaggcagggacagcaggcagacagtattggctgccttaaaggaccagacgcccagcctttgtgggaggcctcacctgccctggaaggacaggtgcatggggtgcttcctccctctctccacaagggcctcactgatccccccccaaaggacaggggagctccccggcccctcaggctccccagggagctagccaggcttgtcccctacaggggtgccagacggttctatgaggctgatgtcaggtccacaggggcgtcctagaatcacagggctgtgagaaccaaagctctagctgctgggggtcccattctcactggagcccacccctgaggcacccctggctcccagagcaggtggtcacctccctcggtaggtgaaaccaaggcccaggaggcctaagagtttgaggggtggctggggcagaggacccagggaagactgggggccaagggcacagagggtctgggggtcatgagcaggggcaaagggaaactgagggcagaaaagaacagagccacagaggagaagtggccgtggggccccctcaggcctcatcttcctgagtggctgcacctctatcccctagtggggtctgaccaggcaatcctgggaggctctgggaagagagctgccccccaacagggctgcagttctggaagggagaacgtgactggccacagcagcagactcaaatgagcaaactagacctgtccctgatgggaccgtcccctcacccacccgtctctgtgtgcctgaatgaatgctccagttctggggtaacccaaggctttcttcccttggcgggagtgggggttgggttagggctgtgggcagctctgggctagaggtggcaggagccccccctcaacttcctaggtgtccagttacccattggctggcagacaagccttcctgtgtggaaacccgaccacacagcagagggagggccccctggcccccaagtcctccccatgggtgctgtccgccctcctgggcccaccccacggacaggccttcccgggacagggtctcattctccgtggcagtgggaggcctcagtgtgccccagcctggcgggtgagactggcttcctggtgggttctgggagctgagcacctgccgtggcccagccctgcagagaagtgtccccgaggggcccagcccaggaccggctgagagacacagagggcagacagacaggtggtgcctctgggaccacctggccctccaagccgtcagggtcccttctcacaccccacgcacctgatgggactccagtccccaccccaaccatgacatccgccggggcagaggagctccgggatcccccacaccctgcaccaccggccctgctccctgctggctgggctctcc

SEQ ID NO: 18132 - DNA, 981 bp, Artificial sequence
  DNA replication origin
gagcacagctgcaggccctcgccccagaaggacaatgctgatccccgcgcatgctccggtgctgcgtgtcccgagttctggtatcgcgcattatgtggtgaagacagaggtgcagtccctccaggaagagagaaataaataagcagatgttgtttccaacagcctccaattgggagacagatgcccagtggccagagcacaggagactgtcagggccgacctgatggtgtaatttatttaaaatgctacaaaaatacagccaggtgcagtggctcatgcctgtaatcccagcactttgggaggccgaggcgaatgaatcacaaggtcagttccagaccagcctggccaagatggtgaaaccccatctctattaaaaatacagaaattagccgggcgtggtggcgggcgcctgtaatcccagctactcgggaggctgaggcaggagaatcgcttgaacccgggagatggaggttgcagtgagccgagatcatgccactgcactccagcctgagcgacggagccagactctgtctcaaaaaaaaaaaaaaaaaaaaatagccaggcgtggtggtgcacacctgtagttccagctacttgggaaggtgaggcaggcgaattgcttgaaccggggaggcagaggttgcagcgagctgagattgcgccactgcactccagcctaggcgacaagagcaaaactccatctcaaaaaaaaaagaaaaaagctacaaaaatgtagaaggcacggcggctcattcccgtaaatccgagcacttggggaggccgaggcgggcggatcacttgaggtcaggagtttcagaccagcttggccaacatggtgaaatcccatttctaccaaaaatacaaaaattagcggcgtggtggtgggtgcctgcagtcccacctactggggaggctgaggcagaagaatcgcttgaacctgggggggggcggggagccaagatcgcgccactgcactccagc

SEQ ID NO: 18133 - DNA, 885 bp, Artificial sequence
  DNA replication origin
tgcggggacgggagggcgtcagccaaggcaggggccgcggggtccccggagggcggtcggggaaggggccggggcctcaccggtggcctcattgtagtacacgttgatgcgttccagctgcaggtcgctgtccccgtggtaggtgcccgtggggtcgatgccgtgctcatcgctgatcacctcccaaaactacaagggacgcgggcgggcccgggcgggccggggctgagtcaccgcggccggtgcgcagggaggcagccccgccccggacgggcgcggcagcccggccctccccgcccctcccccgccccgcgcgccctggccgccgggttcctgggggcttcggtcgcccggctcggccaattccccgcggagggggcccggcggccgcaatgcgggggcgccgcccggccgctgctgccgccatcttccccggccgcccgcccacaccgcccggcaggcccgcctggccccagcgccccggcaacttaccttggcgccgatttggttgccgcactgcccggcctgcaagtgcacgatttccctcatgatggcggcggcggcggcggggaagcaggaggaagtagacaaacagcagcagaagagcgggcgcgcagagtgctacaaccgacgctccgccaacgcttatataccctccctgcccgcctccgctagtctcggaatgggctgccagaacgaggctggcaagctccctcgtttgattggccttgcccccgtcaatcaagctgcctaaggtccgcctttttaagccagtttggtctttattggtcagccgcagcctcctatctccctatcacaatccccctcctggcgccgcagtgctccgtccattgggtgtttcaaatgattgatttgccgtctcat

SEQ ID NO: 18134 - DNA, 1467 bp, Artificial sequence
  DNA replication origin
ggccgccgggccccctccgcggggaattggccgagccgggcgaccgaagcccccaggaacccggcggccagggcgcgcggggcgggggaggggcggggagggccgggctgccgcgcccgtccggggcggggctgcctccctgcgcaccggccgcggtgactcagccccggcccgcccgggcccgcccgcgtcccttgtagttttgggaggtgatcagcgatgagcacggcatcgaccccacgggcacctaccacggggacagcgacctgcagctggaacgcatcaacgtgtactacaatgaggccaccggtgaggccccggccccttccccgaccgccctccggggaccccgcggcccctgccttggctgacgccctcccgtccccgcaggcggcaagtacgtgccccgcgccgtgctcgtggatctggagcccggcaccatggactccgtgcgctcggggcccttcgggcagatcttccggccggacaacttcgttttcggtgagccgtggctggggactgggcggcggctcaaaggtcaaggggctgctccaagggcaccgccgtgggaactgcgcagccggggcccctggacgccctcctcttctctgagccactcaatcccctctactaaatcggctttgggagcaaggtccagctgtctgccgaggcgaggagccgccacacacgtaatctccctgcagggagctgagctggggcagtggctgttcctctgtccttgggaattggcagtggcccccccggggaggggtttgttaagctgtcaggtttggcccctgacttaattcgtagcagggcaggctgccgtcttttggctttgaagggtccgtttgctctacctccagggtgaattctgtggtcagctcacaccatgtcactcggcttttttcgcatggcggtgaccagtagtgctgtctacctggctgacaaatgattagctgtgttctctcacaggtcagagtggtgctgggaacaactgggccaaggggcactacacagaaggcgcggagctggtggactcggtgctggatgttgtgagaaaggaggctgagagctgtgactgcctgcagggtttccagctgacccactccctgggtggggggactgggtctgggatgggtaccctcctcatcagcaagatccgggaggagtacccagacaggatcatgaacacgtttagtgtggtgccttcgcccaaagtgtcagacacagtggtggagccctacaacgccaccctctcagtccaccagctcgtagaaaacacagacgagacctactgcattgataacgaagctctctacgacatttgcttcagaaccctaaagctgaccacgcccacctatggtgacctgaaccacctggtgtctgctaccatgagtggggtcaccacctgcctgcgcttcccaggccagctcaatgctgacctgcggaagctggctgtgaaca

SEQ ID NO: 18135 - DNA, 693 bp, Artificial sequence
  DNA replication origin
gggcccaggaaggctccctggaggaagaggaggagccgccaccccatctggatttccacttaagggaaaagcaaatccacatcagatgggtctgacaccagaggcaggccgggccttggagcccagccagggctggggtgtgagggcctacctctcacctgggggcacagaggctagagggtgtcacagatggccgggctgccagagctgcaaaggaacagccagcctgtgtgagcaagagcccgtgtgggcaccagggccctcactgtgtggtctctggagctgaccaccagttggtcccagccctgaccttggcccagaatccaccagggcagggcctgtgaacagggccaacttggggccctcctccgccctctctggatgcctccccttcagcactgggcctgccaggcagacagatggacacgtgcttgaggaaacacgggttttatctgggcgaggggttcacgcctgtgctccggggcccctgcccaggttgtgccgggttcagagttgactggctgccagtggaacagagtgtactttgctaatgaagcccttgtcattggacagataggctcctccaggtcctccctgccctgtaataaacgttgccaccgtgaatggtgctgctggacatccatcctctccttgagaaggtgcgtgggggaaatgctctctcagtgtccggct
